United States Patent Application Publication US 2026/0265762 A1 - sequence listing, part 3

SEQ ID NO: 2048 - protein, 2096 aa, synthetic construct
MPAAKRVKLDGGDKKYSIGLDIGTNSVGWAVITDEYKVPSKKFKVLGNTDRHSIKKNLIGALLFDSGETAEATRLKRTARRRYTRRKNRICYLQEIFSNEMAKVDDSFFHRLEESFLVEEDKKHERHPIFGNIVDEVAYHEKYPTIYHLRKKLVDSTDKADLRLIYLALAHMIKFRGHFLIEGDLNPDNSDVDKLFIQLVQTYNQLFEENPINASGVDAKAILSARLSKSRRLENLIAQLPGEKKNGLFGNLIALSLGLTPNFKSNFDLAEDAKLQLSKDTYDDDLDNLLAQIGDQYADLFLAAKNLSDAILLSDILRVNTEITKAPLSASMIKRYDEHHQDLTLLKALVRQQLPEKYKEIFFDQSKNGYAGYIDGGASQEEFYKFIKPILEKMDGTEELLVKLNREDLLRKQRTFDNGSIPHQIHLGELHAILRRQEDFYPFLKDNREKIEKILTFRIPYYVGPLARGNSRFAWMTRKSEETITPWNFEEVVDKGASAQSFIERMTNFDKNLPNEKVLPKHSLLYEYFTVYNELTKVKYVTEGMRKPAFLSGEQKKAIVDLLFKTNRKVTVKQLKEDYFKKIECFDSVEISGVEDRFNASLGTYHDLLKIIKDKDFLDNEENEDILEDIVLTLTLFEDREMIEERLKTYAHLFDDKVMKQLKRRRYTGWGRLSRKLINGIRDKQSGKTILDFLKSDGFANRNFMQLIHDDSLTFKEDIQKAQVSGQGDSLHEHIANLAGSPAIKKGILQTVKVVDELVKVMGRHKPENIVIEMARENQTTQKGQKNSRERMKRIEEGIKELGSQILKEHPVENTQLQNEKLYLYYLQNGRDMYVDQELDINRLSDYDVDHIVPQSFLKDDSIDNKVLTRSDKARGKSDNVPSEEVVKKMKNYWRQLLNAKLITQRKFDNLTKAERGGLSELDKAGFIKRQLVETRQITKHVAQILDSRMNTKYDENDKLIREVKVITLKSKLVSDFRKDFQFYKVREINNYHHAHDAYLNAVVGTALIKKYPKLESEFVYGDYKVYDVRKMIAKSEQEIGKATAKYFFYSNIMNFFKTEITLANGEIRKRPLIETNGETGEIVWDKGRDFATVRKVLSMPQVNIVKKTEVQTGGFSKESILPKRNSDKLIARKKDWDPKKYGGFDSPTVAYSVLVVAKVEKGKSKKLKSVKELLGITIMERSSFEKNPIDFLEAKGYKEVKKDLIIKLPKYSLFELENGRKRMLASAGELQKGNELALPSKYVNFLYLASHYEKLKGSPEDNEQKQLFVEQHKHYLDEIIEQISEFSKRVILADANLDKVLSAYNKHRDKPIREQAENIIHLFTLTNLGAPAAFKYFDTTIDRKRYTSTKEVLDATLIHQSITGLYETRIDLSQLGGDGGPAPGGSEAAAKGGLGIEDEYRLHETSTEPDVSLGSTWLSDFPQAWAETGGMGLAVRQAPLIIPLKATSTPVSIQQYPMSHEARLGIKPHIQRLLDQGILVPCQSPWNTPLLPVKKPGTNDYRPVQDLREVNKRVEDIHPTVPNPYNLLSGLPPSHQWYTVLDLKDAFFCLRLHPTSQPLFAFEWRDPGMGISGQLTWTRLPQGFKNSPTLFNEALHRDLADFRIQHPDLILLQYVDDILLAATSELDCQQGTRALLQTLGDLGYRASAKKAQICQKQVKYLGYLLREGQRWLTEARKETVMGQPVPKTPRQLREFLGKAGFCRLFIPGFAEMAAPLYPLTKPGTLFSWGPDQQKAYQEIKQALLTAPALGLPDLTKPFELFVDEKQGYAKGVLTQKLGPWRRPVAYLSKKLDPVAAGWPPCLRMVAAIAVLTKDAGKLTMGQPLVILAPHAVEALVKQPPDRWLSNARMTHYQAMLLDTDRVQFGPVVALNPATLLPLPEEGAPHDCLEILAETHGTRPDLTDQPIPDADHTWYTDGSSFLQEGQRKAGAAVTTETEVIWAGALPAGTSAQRAELIALTQALKMAEGKRLNVYTDSRYAFATAHIHGEIYRRRGWLTSEGREIKNKSEILALLKALFLPKRLSIIHCLGHQKGDSAEARGNRLADQAAREAAIKTPPDTSTLLIAGKRTADGSEFEKRTADGSEFESPKKKAKVE

SEQ ID NO: 2049 - protein, 2100 aa, synthetic construct
MPAAKRVKLDGGDKKYSIGLDIGTNSVGWAVITDEYKVPSKKFKVLGNTDRHSIKKNLIGALLFDSGETAEATRLKRTARRRYTRRKNRICYLQEIFSNEMAKVDDSFFHRLEESFLVEEDKKHERHPIFGNIVDEVAYHEKYPTIYHLRKKLVDSTDKADLRLIYLALAHMIKFRGHFLIEGDLNPDNSDVDKLFIQLVQTYNQLFEENPINASGVDAKAILSARLSKSRRLENLIAQLPGEKKNGLFGNLIALSLGLTPNFKSNFDLAEDAKLQLSKDTYDDDLDNLLAQIGDQYADLFLAAKNLSDAILLSDILRVNTEITKAPLSASMIKRYDEHHQDLTLLKALVRQQLPEKYKEIFFDQSKNGYAGYIDGGASQEEFYKFIKPILEKMDGTEELLVKLNREDLLRKQRTFDNGSIPHQIHLGELHAILRRQEDFYPFLKDNREKIEKILTFRIPYYVGPLARGNSRFAWMTRKSEETITPWNFEEVVDKGASAQSFIERMTNFDKNLPNEKVLPKHSLLYEYFTVYNELTKVKYVTEGMRKPAFLSGEQKKAIVDLLFKTNRKVTVKQLKEDYFKKIECFDSVEISGVEDRFNASLGTYHDLLKIIKDKDFLDNEENEDILEDIVLTLTLFEDREMIEERLKTYAHLFDDKVMKQLKRRRYTGWGRLSRKLINGIRDKQSGKTILDFLKSDGFANRNFMQLIHDDSLTFKEDIQKAQVSGQGDSLHEHIANLAGSPAIKKGILQTVKVVDELVKVMGRHKPENIVIEMARENQTTQKGQKNSRERMKRIEEGIKELGSQILKEHPVENTQLQNEKLYLYYLQNGRDMYVDQELDINRLSDYDVDHIVPQSFLKDDSIDNKVLTRSDKARGKSDNVPSEEVVKKMKNYWRQLLNAKLITQRKFDNLTKAERGGLSELDKAGFIKRQLVETRQITKHVAQILDSRMNTKYDENDKLIREVKVITLKSKLVSDFRKDFQFYKVREINNYHHAHDAYLNAVVGTALIKKYPKLESEFVYGDYKVYDVRKMIAKSEQEIGKATAKYFFYSNIMNFFKTEITLANGEIRKRPLIETNGETGEIVWDKGRDFATVRKVLSMPQVNIVKKTEVQTGGFSKESILPKRNSDKLIARKKDWDPKKYGGFDSPTVAYSVLVVAKVEKGKSKKLKSVKELLGITIMERSSFEKNPIDFLEAKGYKEVKKDLIIKLPKYSLFELENGRKRMLASAGELQKGNELALPSKYVNFLYLASHYEKLKGSPEDNEQKQLFVEQHKHYLDEIIEQISEFSKRVILADANLDKVLSAYNKHRDKPIREQAENIIHLFTLTNLGAPAAFKYFDTTIDRKRYTSTKEVLDATLIHQSITGLYETRIDLSQLGGDGGEAAAKGGGGSEAAAKGGLGIEDEYRLHETSTEPDVSLGSTWLSDFPQAWAETGGMGLAVRQAPLIIPLKATSTPVSIQQYPMSHEARLGIKPHIQRLLDQGILVPCQSPWNTPLLPVKKPGTNDYRPVQDLREVNKRVEDIHPTVPNPYNLLSGLPPSHQWYTVLDLKDAFFCLRLHPTSQPLFAFEWRDPGMGISGQLTWTRLPQGFKNSPTLFNEALHRDLADFRIQHPDLILLQYVDDILLAATSELDCQQGTRALLQTLGDLGYRASAKKAQICQKQVKYLGYLLREGQRWLTEARKETVMGQPVPKTPRQLREFLGKAGFCRLFIPGFAEMAAPLYPLTKPGTLFSWGPDQQKAYQEIKQALLTAPALGLPDLTKPFELFVDEKQGYAKGVLTQKLGPWRRPVAYLSKKLDPVAAGWPPCLRMVAAIAVLTKDAGKLTMGQPLVILAPHAVEALVKQPPDRWLSNARMTHYQAMLLDTDRVQFGPVVALNPATLLPLPEEGAPHDCLEILAETHGTRPDLTDQPIPDADHTWYTDGSSFLQEGQRKAGAAVTTETEVIWAGALPAGTSAQRAELIALTQALKMAEGKRLNVYTDSRYAFATAHIHGEIYRRRGWLTSEGREIKNKSEILALLKALFLPKRLSIIHCLGHQKGDSAEARGNRLADQAAREAAIKTPPDTSTLLIAGKRTADGSEFEKRTADGSEFESPKKKAKVE

SEQ ID NO: 2050 - protein, 2096 aa, synthetic construct
MPAAKRVKLDGGDKKYSIGLDIGTNSVGWAVITDEYKVPSKKFKVLGNTDRHSIKKNLIGALLFDSGETAEATRLKRTARRRYTRRKNRICYLQEIFSNEMAKVDDSFFHRLEESFLVEEDKKHERHPIFGNIVDEVAYHEKYPTIYHLRKKLVDSTDKADLRLIYLALAHMIKFRGHFLIEGDLNPDNSDVDKLFIQLVQTYNQLFEENPINASGVDAKAILSARLSKSRRLENLIAQLPGEKKNGLFGNLIALSLGLTPNFKSNFDLAEDAKLQLSKDTYDDDLDNLLAQIGDQYADLFLAAKNLSDAILLSDILRVNTEITKAPLSASMIKRYDEHHQDLTLLKALVRQQLPEKYKEIFFDQSKNGYAGYIDGGASQEEFYKFIKPILEKMDGTEELLVKLNREDLLRKQRTFDNGSIPHQIHLGELHAILRRQEDFYPFLKDNREKIEKILTFRIPYYVGPLARGNSRFAWMTRKSEETITPWNFEEVVDKGASAQSFIERMTNFDKNLPNEKVLPKHSLLYEYFTVYNELTKVKYVTEGMRKPAFLSGEQKKAIVDLLFKTNRKVTVKQLKEDYFKKIECFDSVEISGVEDRFNASLGTYHDLLKIIKDKDFLDNEENEDILEDIVLTLTLFEDREMIEERLKTYAHLFDDKVMKQLKRRRYTGWGRLSRKLINGIRDKQSGKTILDFLKSDGFANRNFMQLIHDDSLTFKEDIQKAQVSGQGDSLHEHIANLAGSPAIKKGILQTVKVVDELVKVMGRHKPENIVIEMARENQTTQKGQKNSRERMKRIEEGIKELGSQILKEHPVENTQLQNEKLYLYYLQNGRDMYVDQELDINRLSDYDVDHIVPQSFLKDDSIDNKVLTRSDKARGKSDNVPSEEVVKKMKNYWRQLLNAKLITQRKFDNLTKAERGGLSELDKAGFIKRQLVETRQITKHVAQILDSRMNTKYDENDKLIREVKVITLKSKLVSDFRKDFQFYKVREINNYHHAHDAYLNAVVGTALIKKYPKLESEFVYGDYKVYDVRKMIAKSEQEIGKATAKYFFYSNIMNFFKTEITLANGEIRKRPLIETNGETGEIVWDKGRDFATVRKVLSMPQVNIVKKTEVQTGGFSKESILPKRNSDKLIARKKDWDPKKYGGFDSPTVAYSVLVVAKVEKGKSKKLKSVKELLGITIMERSSFEKNPIDFLEAKGYKEVKKDLIIKLPKYSLFELENGRKRMLASAGELQKGNELALPSKYVNFLYLASHYEKLKGSPEDNEQKQLFVEQHKHYLDEIIEQISEFSKRVILADANLDKVLSAYNKHRDKPIREQAENIIHLFTLTNLGAPAAFKYFDTTIDRKRYTSTKEVLDATLIHQSITGLYETRIDLSQLGGDGGPAPGSSEAAAKGGLGIEDEYRLHETSTEPDVSLGSTWLSDFPQAWAETGGMGLAVRQAPLIIPLKATSTPVSIQQYPMSHEARLGIKPHIQRLLDQGILVPCQSPWNTPLLPVKKPGTNDYRPVQDLREVNKRVEDIHPTVPNPYNLLSGLPPSHQWYTVLDLKDAFFCLRLHPTSQPLFAFEWRDPGMGISGQLTWTRLPQGFKNSPTLFNEALHRDLADFRIQHPDLILLQYVDDILLAATSELDCQQGTRALLQTLGDLGYRASAKKAQICQKQVKYLGYLLREGQRWLTEARKETVMGQPVPKTPRQLREFLGKAGFCRLFIPGFAEMAAPLYPLTKPGTLFSWGPDQQKAYQEIKQALLTAPALGLPDLTKPFELFVDEKQGYAKGVLTQKLGPWRRPVAYLSKKLDPVAAGWPPCLRMVAAIAVLTKDAGKLTMGQPLVILAPHAVEALVKQPPDRWLSNARMTHYQAMLLDTDRVQFGPVVALNPATLLPLPEEGAPHDCLEILAETHGTRPDLTDQPIPDADHTWYTDGSSFLQEGQRKAGAAVTTETEVIWAGALPAGTSAQRAELIALTQALKMAEGKRLNVYTDSRYAFATAHIHGEIYRRRGWLTSEGREIKNKSEILALLKALFLPKRLSIIHCLGHQKGDSAEARGNRLADQAAREAAIKTPPDTSTLLIAGKRTADGSEFEKRTADGSEFESPKKKAKVE

SEQ ID NO: 2051 - protein, 2094 aa, synthetic construct
MPAAKRVKLDGGDKKYSIGLDIGTNSVGWAVITDEYKVPSKKFKVLGNTDRHSIKKNLIGALLFDSGETAEATRLKRTARRRYTRRKNRICYLQEIFSNEMAKVDDSFFHRLEESFLVEEDKKHERHPIFGNIVDEVAYHEKYPTIYHLRKKLVDSTDKADLRLIYLALAHMIKFRGHFLIEGDLNPDNSDVDKLFIQLVQTYNQLFEENPINASGVDAKAILSARLSKSRRLENLIAQLPGEKKNGLFGNLIALSLGLTPNFKSNFDLAEDAKLQLSKDTYDDDLDNLLAQIGDQYADLFLAAKNLSDAILLSDILRVNTEITKAPLSASMIKRYDEHHQDLTLLKALVRQQLPEKYKEIFFDQSKNGYAGYIDGGASQEEFYKFIKPILEKMDGTEELLVKLNREDLLRKQRTFDNGSIPHQIHLGELHAILRRQEDFYPFLKDNREKIEKILTFRIPYYVGPLARGNSRFAWMTRKSEETITPWNFEEVVDKGASAQSFIERMTNFDKNLPNEKVLPKHSLLYEYFTVYNELTKVKYVTEGMRKPAFLSGEQKKAIVDLLFKTNRKVTVKQLKEDYFKKIECFDSVEISGVEDRFNASLGTYHDLLKIIKDKDFLDNEENEDILEDIVLTLTLFEDREMIEERLKTYAHLFDDKVMKQLKRRRYTGWGRLSRKLINGIRDKQSGKTILDFLKSDGFANRNFMQLIHDDSLTFKEDIQKAQVSGQGDSLHEHIANLAGSPAIKKGILQTVKVVDELVKVMGRHKPENIVIEMARENQTTQKGQKNSRERMKRIEEGIKELGSQILKEHPVENTQLQNEKLYLYYLQNGRDMYVDQELDINRLSDYDVDHIVPQSFLKDDSIDNKVLTRSDKARGKSDNVPSEEVVKKMKNYWRQLLNAKLITQRKFDNLTKAERGGLSELDKAGFIKRQLVETRQITKHVAQILDSRMNTKYDENDKLIREVKVITLKSKLVSDFRKDFQFYKVREINNYHHAHDAYLNAVVGTALIKKYPKLESEFVYGDYKVYDVRKMIAKSEQEIGKATAKYFFYSNIMNFFKTEITLANGEIRKRPLIETNGETGEIVWDKGRDFATVRKVLSMPQVNIVKKTEVQTGGFSKESILPKRNSDKLIARKKDWDPKKYGGFDSPTVAYSVLVVAKVEKGKSKKLKSVKELLGITIMERSSFEKNPIDFLEAKGYKEVKKDLIIKLPKYSLFELENGRKRMLASAGELQKGNELALPSKYVNFLYLASHYEKLKGSPEDNEQKQLFVEQHKHYLDEIIEQISEFSKRVILADANLDKVLSAYNKHRDKPIREQAENIIHLFTLTNLGAPAAFKYFDTTIDRKRYTSTKEVLDATLIHQSITGLYETRIDLSQLGGDGGGGSPAPGSSGGLGIEDEYRLHETSTEPDVSLGSTWLSDFPQAWAETGGMGLAVRQAPLIIPLKATSTPVSIQQYPMSHEARLGIKPHIQRLLDQGILVPCQSPWNTPLLPVKKPGTNDYRPVQDLREVNKRVEDIHPTVPNPYNLLSGLPPSHQWYTVLDLKDAFFCLRLHPTSQPLFAFEWRDPGMGISGQLTWTRLPQGFKNSPTLFNEALHRDLADFRIQHPDLILLQYVDDILLAATSELDCQQGTRALLQTLGDLGYRASAKKAQICQKQVKYLGYLLREGQRWLTEARKETVMGQPVPKTPRQLREFLGKAGFCRLFIPGFAEMAAPLYPLTKPGTLFSWGPDQQKAYQEIKQALLTAPALGLPDLTKPFELFVDEKQGYAKGVLTQKLGPWRRPVAYLSKKLDPVAAGWPPCLRMVAAIAVLTKDAGKLTMGQPLVILAPHAVEALVKQPPDRWLSNARMTHYQAMLLDTDRVQFGPVVALNPATLLPLPEEGAPHDCLEILAETHGTRPDLTDQPIPDADHTWYTDGSSFLQEGQRKAGAAVTTETEVIWAGALPAGTSAQRAELIALTQALKMAEGKRLNVYTDSRYAFATAHIHGEIYRRRGWLTSEGREIKNKSEILALLKALFLPKRLSIIHCLGHQKGDSAEARGNRLADQAAREAAIKTPPDTSTLLIAGKRTADGSEFEKRTADGSEFESPKKKAKVE

SEQ ID NO: 2052 - protein, 2096 aa, synthetic construct
MPAAKRVKLDGGDKKYSIGLDIGTNSVGWAVITDEYKVPSKKFKVLGNTDRHSIKKNLIGALLFDSGETAEATRLKRTARRRYTRRKNRICYLQEIFSNEMAKVDDSFFHRLEESFLVEEDKKHERHPIFGNIVDEVAYHEKYPTIYHLRKKLVDSTDKADLRLIYLALAHMIKFRGHFLIEGDLNPDNSDVDKLFIQLVQTYNQLFEENPINASGVDAKAILSARLSKSRRLENLIAQLPGEKKNGLFGNLIALSLGLTPNFKSNFDLAEDAKLQLSKDTYDDDLDNLLAQIGDQYADLFLAAKNLSDAILLSDILRVNTEITKAPLSASMIKRYDEHHQDLTLLKALVRQQLPEKYKEIFFDQSKNGYAGYIDGGASQEEFYKFIKPILEKMDGTEELLVKLNREDLLRKQRTFDNGSIPHQIHLGELHAILRRQEDFYPFLKDNREKIEKILTFRIPYYVGPLARGNSRFAWMTRKSEETITPWNFEEVVDKGASAQSFIERMTNFDKNLPNEKVLPKHSLLYEYFTVYNELTKVKYVTEGMRKPAFLSGEQKKAIVDLLFKTNRKVTVKQLKEDYFKKIECFDSVEISGVEDRFNASLGTYHDLLKIIKDKDFLDNEENEDILEDIVLTLTLFEDREMIEERLKTYAHLFDDKVMKQLKRRRYTGWGRLSRKLINGIRDKQSGKTILDFLKSDGFANRNFMQLIHDDSLTFKEDIQKAQVSGQGDSLHEHIANLAGSPAIKKGILQTVKVVDELVKVMGRHKPENIVIEMARENQTTQKGQKNSRERMKRIEEGIKELGSQILKEHPVENTQLQNEKLYLYYLQNGRDMYVDQELDINRLSDYDVDHIVPQSFLKDDSIDNKVLTRSDKARGKSDNVPSEEVVKKMKNYWRQLLNAKLITQRKFDNLTKAERGGLSELDKAGFIKRQLVETRQITKHVAQILDSRMNTKYDENDKLIREVKVITLKSKLVSDFRKDFQFYKVREINNYHHAHDAYLNAVVGTALIKKYPKLESEFVYGDYKVYDVRKMIAKSEQEIGKATAKYFFYSNIMNFFKTEITLANGEIRKRPLIETNGETGEIVWDKGRDFATVRKVLSMPQVNIVKKTEVQTGGFSKESILPKRNSDKLIARKKDWDPKKYGGFDSPTVAYSVLVVAKVEKGKSKKLKSVKELLGITIMERSSFEKNPIDFLEAKGYKEVKKDLIIKLPKYSLFELENGRKRMLASAGELQKGNELALPSKYVNFLYLASHYEKLKGSPEDNEQKQLFVEQHKHYLDEIIEQISEFSKRVILADANLDKVLSAYNKHRDKPIREQAENIIHLFTLTNLGAPAAFKYFDTTIDRKRYTSTKEVLDATLIHQSITGLYETRIDLSQLGGDGGEAAAKGSSPAPGGLGIEDEYRLHETSTEPDVSLGSTWLSDFPQAWAETGGMGLAVRQAPLIIPLKATSTPVSIQQYPMSHEARLGIKPHIQRLLDQGILVPCQSPWNTPLLPVKKPGTNDYRPVQDLREVNKRVEDIHPTVPNPYNLLSGLPPSHQWYTVLDLKDAFFCLRLHPTSQPLFAFEWRDPGMGISGQLTWTRLPQGFKNSPTLFNEALHRDLADFRIQHPDLILLQYVDDILLAATSELDCQQGTRALLQTLGDLGYRASAKKAQICQKQVKYLGYLLREGQRWLTEARKETVMGQPVPKTPRQLREFLGKAGFCRLFIPGFAEMAAPLYPLTKPGTLFSWGPDQQKAYQEIKQALLTAPALGLPDLTKPFELFVDEKQGYAKGVLTQKLGPWRRPVAYLSKKLDPVAAGWPPCLRMVAAIAVLTKDAGKLTMGQPLVILAPHAVEALVKQPPDRWLSNARMTHYQAMLLDTDRVQFGPVVALNPATLLPLPEEGAPHDCLEILAETHGTRPDLTDQPIPDADHTWYTDGSSFLQEGQRKAGAAVTTETEVIWAGALPAGTSAQRAELIALTQALKMAEGKRLNVYTDSRYAFATAHIHGEIYRRRGWLTSEGREIKNKSEILALLKALFLPKRLSIIHCLGHQKGDSAEARGNRLADQAAREAAIKTPPDTSTLLIAGKRTADGSEFEKRTADGSEFESPKKKAKVE

SEQ ID NO: 2053 - protein, 2088 aa, synthetic construct
MPAAKRVKLDGGDKKYSIGLDIGTNSVGWAVITDEYKVPSKKFKVLGNTDRHSIKKNLIGALLFDSGETAEATRLKRTARRRYTRRKNRICYLQEIFSNEMAKVDDSFFHRLEESFLVEEDKKHERHPIFGNIVDEVAYHEKYPTIYHLRKKLVDSTDKADLRLIYLALAHMIKFRGHFLIEGDLNPDNSDVDKLFIQLVQTYNQLFEENPINASGVDAKAILSARLSKSRRLENLIAQLPGEKKNGLFGNLIALSLGLTPNFKSNFDLAEDAKLQLSKDTYDDDLDNLLAQIGDQYADLFLAAKNLSDAILLSDILRVNTEITKAPLSASMIKRYDEHHQDLTLLKALVRQQLPEKYKEIFFDQSKNGYAGYIDGGASQEEFYKFIKPILEKMDGTEELLVKLNREDLLRKQRTFDNGSIPHQIHLGELHAILRRQEDFYPFLKDNREKIEKILTFRIPYYVGPLARGNSRFAWMTRKSEETITPWNFEEVVDKGASAQSFIERMTNFDKNLPNEKVLPKHSLLYEYFTVYNELTKVKYVTEGMRKPAFLSGEQKKAIVDLLFKTNRKVTVKQLKEDYFKKIECFDSVEISGVEDRFNASLGTYHDLLKIIKDKDFLDNEENEDILEDIVLTLTLFEDREMIEERLKTYAHLFDDKVMKQLKRRRYTGWGRLSRKLINGIRDKQSGKTILDFLKSDGFANRNFMQLIHDDSLTFKEDIQKAQVSGQGDSLHEHIANLAGSPAIKKGILQTVKVVDELVKVMGRHKPENIVIEMARENQTTQKGQKNSRERMKRIEEGIKELGSQILKEHPVENTQLQNEKLYLYYLQNGRDMYVDQELDINRLSDYDVDHIVPQSFLKDDSIDNKVLTRSDKARGKSDNVPSEEVVKKMKNYWRQLLNAKLITQRKFDNLTKAERGGLSELDKAGFIKRQLVETRQITKHVAQILDSRMNTKYDENDKLIREVKVITLKSKLVSDFRKDFQFYKVREINNYHHAHDAYLNAVVGTALIKKYPKLESEFVYGDYKVYDVRKMIAKSEQEIGKATAKYFFYSNIMNFFKTEITLANGEIRKRPLIETNGETGEIVWDKGRDFATVRKVLSMPQVNIVKKTEVQTGGFSKESILPKRNSDKLIARKKDWDPKKYGGFDSPTVAYSVLVVAKVEKGKSKKLKSVKELLGITIMERSSFEKNPIDFLEAKGYKEVKKDLIIKLPKYSLFELENGRKRMLASAGELQKGNELALPSKYVNFLYLASHYEKLKGSPEDNEQKQLFVEQHKHYLDEIIEQISEFSKRVILADANLDKVLSAYNKHRDKPIREQAENIIHLFTLTNLGAPAAFKYFDTTIDRKRYTSTKEVLDATLIHQSITGLYETRIDLSQLGGDGGGSSGGLGIEDEYRLHETSTEPDVSLGSTWLSDFPQAWAETGGMGLAVRQAPLIIPLKATSTPVSIQQYPMSHEARLGIKPHIQRLLDQGILVPCQSPWNTPLLPVKKPGTNDYRPVQDLREVNKRVEDIHPTVPNPYNLLSGLPPSHQWYTVLDLKDAFFCLRLHPTSQPLFAFEWRDPGMGISGQLTWTRLPQGFKNSPTLFNEALHRDLADFRIQHPDLILLQYVDDILLAATSELDCQQGTRALLQTLGDLGYRASAKKAQICQKQVKYLGYLLREGQRWLTEARKETVMGQPVPKTPRQLREFLGKAGFCRLFIPGFAEMAAPLYPLTKPGTLFSWGPDQQKAYQEIKQALLTAPALGLPDLTKPFELFVDEKQGYAKGVLTQKLGPWRRPVAYLSKKLDPVAAGWPPCLRMVAAIAVLTKDAGKLTMGQPLVILAPHAVEALVKQPPDRWLSNARMTHYQAMLLDTDRVQFGPVVALNPATLLPLPEEGAPHDCLEILAETHGTRPDLTDQPIPDADHTWYTDGSSFLQEGQRKAGAAVTTETEVIWAGALPAGTSAQRAELIALTQALKMAEGKRLNVYTDSRYAFATAHIHGEIYRRRGWLTSEGREIKNKSEILALLKALFLPKRLSIIHCLGHQKGDSAEARGNRLADQAAREAAIKTPPDTSTLLIAGKRTADGSEFEKRTADGSEFESPKKKAKVE

SEQ ID NO: 2054 - protein, 2096 aa, synthetic construct
MPAAKRVKLDGGDKKYSIGLDIGTNSVGWAVITDEYKVPSKKFKVLGNTDRHSIKKNLIGALLFDSGETAEATRLKRTARRRYTRRKNRICYLQEIFSNEMAKVDDSFFHRLEESFLVEEDKKHERHPIFGNIVDEVAYHEKYPTIYHLRKKLVDSTDKADLRLIYLALAHMIKFRGHFLIEGDLNPDNSDVDKLFIQLVQTYNQLFEENPINASGVDAKAILSARLSKSRRLENLIAQLPGEKKNGLFGNLIALSLGLTPNFKSNFDLAEDAKLQLSKDTYDDDLDNLLAQIGDQYADLFLAAKNLSDAILLSDILRVNTEITKAPLSASMIKRYDEHHQDLTLLKALVRQQLPEKYKEIFFDQSKNGYAGYIDGGASQEEFYKFIKPILEKMDGTEELLVKLNREDLLRKQRTFDNGSIPHQIHLGELHAILRRQEDFYPFLKDNREKIEKILTFRIPYYVGPLARGNSRFAWMTRKSEETITPWNFEEVVDKGASAQSFIERMTNFDKNLPNEKVLPKHSLLYEYFTVYNELTKVKYVTEGMRKPAFLSGEQKKAIVDLLFKTNRKVTVKQLKEDYFKKIECFDSVEISGVEDRFNASLGTYHDLLKIIKDKDFLDNEENEDILEDIVLTLTLFEDREMIEERLKTYAHLFDDKVMKQLKRRRYTGWGRLSRKLINGIRDKQSGKTILDFLKSDGFANRNFMQLIHDDSLTFKEDIQKAQVSGQGDSLHEHIANLAGSPAIKKGILQTVKVVDELVKVMGRHKPENIVIEMARENQTTQKGQKNSRERMKRIEEGIKELGSQILKEHPVENTQLQNEKLYLYYLQNGRDMYVDQELDINRLSDYDVDHIVPQSFLKDDSIDNKVLTRSDKARGKSDNVPSEEVVKKMKNYWRQLLNAKLITQRKFDNLTKAERGGLSELDKAGFIKRQLVETRQITKHVAQILDSRMNTKYDENDKLIREVKVITLKSKLVSDFRKDFQFYKVREINNYHHAHDAYLNAVVGTALIKKYPKLESEFVYGDYKVYDVRKMIAKSEQEIGKATAKYFFYSNIMNFFKTEITLANGEIRKRPLIETNGETGEIVWDKGRDFATVRKVLSMPQVNIVKKTEVQTGGFSKESILPKRNSDKLIARKKDWDPKKYGGFDSPTVAYSVLVVAKVEKGKSKKLKSVKELLGITIMERSSFEKNPIDFLEAKGYKEVKKDLIIKLPKYSLFELENGRKRMLASAGELQKGNELALPSKYVNFLYLASHYEKLKGSPEDNEQKQLFVEQHKHYLDEIIEQISEFSKRVILADANLDKVLSAYNKHRDKPIREQAENIIHLFTLTNLGAPAAFKYFDTTIDRKRYTSTKEVLDATLIHQSITGLYETRIDLSQLGGDGGEAAAKGGGPAPGGLGIEDEYRLHETSTEPDVSLGSTWLSDFPQAWAETGGMGLAVRQAPLIIPLKATSTPVSIQQYPMSHEARLGIKPHIQRLLDQGILVPCQSPWNTPLLPVKKPGTNDYRPVQDLREVNKRVEDIHPTVPNPYNLLSGLPPSHQWYTVLDLKDAFFCLRLHPTSQPLFAFEWRDPGMGISGQLTWTRLPQGFKNSPTLFNEALHRDLADFRIQHPDLILLQYVDDILLAATSELDCQQGTRALLQTLGDLGYRASAKKAQICQKQVKYLGYLLREGQRWLTEARKETVMGQPVPKTPRQLREFLGKAGFCRLFIPGFAEMAAPLYPLTKPGTLFSWGPDQQKAYQEIKQALLTAPALGLPDLTKPFELFVDEKQGYAKGVLTQKLGPWRRPVAYLSKKLDPVAAGWPPCLRMVAAIAVLTKDAGKLTMGQPLVILAPHAVEALVKQPPDRWLSNARMTHYQAMLLDTDRVQFGPVVALNPATLLPLPEEGAPHDCLEILAETHGTRPDLTDQPIPDADHTWYTDGSSFLQEGQRKAGAAVTTETEVIWAGALPAGTSAQRAELIALTQALKMAEGKRLNVYTDSRYAFATAHIHGEIYRRRGWLTSEGREIKNKSEILALLKALFLPKRLSIIHCLGHQKGDSAEARGNRLADQAAREAAIKTPPDTSTLLIAGKRTADGSEFEKRTADGSEFESPKKKAKVE

SEQ ID NO: 2055 - protein, 2096 aa, synthetic construct
MPAAKRVKLDGGDKKYSIGLDIGTNSVGWAVITDEYKVPSKKFKVLGNTDRHSIKKNLIGALLFDSGETAEATRLKRTARRRYTRRKNRICYLQEIFSNEMAKVDDSFFHRLEESFLVEEDKKHERHPIFGNIVDEVAYHEKYPTIYHLRKKLVDSTDKADLRLIYLALAHMIKFRGHFLIEGDLNPDNSDVDKLFIQLVQTYNQLFEENPINASGVDAKAILSARLSKSRRLENLIAQLPGEKKNGLFGNLIALSLGLTPNFKSNFDLAEDAKLQLSKDTYDDDLDNLLAQIGDQYADLFLAAKNLSDAILLSDILRVNTEITKAPLSASMIKRYDEHHQDLTLLKALVRQQLPEKYKEIFFDQSKNGYAGYIDGGASQEEFYKFIKPILEKMDGTEELLVKLNREDLLRKQRTFDNGSIPHQIHLGELHAILRRQEDFYPFLKDNREKIEKILTFRIPYYVGPLARGNSRFAWMTRKSEETITPWNFEEVVDKGASAQSFIERMTNFDKNLPNEKVLPKHSLLYEYFTVYNELTKVKYVTEGMRKPAFLSGEQKKAIVDLLFKTNRKVTVKQLKEDYFKKIECFDSVEISGVEDRFNASLGTYHDLLKIIKDKDFLDNEENEDILEDIVLTLTLFEDREMIEERLKTYAHLFDDKVMKQLKRRRYTGWGRLSRKLINGIRDKQSGKTILDFLKSDGFANRNFMQLIHDDSLTFKEDIQKAQVSGQGDSLHEHIANLAGSPAIKKGILQTVKVVDELVKVMGRHKPENIVIEMARENQTTQKGQKNSRERMKRIEEGIKELGSQILKEHPVENTQLQNEKLYLYYLQNGRDMYVDQELDINRLSDYDVDHIVPQSFLKDDSIDNKVLTRSDKARGKSDNVPSEEVVKKMKNYWRQLLNAKLITQRKFDNLTKAERGGLSELDKAGFIKRQLVETRQITKHVAQILDSRMNTKYDENDKLIREVKVITLKSKLVSDFRKDFQFYKVREINNYHHAHDAYLNAVVGTALIKKYPKLESEFVYGDYKVYDVRKMIAKSEQEIGKATAKYFFYSNIMNFFKTEITLANGEIRKRPLIETNGETGEIVWDKGRDFATVRKVLSMPQVNIVKKTEVQTGGFSKESILPKRNSDKLIARKKDWDPKKYGGFDSPTVAYSVLVVAKVEKGKSKKLKSVKELLGITIMERSSFEKNPIDFLEAKGYKEVKKDLIIKLPKYSLFELENGRKRMLASAGELQKGNELALPSKYVNFLYLASHYEKLKGSPEDNEQKQLFVEQHKHYLDEIIEQISEFSKRVILADANLDKVLSAYNKHRDKPIREQAENIIHLFTLTNLGAPAAFKYFDTTIDRKRYTSTKEVLDATLIHQSITGLYETRIDLSQLGGDGGEAAAKGGSGSSGGLGIEDEYRLHETSTEPDVSLGSTWLSDFPQAWAETGGMGLAVRQAPLIIPLKATSTPVSIQQYPMSHEARLGIKPHIQRLLDQGILVPCQSPWNTPLLPVKKPGTNDYRPVQDLREVNKRVEDIHPTVPNPYNLLSGLPPSHQWYTVLDLKDAFFCLRLHPTSQPLFAFEWRDPGMGISGQLTWTRLPQGFKNSPTLFNEALHRDLADFRIQHPDLILLQYVDDILLAATSELDCQQGTRALLQTLGDLGYRASAKKAQICQKQVKYLGYLLREGQRWLTEARKETVMGQPVPKTPRQLREFLGKAGFCRLFIPGFAEMAAPLYPLTKPGTLFSWGPDQQKAYQEIKQALLTAPALGLPDLTKPFELFVDEKQGYAKGVLTQKLGPWRRPVAYLSKKLDPVAAGWPPCLRMVAAIAVLTKDAGKLTMGQPLVILAPHAVEALVKQPPDRWLSNARMTHYQAMLLDTDRVQFGPVVALNPATLLPLPEEGAPHDCLEILAETHGTRPDLTDQPIPDADHTWYTDGSSFLQEGQRKAGAAVTTETEVIWAGALPAGTSAQRAELIALTQALKMAEGKRLNVYTDSRYAFATAHIHGEIYRRRGWLTSEGREIKNKSEILALLKALFLPKRLSIIHCLGHQKGDSAEARGNRLADQAAREAAIKTPPDTSTLLIAGKRTADGSEFEKRTADGSEFESPKKKAKVE

SEQ ID NO: 2056 - protein, 2097 aa, synthetic construct
MPAAKRVKLDGGDKKYSIGLDIGTNSVGWAVITDEYKVPSKKFKVLGNTDRHSIKKNLIGALLFDSGETAEATRLKRTARRRYTRRKNRICYLQEIFSNEMAKVDDSFFHRLEESFLVEEDKKHERHPIFGNIVDEVAYHEKYPTIYHLRKKLVDSTDKADLRLIYLALAHMIKFRGHFLIEGDLNPDNSDVDKLFIQLVQTYNQLFEENPINASGVDAKAILSARLSKSRRLENLIAQLPGEKKNGLFGNLIALSLGLTPNFKSNFDLAEDAKLQLSKDTYDDDLDNLLAQIGDQYADLFLAAKNLSDAILLSDILRVNTEITKAPLSASMIKRYDEHHQDLTLLKALVRQQLPEKYKEIFFDQSKNGYAGYIDGGASQEEFYKFIKPILEKMDGTEELLVKLNREDLLRKQRTFDNGSIPHQIHLGELHAILRRQEDFYPFLKDNREKIEKILTFRIPYYVGPLARGNSRFAWMTRKSEETITPWNFEEVVDKGASAQSFIERMTNFDKNLPNEKVLPKHSLLYEYFTVYNELTKVKYVTEGMRKPAFLSGEQKKAIVDLLFKTNRKVTVKQLKEDYFKKIECFDSVEISGVEDRFNASLGTYHDLLKIIKDKDFLDNEENEDILEDIVLTLTLFEDREMIEERLKTYAHLFDDKVMKQLKRRRYTGWGRLSRKLINGIRDKQSGKTILDFLKSDGFANRNFMQLIHDDSLTFKEDIQKAQVSGQGDSLHEHIANLAGSPAIKKGILQTVKVVDELVKVMGRHKPENIVIEMARENQTTQKGQKNSRERMKRIEEGIKELGSQILKEHPVENTQLQNEKLYLYYLQNGRDMYVDQELDINRLSDYDVDHIVPQSFLKDDSIDNKVLTRSDKARGKSDNVPSEEVVKKMKNYWRQLLNAKLITQRKFDNLTKAERGGLSELDKAGFIKRQLVETRQITKHVAQILDSRMNTKYDENDKLIREVKVITLKSKLVSDFRKDFQFYKVREINNYHHAHDAYLNAVVGTALIKKYPKLESEFVYGDYKVYDVRKMIAKSEQEIGKATAKYFFYSNIMNFFKTEITLANGEIRKRPLIETNGETGEIVWDKGRDFATVRKVLSMPQVNIVKKTEVQTGGFSKESILPKRNSDKLIARKKDWDPKKYGGFDSPTVAYSVLVVAKVEKGKSKKLKSVKELLGITIMERSSFEKNPIDFLEAKGYKEVKKDLIIKLPKYSLFELENGRKRMLASAGELQKGNELALPSKYVNFLYLASHYEKLKGSPEDNEQKQLFVEQHKHYLDEIIEQISEFSKRVILADANLDKVLSAYNKHRDKPIREQAENIIHLFTLTNLGAPAAFKYFDTTIDRKRYTSTKEVLDATLIHQSITGLYETRIDLSQLGGDGGGSAGSAAGSGEFGGLGIEDEYRLHETSTEPDVSLGSTWLSDFPQAWAETGGMGLAVRQAPLIIPLKATSTPVSIQQYPMSHEARLGIKPHIQRLLDQGILVPCQSPWNTPLLPVKKPGTNDYRPVQDLREVNKRVEDIHPTVPNPYNLLSGLPPSHQWYTVLDLKDAFFCLRLHPTSQPLFAFEWRDPGMGISGQLTWTRLPQGFKNSPTLFNEALHRDLADFRIQHPDLILLQYVDDILLAATSELDCQQGTRALLQTLGDLGYRASAKKAQICQKQVKYLGYLLREGQRWLTEARKETVMGQPVPKTPRQLREFLGKAGFCRLFIPGFAEMAAPLYPLTKPGTLFSWGPDQQKAYQEIKQALLTAPALGLPDLTKPFELFVDEKQGYAKGVLTQKLGPWRRPVAYLSKKLDPVAAGWPPCLRMVAAIAVLTKDAGKLTMGQPLVILAPHAVEALVKQPPDRWLSNARMTHYQAMLLDTDRVQFGPVVALNPATLLPLPEEGAPHDCLEILAETHGTRPDLTDQPIPDADHTWYTDGSSFLQEGQRKAGAAVTTETEVIWAGALPAGTSAQRAELIALTQALKMAEGKRLNVYTDSRYAFATAHIHGEIYRRRGWLTSEGREIKNKSEILALLKALFLPKRLSIIHCLGHQKGDSAEARGNRLADQAAREAAIKTPPDTSTLLIAGKRTADGSEFEKRTADGSEFESPKKKAKVE

SEQ ID NO: 2057 - protein, 2091 aa, synthetic construct
MPAAKRVKLDGGDKKYSIGLDIGTNSVGWAVITDEYKVPSKKFKVLGNTDRHSIKKNLIGALLFDSGETAEATRLKRTARRRYTRRKNRICYLQEIFSNEMAKVDDSFFHRLEESFLVEEDKKHERHPIFGNIVDEVAYHEKYPTIYHLRKKLVDSTDKADLRLIYLALAHMIKFRGHFLIEGDLNPDNSDVDKLFIQLVQTYNQLFEENPINASGVDAKAILSARLSKSRRLENLIAQLPGEKKNGLFGNLIALSLGLTPNFKSNFDLAEDAKLQLSKDTYDDDLDNLLAQIGDQYADLFLAAKNLSDAILLSDILRVNTEITKAPLSASMIKRYDEHHQDLTLLKALVRQQLPEKYKEIFFDQSKNGYAGYIDGGASQEEFYKFIKPILEKMDGTEELLVKLNREDLLRKQRTFDNGSIPHQIHLGELHAILRRQEDFYPFLKDNREKIEKILTFRIPYYVGPLARGNSRFAWMTRKSEETITPWNFEEVVDKGASAQSFIERMTNFDKNLPNEKVLPKHSLLYEYFTVYNELTKVKYVTEGMRKPAFLSGEQKKAIVDLLFKTNRKVTVKQLKEDYFKKIECFDSVEISGVEDRFNASLGTYHDLLKIIKDKDFLDNEENEDILEDIVLTLTLFEDREMIEERLKTYAHLFDDKVMKQLKRRRYTGWGRLSRKLINGIRDKQSGKTILDFLKSDGFANRNFMQLIHDDSLTFKEDIQKAQVSGQGDSLHEHIANLAGSPAIKKGILQTVKVVDELVKVMGRHKPENIVIEMARENQTTQKGQKNSRERMKRIEEGIKELGSQILKEHPVENTQLQNEKLYLYYLQNGRDMYVDQELDINRLSDYDVDHIVPQSFLKDDSIDNKVLTRSDKARGKSDNVPSEEVVKKMKNYWRQLLNAKLITQRKFDNLTKAERGGLSELDKAGFIKRQLVETRQITKHVAQILDSRMNTKYDENDKLIREVKVITLKSKLVSDFRKDFQFYKVREINNYHHAHDAYLNAVVGTALIKKYPKLESEFVYGDYKVYDVRKMIAKSEQEIGKATAKYFFYSNIMNFFKTEITLANGEIRKRPLIETNGETGEIVWDKGRDFATVRKVLSMPQVNIVKKTEVQTGGFSKESILPKRNSDKLIARKKDWDPKKYGGFDSPTVAYSVLVVAKVEKGKSKKLKSVKELLGITIMERSSFEKNPIDFLEAKGYKEVKKDLIIKLPKYSLFELENGRKRMLASAGELQKGNELALPSKYVNFLYLASHYEKLKGSPEDNEQKQLFVEQHKHYLDEIIEQISEFSKRVILADANLDKVLSAYNKHRDKPIREQAENIIHLFTLTNLGAPAAFKYFDTTIDRKRYTSTKEVLDATLIHQSITGLYETRIDLSQLGGDGGPAPGSSGGLGIEDEYRLHETSTEPDVSLGSTWLSDFPQAWAETGGMGLAVRQAPLIIPLKATSTPVSIQQYPMSHEARLGIKPHIQRLLDQGILVPCQSPWNTPLLPVKKPGTNDYRPVQDLREVNKRVEDIHPTVPNPYNLLSGLPPSHQWYTVLDLKDAFFCLRLHPTSQPLFAFEWRDPGMGISGQLTWTRLPQGFKNSPTLFNEALHRDLADFRIQHPDLILLQYVDDILLAATSELDCQQGTRALLQTLGDLGYRASAKKAQICQKQVKYLGYLLREGQRWLTEARKETVMGQPVPKTPRQLREFLGKAGFCRLFIPGFAEMAAPLYPLTKPGTLFSWGPDQQKAYQEIKQALLTAPALGLPDLTKPFELFVDEKQGYAKGVLTQKLGPWRRPVAYLSKKLDPVAAGWPPCLRMVAAIAVLTKDAGKLTMGQPLVILAPHAVEALVKQPPDRWLSNARMTHYQAMLLDTDRVQFGPVVALNPATLLPLPEEGAPHDCLEILAETHGTRPDLTDQPIPDADHTWYTDGSSFLQEGQRKAGAAVTTETEVIWAGALPAGTSAQRAELIALTQALKMAEGKRLNVYTDSRYAFATAHIHGEIYRRRGWLTSEGREIKNKSEILALLKALFLPKRLSIIHCLGHQKGDSAEARGNRLADQAAREAAIKTPPDTSTLLIAGKRTADGSEFEKRTADGSEFESPKKKAKVE

SEQ ID NO: 2058 - protein, 2094 aa, synthetic construct
MPAAKRVKLDGGDKKYSIGLDIGTNSVGWAVITDEYKVPSKKFKVLGNTDRHSIKKNLIGALLFDSGETAEATRLKRTARRRYTRRKNRICYLQEIFSNEMAKVDDSFFHRLEESFLVEEDKKHERHPIFGNIVDEVAYHEKYPTIYHLRKKLVDSTDKADLRLIYLALAHMIKFRGHFLIEGDLNPDNSDVDKLFIQLVQTYNQLFEENPINASGVDAKAILSARLSKSRRLENLIAQLPGEKKNGLFGNLIALSLGLTPNFKSNFDLAEDAKLQLSKDTYDDDLDNLLAQIGDQYADLFLAAKNLSDAILLSDILRVNTEITKAPLSASMIKRYDEHHQDLTLLKALVRQQLPEKYKEIFFDQSKNGYAGYIDGGASQEEFYKFIKPILEKMDGTEELLVKLNREDLLRKQRTFDNGSIPHQIHLGELHAILRRQEDFYPFLKDNREKIEKILTFRIPYYVGPLARGNSRFAWMTRKSEETITPWNFEEVVDKGASAQSFIERMTNFDKNLPNEKVLPKHSLLYEYFTVYNELTKVKYVTEGMRKPAFLSGEQKKAIVDLLFKTNRKVTVKQLKEDYFKKIECFDSVEISGVEDRFNASLGTYHDLLKIIKDKDFLDNEENEDILEDIVLTLTLFEDREMIEERLKTYAHLFDDKVMKQLKRRRYTGWGRLSRKLINGIRDKQSGKTILDFLKSDGFANRNFMQLIHDDSLTFKEDIQKAQVSGQGDSLHEHIANLAGSPAIKKGILQTVKVVDELVKVMGRHKPENIVIEMARENQTTQKGQKNSRERMKRIEEGIKELGSQILKEHPVENTQLQNEKLYLYYLQNGRDMYVDQELDINRLSDYDVDHIVPQSFLKDDSIDNKVLTRSDKARGKSDNVPSEEVVKKMKNYWRQLLNAKLITQRKFDNLTKAERGGLSELDKAGFIKRQLVETRQITKHVAQILDSRMNTKYDENDKLIREVKVITLKSKLVSDFRKDFQFYKVREINNYHHAHDAYLNAVVGTALIKKYPKLESEFVYGDYKVYDVRKMIAKSEQEIGKATAKYFFYSNIMNFFKTEITLANGEIRKRPLIETNGETGEIVWDKGRDFATVRKVLSMPQVNIVKKTEVQTGGFSKESILPKRNSDKLIARKKDWDPKKYGGFDSPTVAYSVLVVAKVEKGKSKKLKSVKELLGITIMERSSFEKNPIDFLEAKGYKEVKKDLIIKLPKYSLFELENGRKRMLASAGELQKGNELALPSKYVNFLYLASHYEKLKGSPEDNEQKQLFVEQHKHYLDEIIEQISEFSKRVILADANLDKVLSAYNKHRDKPIREQAENIIHLFTLTNLGAPAAFKYFDTTIDRKRYTSTKEVLDATLIHQSITGLYETRIDLSQLGGDGGGGSPAPGGGGGLGIEDEYRLHETSTEPDVSLGSTWLSDFPQAWAETGGMGLAVRQAPLIIPLKATSTPVSIQQYPMSHEARLGIKPHIQRLLDQGILVPCQSPWNTPLLPVKKPGTNDYRPVQDLREVNKRVEDIHPTVPNPYNLLSGLPPSHQWYTVLDLKDAFFCLRLHPTSQPLFAFEWRDPGMGISGQLTWTRLPQGFKNSPTLFNEALHRDLADFRIQHPDLILLQYVDDILLAATSELDCQQGTRALLQTLGDLGYRASAKKAQICQKQVKYLGYLLREGQRWLTEARKETVMGQPVPKTPRQLREFLGKAGFCRLFIPGFAEMAAPLYPLTKPGTLFSWGPDQQKAYQEIKQALLTAPALGLPDLTKPFELFVDEKQGYAKGVLTQKLGPWRRPVAYLSKKLDPVAAGWPPCLRMVAAIAVLTKDAGKLTMGQPLVILAPHAVEALVKQPPDRWLSNARMTHYQAMLLDTDRVQFGPVVALNPATLLPLPEEGAPHDCLEILAETHGTRPDLTDQPIPDADHTWYTDGSSFLQEGQRKAGAAVTTETEVIWAGALPAGTSAQRAELIALTQALKMAEGKRLNVYTDSRYAFATAHIHGEIYRRRGWLTSEGREIKNKSEILALLKALFLPKRLSIIHCLGHQKGDSAEARGNRLADQAAREAAIKTPPDTSTLLIAGKRTADGSEFEKRTADGSEFESPKKKAKVE

SEQ ID NO: 2059 - protein, 2096 aa, synthetic construct
MPAAKRVKLDGGDKKYSIGLDIGTNSVGWAVITDEYKVPSKKFKVLGNTDRHSIKKNLIGALLFDSGETAEATRLKRTARRRYTRRKNRICYLQEIFSNEMAKVDDSFFHRLEESFLVEEDKKHERHPIFGNIVDEVAYHEKYPTIYHLRKKLVDSTDKADLRLIYLALAHMIKFRGHFLIEGDLNPDNSDVDKLFIQLVQTYNQLFEENPINASGVDAKAILSARLSKSRRLENLIAQLPGEKKNGLFGNLIALSLGLTPNFKSNFDLAEDAKLQLSKDTYDDDLDNLLAQIGDQYADLFLAAKNLSDAILLSDILRVNTEITKAPLSASMIKRYDEHHQDLTLLKALVRQQLPEKYKEIFFDQSKNGYAGYIDGGASQEEFYKFIKPILEKMDGTEELLVKLNREDLLRKQRTFDNGSIPHQIHLGELHAILRRQEDFYPFLKDNREKIEKILTFRIPYYVGPLARGNSRFAWMTRKSEETITPWNFEEVVDKGASAQSFIERMTNFDKNLPNEKVLPKHSLLYEYFTVYNELTKVKYVTEGMRKPAFLSGEQKKAIVDLLFKTNRKVTVKQLKEDYFKKIECFDSVEISGVEDRFNASLGTYHDLLKIIKDKDFLDNEENEDILEDIVLTLTLFEDREMIEERLKTYAHLFDDKVMKQLKRRRYTGWGRLSRKLINGIRDKQSGKTILDFLKSDGFANRNFMQLIHDDSLTFKEDIQKAQVSGQGDSLHEHIANLAGSPAIKKGILQTVKVVDELVKVMGRHKPENIVIEMARENQTTQKGQKNSRERMKRIEEGIKELGSQILKEHPVENTQLQNEKLYLYYLQNGRDMYVDQELDINRLSDYDVDHIVPQSFLKDDSIDNKVLTRSDKARGKSDNVPSEEVVKKMKNYWRQLLNAKLITQRKFDNLTKAERGGLSELDKAGFIKRQLVETRQITKHVAQILDSRMNTKYDENDKLIREVKVITLKSKLVSDFRKDFQFYKVREINNYHHAHDAYLNAVVGTALIKKYPKLESEFVYGDYKVYDVRKMIAKSEQEIGKATAKYFFYSNIMNFFKTEITLANGEIRKRPLIETNGETGEIVWDKGRDFATVRKVLSMPQVNIVKKTEVQTGGFSKESILPKRNSDKLIARKKDWDPKKYGGFDSPTVAYSVLVVAKVEKGKSKKLKSVKELLGITIMERSSFEKNPIDFLEAKGYKEVKKDLIIKLPKYSLFELENGRKRMLASAGELQKGNELALPSKYVNFLYLASHYEKLKGSPEDNEQKQLFVEQHKHYLDEIIEQISEFSKRVILADANLDKVLSAYNKHRDKPIREQAENIIHLFTLTNLGAPAAFKYFDTTIDRKRYTSTKEVLDATLIHQSITGLYETRIDLSQLGGDGGGGGGGSEAAAKGGLGIEDEYRLHETSTEPDVSLGSTWLSDFPQAWAETGGMGLAVRQAPLIIPLKATSTPVSIQQYPMSHEARLGIKPHIQRLLDQGILVPCQSPWNTPLLPVKKPGTNDYRPVQDLREVNKRVEDIHPTVPNPYNLLSGLPPSHQWYTVLDLKDAFFCLRLHPTSQPLFAFEWRDPGMGISGQLTWTRLPQGFKNSPTLFNEALHRDLADFRIQHPDLILLQYVDDILLAATSELDCQQGTRALLQTLGDLGYRASAKKAQICQKQVKYLGYLLREGQRWLTEARKETVMGQPVPKTPRQLREFLGKAGFCRLFIPGFAEMAAPLYPLTKPGTLFSWGPDQQKAYQEIKQALLTAPALGLPDLTKPFELFVDEKQGYAKGVLTQKLGPWRRPVAYLSKKLDPVAAGWPPCLRMVAAIAVLTKDAGKLTMGQPLVILAPHAVEALVKQPPDRWLSNARMTHYQAMLLDTDRVQFGPVVALNPATLLPLPEEGAPHDCLEILAETHGTRPDLTDQPIPDADHTWYTDGSSFLQEGQRKAGAAVTTETEVIWAGALPAGTSAQRAELIALTQALKMAEGKRLNVYTDSRYAFATAHIHGEIYRRRGWLTSEGREIKNKSEILALLKALFLPKRLSIIHCLGHQKGDSAEARGNRLADQAAREAAIKTPPDTSTLLIAGKRTADGSEFEKRTADGSEFESPKKKAKVE

SEQ ID NO: 2060 - protein, 2094 aa, synthetic construct
MPAAKRVKLDGGDKKYSIGLDIGTNSVGWAVITDEYKVPSKKFKVLGNTDRHSIKKNLIGALLFDSGETAEATRLKRTARRRYTRRKNRICYLQEIFSNEMAKVDDSFFHRLEESFLVEEDKKHERHPIFGNIVDEVAYHEKYPTIYHLRKKLVDSTDKADLRLIYLALAHMIKFRGHFLIEGDLNPDNSDVDKLFIQLVQTYNQLFEENPINASGVDAKAILSARLSKSRRLENLIAQLPGEKKNGLFGNLIALSLGLTPNFKSNFDLAEDAKLQLSKDTYDDDLDNLLAQIGDQYADLFLAAKNLSDAILLSDILRVNTEITKAPLSASMIKRYDEHHQDLTLLKALVRQQLPEKYKEIFFDQSKNGYAGYIDGGASQEEFYKFIKPILEKMDGTEELLVKLNREDLLRKQRTFDNGSIPHQIHLGELHAILRRQEDFYPFLKDNREKIEKILTFRIPYYVGPLARGNSRFAWMTRKSEETITPWNFEEVVDKGASAQSFIERMTNFDKNLPNEKVLPKHSLLYEYFTVYNELTKVKYVTEGMRKPAFLSGEQKKAIVDLLFKTNRKVTVKQLKEDYFKKIECFDSVEISGVEDRFNASLGTYHDLLKIIKDKDFLDNEENEDILEDIVLTLTLFEDREMIEERLKTYAHLFDDKVMKQLKRRRYTGWGRLSRKLINGIRDKQSGKTILDFLKSDGFANRNFMQLIHDDSLTFKEDIQKAQVSGQGDSLHEHIANLAGSPAIKKGILQTVKVVDELVKVMGRHKPENIVIEMARENQTTQKGQKNSRERMKRIEEGIKELGSQILKEHPVENTQLQNEKLYLYYLQNGRDMYVDQELDINRLSDYDVDHIVPQSFLKDDSIDNKVLTRSDKARGKSDNVPSEEVVKKMKNYWRQLLNAKLITQRKFDNLTKAERGGLSELDKAGFIKRQLVETRQITKHVAQILDSRMNTKYDENDKLIREVKVITLKSKLVSDFRKDFQFYKVREINNYHHAHDAYLNAVVGTALIKKYPKLESEFVYGDYKVYDVRKMIAKSEQEIGKATAKYFFYSNIMNFFKTEITLANGEIRKRPLIETNGETGEIVWDKGRDFATVRKVLSMPQVNIVKKTEVQTGGFSKESILPKRNSDKLIARKKDWDPKKYGGFDSPTVAYSVLVVAKVEKGKSKKLKSVKELLGITIMERSSFEKNPIDFLEAKGYKEVKKDLIIKLPKYSLFELENGRKRMLASAGELQKGNELALPSKYVNFLYLASHYEKLKGSPEDNEQKQLFVEQHKHYLDEIIEQISEFSKRVILADANLDKVLSAYNKHRDKPIREQAENIIHLFTLTNLGAPAAFKYFDTTIDRKRYTSTKEVLDATLIHQSITGLYETRIDLSQLGGDGGGSSPAPGGGGGLGIEDEYRLHETSTEPDVSLGSTWLSDFPQAWAETGGMGLAVRQAPLIIPLKATSTPVSIQQYPMSHEARLGIKPHIQRLLDQGILVPCQSPWNTPLLPVKKPGTNDYRPVQDLREVNKRVEDIHPTVPNPYNLLSGLPPSHQWYTVLDLKDAFFCLRLHPTSQPLFAFEWRDPGMGISGQLTWTRLPQGFKNSPTLFNEALHRDLADFRIQHPDLILLQYVDDILLAATSELDCQQGTRALLQTLGDLGYRASAKKAQICQKQVKYLGYLLREGQRWLTEARKETVMGQPVPKTPRQLREFLGKAGFCRLFIPGFAEMAAPLYPLTKPGTLFSWGPDQQKAYQEIKQALLTAPALGLPDLTKPFELFVDEKQGYAKGVLTQKLGPWRRPVAYLSKKLDPVAAGWPPCLRMVAAIAVLTKDAGKLTMGQPLVILAPHAVEALVKQPPDRWLSNARMTHYQAMLLDTDRVQFGPVVALNPATLLPLPEEGAPHDCLEILAETHGTRPDLTDQPIPDADHTWYTDGSSFLQEGQRKAGAAVTTETEVIWAGALPAGTSAQRAELIALTQALKMAEGKRLNVYTDSRYAFATAHIHGEIYRRRGWLTSEGREIKNKSEILALLKALFLPKRLSIIHCLGHQKGDSAEARGNRLADQAAREAAIKTPPDTSTLLIAGKRTADGSEFEKRTADGSEFESPKKKAKVE

SEQ ID NO: 2061 - protein, 2094 aa, synthetic construct
MPAAKRVKLDGGDKKYSIGLDIGTNSVGWAVITDEYKVPSKKFKVLGNTDRHSIKKNLIGALLFDSGETAEATRLKRTARRRYTRRKNRICYLQEIFSNEMAKVDDSFFHRLEESFLVEEDKKHERHPIFGNIVDEVAYHEKYPTIYHLRKKLVDSTDKADLRLIYLALAHMIKFRGHFLIEGDLNPDNSDVDKLFIQLVQTYNQLFEENPINASGVDAKAILSARLSKSRRLENLIAQLPGEKKNGLFGNLIALSLGLTPNFKSNFDLAEDAKLQLSKDTYDDDLDNLLAQIGDQYADLFLAAKNLSDAILLSDILRVNTEITKAPLSASMIKRYDEHHQDLTLLKALVRQQLPEKYKEIFFDQSKNGYAGYIDGGASQEEFYKFIKPILEKMDGTEELLVKLNREDLLRKQRTFDNGSIPHQIHLGELHAILRRQEDFYPFLKDNREKIEKILTFRIPYYVGPLARGNSRFAWMTRKSEETITPWNFEEVVDKGASAQSFIERMTNFDKNLPNEKVLPKHSLLYEYFTVYNELTKVKYVTEGMRKPAFLSGEQKKAIVDLLFKTNRKVTVKQLKEDYFKKIECFDSVEISGVEDRFNASLGTYHDLLKIIKDKDFLDNEENEDILEDIVLTLTLFEDREMIEERLKTYAHLFDDKVMKQLKRRRYTGWGRLSRKLINGIRDKQSGKTILDFLKSDGFANRNFMQLIHDDSLTFKEDIQKAQVSGQGDSLHEHIANLAGSPAIKKGILQTVKVVDELVKVMGRHKPENIVIEMARENQTTQKGQKNSRERMKRIEEGIKELGSQILKEHPVENTQLQNEKLYLYYLQNGRDMYVDQELDINRLSDYDVDHIVPQSFLKDDSIDNKVLTRSDKARGKSDNVPSEEVVKKMKNYWRQLLNAKLITQRKFDNLTKAERGGLSELDKAGFIKRQLVETRQITKHVAQILDSRMNTKYDENDKLIREVKVITLKSKLVSDFRKDFQFYKVREINNYHHAHDAYLNAVVGTALIKKYPKLESEFVYGDYKVYDVRKMIAKSEQEIGKATAKYFFYSNIMNFFKTEITLANGEIRKRPLIETNGETGEIVWDKGRDFATVRKVLSMPQVNIVKKTEVQTGGFSKESILPKRNSDKLIARKKDWDPKKYGGFDSPTVAYSVLVVAKVEKGKSKKLKSVKELLGITIMERSSFEKNPIDFLEAKGYKEVKKDLIIKLPKYSLFELENGRKRMLASAGELQKGNELALPSKYVNFLYLASHYEKLKGSPEDNEQKQLFVEQHKHYLDEIIEQISEFSKRVILADANLDKVLSAYNKHRDKPIREQAENIIHLFTLTNLGAPAAFKYFDTTIDRKRYTSTKEVLDATLIHQSITGLYETRIDLSQLGGDGGGGSGGGPAPGGLGIEDEYRLHETSTEPDVSLGSTWLSDFPQAWAETGGMGLAVRQAPLIIPLKATSTPVSIQQYPMSHEARLGIKPHIQRLLDQGILVPCQSPWNTPLLPVKKPGTNDYRPVQDLREVNKRVEDIHPTVPNPYNLLSGLPPSHQWYTVLDLKDAFFCLRLHPTSQPLFAFEWRDPGMGISGQLTWTRLPQGFKNSPTLFNEALHRDLADFRIQHPDLILLQYVDDILLAATSELDCQQGTRALLQTLGDLGYRASAKKAQICQKQVKYLGYLLREGQRWLTEARKETVMGQPVPKTPRQLREFLGKAGFCRLFIPGFAEMAAPLYPLTKPGTLFSWGPDQQKAYQEIKQALLTAPALGLPDLTKPFELFVDEKQGYAKGVLTQKLGPWRRPVAYLSKKLDPVAAGWPPCLRMVAAIAVLTKDAGKLTMGQPLVILAPHAVEALVKQPPDRWLSNARMTHYQAMLLDTDRVQFGPVVALNPATLLPLPEEGAPHDCLEILAETHGTRPDLTDQPIPDADHTWYTDGSSFLQEGQRKAGAAVTTETEVIWAGALPAGTSAQRAELIALTQALKMAEGKRLNVYTDSRYAFATAHIHGEIYRRRGWLTSEGREIKNKSEILALLKALFLPKRLSIIHCLGHQKGDSAEARGNRLADQAAREAAIKTPPDTSTLLIAGKRTADGSEFEKRTADGSEFESPKKKAKVE

SEQ ID NO: 2062 - protein, 2096 aa, synthetic construct
MPAAKRVKLDGGDKKYSIGLDIGTNSVGWAVITDEYKVPSKKFKVLGNTDRHSIKKNLIGALLFDSGETAEATRLKRTARRRYTRRKNRICYLQEIFSNEMAKVDDSFFHRLEESFLVEEDKKHERHPIFGNIVDEVAYHEKYPTIYHLRKKLVDSTDKADLRLIYLALAHMIKFRGHFLIEGDLNPDNSDVDKLFIQLVQTYNQLFEENPINASGVDAKAILSARLSKSRRLENLIAQLPGEKKNGLFGNLIALSLGLTPNFKSNFDLAEDAKLQLSKDTYDDDLDNLLAQIGDQYADLFLAAKNLSDAILLSDILRVNTEITKAPLSASMIKRYDEHHQDLTLLKALVRQQLPEKYKEIFFDQSKNGYAGYIDGGASQEEFYKFIKPILEKMDGTEELLVKLNREDLLRKQRTFDNGSIPHQIHLGELHAILRRQEDFYPFLKDNREKIEKILTFRIPYYVGPLARGNSRFAWMTRKSEETITPWNFEEVVDKGASAQSFIERMTNFDKNLPNEKVLPKHSLLYEYFTVYNELTKVKYVTEGMRKPAFLSGEQKKAIVDLLFKTNRKVTVKQLKEDYFKKIECFDSVEISGVEDRFNASLGTYHDLLKIIKDKDFLDNEENEDILEDIVLTLTLFEDREMIEERLKTYAHLFDDKVMKQLKRRRYTGWGRLSRKLINGIRDKQSGKTILDFLKSDGFANRNFMQLIHDDSLTFKEDIQKAQVSGQGDSLHEHIANLAGSPAIKKGILQTVKVVDELVKVMGRHKPENIVIEMARENQTTQKGQKNSRERMKRIEEGIKELGSQILKEHPVENTQLQNEKLYLYYLQNGRDMYVDQELDINRLSDYDVDHIVPQSFLKDDSIDNKVLTRSDKARGKSDNVPSEEVVKKMKNYWRQLLNAKLITQRKFDNLTKAERGGLSELDKAGFIKRQLVETRQITKHVAQILDSRMNTKYDENDKLIREVKVITLKSKLVSDFRKDFQFYKVREINNYHHAHDAYLNAVVGTALIKKYPKLESEFVYGDYKVYDVRKMIAKSEQEIGKATAKYFFYSNIMNFFKTEITLANGEIRKRPLIETNGETGEIVWDKGRDFATVRKVLSMPQVNIVKKTEVQTGGFSKESILPKRNSDKLIARKKDWDPKKYGGFDSPTVAYSVLVVAKVEKGKSKKLKSVKELLGITIMERSSFEKNPIDFLEAKGYKEVKKDLIIKLPKYSLFELENGRKRMLASAGELQKGNELALPSKYVNFLYLASHYEKLKGSPEDNEQKQLFVEQHKHYLDEIIEQISEFSKRVILADANLDKVLSAYNKHRDKPIREQAENIIHLFTLTNLGAPAAFKYFDTTIDRKRYTSTKEVLDATLIHQSITGLYETRIDLSQLGGDGGGSSPAPEAAAKGGTLGIEDEYRLHETSTEPDVSLGSTWLSDFPQAWAETGGMGLAVRQAPLIIPLKATSTPVSIQQYPMSHEARLGIKPHIQRLLDQGILVPCQSPWNTPLLPVKKPGTNDYRPVQDLREVNKRVEDIHPTVPNPYNLLSGLPPSHQWYTVLDLKDAFFCLRLHPTSQPLFAFEWRDPGMGISGQLTWTRLPQGFKNSPTLFDEALHRDLADFRIQHPDLILLQYVDDILLAATSELDCQQGTRALLQTLGDLGYRASAKKAQICQKQVKYLGYLLREGQRWLTEARKETVMGQPVPKTPRQLREFLGTAGFCRLWIPGFAEMAAPLYPLTKTGTLFSWGPDQQKAYQEIKQALLTAPALGLPDLTKPFELFVDEKQGYAKGVLTQKLGPWRRPVAYLSKKLDPVAAGWPPCLRMVAAIAVLTKDAGKLTMGQPLVILAPHAVEALVKQPPDRWLSNARMTHYQAMLLDTDRVQFGPVVALNPATLLPLPEEGAPHDCLEILAETHGTRPDLTDQPIPDADHTWYTDGSSFLQEGQRKAGAAVTTETEVIWAGALPAGTSAQRAELIALTQALKMAEGKRLNVYTDSRYAFATAHIHGEIYRRRGLLTSEGREIKNKSEILALLKALFLPKRLSIIHCLGHQKGDSAEARGNRLADQAAREAAIKTPPDTSTLLAGKRTADGSEFEKRTADGSEFESPKKKAKVE

SEQ ID NO: 2063 - protein, 2105 aa, synthetic construct
MPAAKRVKLDGGDKKYSIGLDIGTNSVGWAVITDEYKVPSKKFKVLGNTDRHSIKKNLIGALLFDSGETAEATRLKRTARRRYTRRKNRICYLQEIFSNEMAKVDDSFFHRLEESFLVEEDKKHERHPIFGNIVDEVAYHEKYPTIYHLRKKLVDSTDKADLRLIYLALAHMIKFRGHFLIEGDLNPDNSDVDKLFIQLVQTYNQLFEENPINASGVDAKAILSARLSKSRRLENLIAQLPGEKKNGLFGNLIALSLGLTPNFKSNFDLAEDAKLQLSKDTYDDDLDNLLAQIGDQYADLFLAAKNLSDAILLSDILRVNTEITKAPLSASMIKRYDEHHQDLTLLKALVRQQLPEKYKEIFFDQSKNGYAGYIDGGASQEEFYKFIKPILEKMDGTEELLVKLNREDLLRKQRTFDNGSIPHQIHLGELHAILRRQEDFYPFLKDNREKIEKILTFRIPYYVGPLARGNSRFAWMTRKSEETITPWNFEEVVDKGASAQSFIERMTNFDKNLPNEKVLPKHSLLYEYFTVYNELTKVKYVTEGMRKPAFLSGEQKKAIVDLLFKTNRKVTVKQLKEDYFKKIECFDSVEISGVEDRFNASLGTYHDLLKIIKDKDFLDNEENEDILEDIVLTLTLFEDREMIEERLKTYAHLFDDKVMKQLKRRRYTGWGRLSRKLINGIRDKQSGKTILDFLKSDGFANRNFMQLIHDDSLTFKEDIQKAQVSGQGDSLHEHIANLAGSPAIKKGILQTVKVVDELVKVMGRHKPENIVIEMARENQTTQKGQKNSRERMKRIEEGIKELGSQILKEHPVENTQLQNEKLYLYYLQNGRDMYVDQELDINRLSDYDVDHIVPQSFLKDDSIDNKVLTRSDKARGKSDNVPSEEVVKKMKNYWRQLLNAKLITQRKFDNLTKAERGGLSELDKAGFIKRQLVETRQITKHVAQILDSRMNTKYDENDKLIREVKVITLKSKLVSDFRKDFQFYKVREINNYHHAHDAYLNAVVGTALIKKYPKLESEFVYGDYKVYDVRKMIAKSEQEIGKATAKYFFYSNIMNFFKTEITLANGEIRKRPLIETNGETGEIVWDKGRDFATVRKVLSMPQVNIVKKTEVQTGGFSKESILPKRNSDKLIARKKDWDPKKYGGFDSPTVAYSVLVVAKVEKGKSKKLKSVKELLGITIMERSSFEKNPIDFLEAKGYKEVKKDLIIKLPKYSLFELENGRKRMLASAGELQKGNELALPSKYVNFLYLASHYEKLKGSPEDNEQKQLFVEQHKHYLDEIIEQISEFSKRVILADANLDKVLSAYNKHRDKPIREQAENIIHLFTLTNLGAPAAFKYFDTTIDRKRYTSTKEVLDATLIHQSITGLYETRIDLSQLGGDGGGGGGSGGGGSGGGGSGGGGSGGTLGIEDEYRLHETSTEPDVSLGSTWLSDFPQAWAETGGMGLAVRQAPLIIPLKATSTPVSIQQYPMSHEARLGIKPHIQRLLDQGILVPCQSPWNTPLLPVKKPGTNDYRPVQDLREVNKRVEDIHPTVPNPYNLLSGLPPSHQWYTVLDLKDAFFCLRLHPTSQPLFAFEWRDPGMGISGQLTWTRLPQGFKNSPTLFDEALHRDLADFRIQHPDLILLQYVDDILLAATSELDCQQGTRALLQTLGDLGYRASAKKAQICQKQVKYLGYLLREGQRWLTEARKETVMGQPVPKTPRQLREFLGTAGFCRLWIPGFAEMAAPLYPLTKTGTLFSWGPDQQKAYQEIKQALLTAPALGLPDLTKPFELFVDEKQGYAKGVLTQKLGPWRRPVAYLSKKLDPVAAGWPPCLRMVAAIAVLTKDAGKLTMGQPLVILAPHAVEALVKQPPDRWLSNARMTHYQAMLLDTDRVQFGPVVALNPATLLPLPEEGAPHDCLEILAETHGTRPDLTDQPIPDADHTWYTDGSSFLQEGQRKAGAAVTTETEVIWAGALPAGTSAQRAELIALTQALKMAEGKRLNVYTDSRYAFATAHIHGEIYRRRGLLTSEGREIKNKSEILALLKALFLPKRLSIIHCLGHQKGDSAEARGNRLADQAAREAAIKTPPDTSTLLAGKRTADGSEFEKRTADGSEFESPKKKAKVE

SEQ ID NO: 2064 - protein, 2095 aa, synthetic construct
MPAAKRVKLDGGDKKYSIGLDIGTNSVGWAVITDEYKVPSKKFKVLGNTDRHSIKKNLIGALLFDSGETAEATRLKRTARRRYTRRKNRICYLQEIFSNEMAKVDDSFFHRLEESFLVEEDKKHERHPIFGNIVDEVAYHEKYPTIYHLRKKLVDSTDKADLRLIYLALAHMIKFRGHFLIEGDLNPDNSDVDKLFIQLVQTYNQLFEENPINASGVDAKAILSARLSKSRRLENLIAQLPGEKKNGLFGNLIALSLGLTPNFKSNFDLAEDAKLQLSKDTYDDDLDNLLAQIGDQYADLFLAAKNLSDAILLSDILRVNTEITKAPLSASMIKRYDEHHQDLTLLKALVRQQLPEKYKEIFFDQSKNGYAGYIDGGASQEEFYKFIKPILEKMDGTEELLVKLNREDLLRKQRTFDNGSIPHQIHLGELHAILRRQEDFYPFLKDNREKIEKILTFRIPYYVGPLARGNSRFAWMTRKSEETITPWNFEEVVDKGASAQSFIERMTNFDKNLPNEKVLPKHSLLYEYFTVYNELTKVKYVTEGMRKPAFLSGEQKKAIVDLLFKTNRKVTVKQLKEDYFKKIECFDSVEISGVEDRFNASLGTYHDLLKIIKDKDFLDNEENEDILEDIVLTLTLFEDREMIEERLKTYAHLFDDKVMKQLKRRRYTGWGRLSRKLINGIRDKQSGKTILDFLKSDGFANRNFMQLIHDDSLTFKEDIQKAQVSGQGDSLHEHIANLAGSPAIKKGILQTVKVVDELVKVMGRHKPENIVIEMARENQTTQKGQKNSRERMKRIEEGIKELGSQILKEHPVENTQLQNEKLYLYYLQNGRDMYVDQELDINRLSDYDVDHIVPQSFLKDDSIDNKVLTRSDKARGKSDNVPSEEVVKKMKNYWRQLLNAKLITQRKFDNLTKAERGGLSELDKAGFIKRQLVETRQITKHVAQILDSRMNTKYDENDKLIREVKVITLKSKLVSDFRKDFQFYKVREINNYHHAHDAYLNAVVGTALIKKYPKLESEFVYGDYKVYDVRKMIAKSEQEIGKATAKYFFYSNIMNFFKTEITLANGEIRKRPLIETNGETGEIVWDKGRDFATVRKVLSMPQVNIVKKTEVQTGGFSKESILPKRNSDKLIARKKDWDPKKYGGFDSPTVAYSVLVVAKVEKGKSKKLKSVKELLGITIMERSSFEKNPIDFLEAKGYKEVKKDLIIKLPKYSLFELENGRKRMLASAGELQKGNELALPSKYVNFLYLASHYEKLKGSPEDNEQKQLFVEQHKHYLDEIIEQISEFSKRVILADANLDKVLSAYNKHRDKPIREQAENIIHLFTLTNLGAPAAFKYFDTTIDRKRYTSTKEVLDATLIHQSITGLYETRIDLSQLGGDGGEAAAKEAAAKGGTLGIEDEYRLHETSTEPDVSLGSTWLSDFPQAWAETGGMGLAVRQAPLIIPLKATSTPVSIQQYPMSHEARLGIKPHIQRLLDQGILVPCQSPWNTPLLPVKKPGTNDYRPVQDLREVNKRVEDIHPTVPNPYNLLSGLPPSHQWYTVLDLKDAFFCLRLHPTSQPLFAFEWRDPGMGISGQLTWTRLPQGFKNSPTLFDEALHRDLADFRIQHPDLILLQYVDDILLAATSELDCQQGTRALLQTLGDLGYRASAKKAQICQKQVKYLGYLLREGQRWLTEARKETVMGQPVPKTPRQLREFLGTAGFCRLWIPGFAEMAAPLYPLTKTGTLFSWGPDQQKAYQEIKQALLTAPALGLPDLTKPFELFVDEKQGYAKGVLTQKLGPWRRPVAYLSKKLDPVAAGWPPCLRMVAAIAVLTKDAGKLTMGQPLVILAPHAVEALVKQPPDRWLSNARMTHYQAMLLDTDRVQFGPVVALNPATLLPLPEEGAPHDCLEILAETHGTRPDLTDQPIPDADHTWYTDGSSFLQEGQRKAGAAVTTETEVIWAGALPAGTSAQRAELIALTQALKMAEGKRLNVYTDSRYAFATAHIHGEIYRRRGLLTSEGREIKNKSEILALLKALFLPKRLSIIHCLGHQKGDSAEARGNRLADQAAREAAIKTPPDTSTLLAGKRTADGSEFEKRTADGSEFESPKKKAKVE

SEQ ID NO: 2065 - protein, 2096 aa, synthetic construct
MPAAKRVKLDGGDKKYSIGLDIGTNSVGWAVITDEYKVPSKKFKVLGNTDRHSIKKNLIGALLFDSGETAEATRLKRTARRRYTRRKNRICYLQEIFSNEMAKVDDSFFHRLEESFLVEEDKKHERHPIFGNIVDEVAYHEKYPTIYHLRKKLVDSTDKADLRLIYLALAHMIKFRGHFLIEGDLNPDNSDVDKLFIQLVQTYNQLFEENPINASGVDAKAILSARLSKSRRLENLIAQLPGEKKNGLFGNLIALSLGLTPNFKSNFDLAEDAKLQLSKDTYDDDLDNLLAQIGDQYADLFLAAKNLSDAILLSDILRVNTEITKAPLSASMIKRYDEHHQDLTLLKALVRQQLPEKYKEIFFDQSKNGYAGYIDGGASQEEFYKFIKPILEKMDGTEELLVKLNREDLLRKQRTFDNGSIPHQIHLGELHAILRRQEDFYPFLKDNREKIEKILTFRIPYYVGPLARGNSRFAWMTRKSEETITPWNFEEVVDKGASAQSFIERMTNFDKNLPNEKVLPKHSLLYEYFTVYNELTKVKYVTEGMRKPAFLSGEQKKAIVDLLFKTNRKVTVKQLKEDYFKKIECFDSVEISGVEDRFNASLGTYHDLLKIIKDKDFLDNEENEDILEDIVLTLTLFEDREMIEERLKTYAHLFDDKVMKQLKRRRYTGWGRLSRKLINGIRDKQSGKTILDFLKSDGFANRNFMQLIHDDSLTFKEDIQKAQVSGQGDSLHEHIANLAGSPAIKKGILQTVKVVDELVKVMGRHKPENIVIEMARENQTTQKGQKNSRERMKRIEEGIKELGSQILKEHPVENTQLQNEKLYLYYLQNGRDMYVDQELDINRLSDYDVDHIVPQSFLKDDSIDNKVLTRSDKARGKSDNVPSEEVVKKMKNYWRQLLNAKLITQRKFDNLTKAERGGLSELDKAGFIKRQLVETRQITKHVAQILDSRMNTKYDENDKLIREVKVITLKSKLVSDFRKDFQFYKVREINNYHHAHDAYLNAVVGTALIKKYPKLESEFVYGDYKVYDVRKMIAKSEQEIGKATAKYFFYSNIMNFFKTEITLANGEIRKRPLIETNGETGEIVWDKGRDFATVRKVLSMPQVNIVKKTEVQTGGFSKESILPKRNSDKLIARKKDWDPKKYGGFDSPTVAYSVLVVAKVEKGKSKKLKSVKELLGITIMERSSFEKNPIDFLEAKGYKEVKKDLIIKLPKYSLFELENGRKRMLASAGELQKGNELALPSKYVNFLYLASHYEKLKGSPEDNEQKQLFVEQHKHYLDEIIEQISEFSKRVILADANLDKVLSAYNKHRDKPIREQAENIIHLFTLTNLGAPAAFKYFDTTIDRKRYTSTKEVLDATLIHQSITGLYETRIDLSQLGGDGGPAPGSSEAAAKGGTLGIEDEYRLHETSTEPDVSLGSTWLSDFPQAWAETGGMGLAVRQAPLIIPLKATSTPVSIQQYPMSHEARLGIKPHIQRLLDQGILVPCQSPWNTPLLPVKKPGTNDYRPVQDLREVNKRVEDIHPTVPNPYNLLSGLPPSHQWYTVLDLKDAFFCLRLHPTSQPLFAFEWRDPGMGISGQLTWTRLPQGFKNSPTLFDEALHRDLADFRIQHPDLILLQYVDDILLAATSELDCQQGTRALLQTLGDLGYRASAKKAQICQKQVKYLGYLLREGQRWLTEARKETVMGQPVPKTPRQLREFLGTAGFCRLWIPGFAEMAAPLYPLTKTGTLFSWGPDQQKAYQEIKQALLTAPALGLPDLTKPFELFVDEKQGYAKGVLTQKLGPWRRPVAYLSKKLDPVAAGWPPCLRMVAAIAVLTKDAGKLTMGQPLVILAPHAVEALVKQPPDRWLSNARMTHYQAMLLDTDRVQFGPVVALNPATLLPLPEEGAPHDCLEILAETHGTRPDLTDQPIPDADHTWYTDGSSFLQEGQRKAGAAVTTETEVIWAGALPAGTSAQRAELIALTQALKMAEGKRLNVYTDSRYAFATAHIHGEIYRRRGLLTSEGREIKNKSEILALLKALFLPKRLSIIHCLGHQKGDSAEARGNRLADQAAREAAIKTPPDTSTLLAGKRTADGSEFEKRTADGSEFESPKKKAKVE

SEQ ID NO: 2066 - protein, 2115 aa, synthetic construct
MPAAKRVKLDGGDKKYSIGLDIGTNSVGWAVITDEYKVPSKKFKVLGNTDRHSIKKNLIGALLFDSGETAEATRLKRTARRRYTRRKNRICYLQEIFSNEMAKVDDSFFHRLEESFLVEEDKKHERHPIFGNIVDEVAYHEKYPTIYHLRKKLVDSTDKADLRLIYLALAHMIKFRGHFLIEGDLNPDNSDVDKLFIQLVQTYNQLFEENPINASGVDAKAILSARLSKSRRLENLIAQLPGEKKNGLFGNLIALSLGLTPNFKSNFDLAEDAKLQLSKDTYDDDLDNLLAQIGDQYADLFLAAKNLSDAILLSDILRVNTEITKAPLSASMIKRYDEHHQDLTLLKALVRQQLPEKYKEIFFDQSKNGYAGYIDGGASQEEFYKFIKPILEKMDGTEELLVKLNREDLLRKQRTFDNGSIPHQIHLGELHAILRRQEDFYPFLKDNREKIEKILTFRIPYYVGPLARGNSRFAWMTRKSEETITPWNFEEVVDKGASAQSFIERMTNFDKNLPNEKVLPKHSLLYEYFTVYNELTKVKYVTEGMRKPAFLSGEQKKAIVDLLFKTNRKVTVKQLKEDYFKKIECFDSVEISGVEDRFNASLGTYHDLLKIIKDKDFLDNEENEDILEDIVLTLTLFEDREMIEERLKTYAHLFDDKVMKQLKRRRYTGWGRLSRKLINGIRDKQSGKTILDFLKSDGFANRNFMQLIHDDSLTFKEDIQKAQVSGQGDSLHEHIANLAGSPAIKKGILQTVKVVDELVKVMGRHKPENIVIEMARENQTTQKGQKNSRERMKRIEEGIKELGSQILKEHPVENTQLQNEKLYLYYLQNGRDMYVDQELDINRLSDYDVDHIVPQSFLKDDSIDNKVLTRSDKARGKSDNVPSEEVVKKMKNYWRQLLNAKLITQRKFDNLTKAERGGLSELDKAGFIKRQLVETRQITKHVAQILDSRMNTKYDENDKLIREVKVITLKSKLVSDFRKDFQFYKVREINNYHHAHDAYLNAVVGTALIKKYPKLESEFVYGDYKVYDVRKMIAKSEQEIGKATAKYFFYSNIMNFFKTEITLANGEIRKRPLIETNGETGEIVWDKGRDFATVRKVLSMPQVNIVKKTEVQTGGFSKESILPKRNSDKLIARKKDWDPKKYGGFDSPTVAYSVLVVAKVEKGKSKKLKSVKELLGITIMERSSFEKNPIDFLEAKGYKEVKKDLIIKLPKYSLFELENGRKRMLASAGELQKGNELALPSKYVNFLYLASHYEKLKGSPEDNEQKQLFVEQHKHYLDEIIEQISEFSKRVILADANLDKVLSAYNKHRDKPIREQAENIIHLFTLTNLGAPAAFKYFDTTIDRKRYTSTKEVLDATLIHQSITGLYETRIDLSQLGGDGGGGGGSGGGGSGGGGSGGGGSGGGGSGGGGSGGTLGIEDEYRLHETSTEPDVSLGSTWLSDFPQAWAETGGMGLAVRQAPLIIPLKATSTPVSIQQYPMSHEARLGIKPHIQRLLDQGILVPCQSPWNTPLLPVKKPGTNDYRPVQDLREVNKRVEDIHPTVPNPYNLLSGLPPSHQWYTVLDLKDAFFCLRLHPTSQPLFAFEWRDPGMGISGQLTWTRLPQGFKNSPTLFDEALHRDLADFRIQHPDLILLQYVDDILLAATSELDCQQGTRALLQTLGDLGYRASAKKAQICQKQVKYLGYLLREGQRWLTEARKETVMGQPVPKTPRQLREFLGTAGFCRLWIPGFAEMAAPLYPLTKTGTLFSWGPDQQKAYQEIKQALLTAPALGLPDLTKPFELFVDEKQGYAKGVLTQKLGPWRRPVAYLSKKLDPVAAGWPPCLRMVAAIAVLTKDAGKLTMGQPLVILAPHAVEALVKQPPDRWLSNARMTHYQAMLLDTDRVQFGPVVALNPATLLPLPEEGAPHDCLEILAETHGTRPDLTDQPIPDADHTWYTDGSSFLQEGQRKAGAAVTTETEVIWAGALPAGTSAQRAELIALTQALKMAEGKRLNVYTDSRYAFATAHIHGEIYRRRGLLTSEGREIKNKSEILALLKALFLPKRLSIIHCLGHQKGDSAEARGNRLADQAAREAAIKTPPDTSTLLAGKRTADGSEFEKRTADGSEFESPKKKAKVE

SEQ ID NO: 2067 - protein, 2093 aa, synthetic construct
MPAAKRVKLDGGDKKYSIGLDIGTNSVGWAVITDEYKVPSKKFKVLGNTDRHSIKKNLIGALLFDSGETAEATRLKRTARRRYTRRKNRICYLQEIFSNEMAKVDDSFFHRLEESFLVEEDKKHERHPIFGNIVDEVAYHEKYPTIYHLRKKLVDSTDKADLRLIYLALAHMIKFRGHFLIEGDLNPDNSDVDKLFIQLVQTYNQLFEENPINASGVDAKAILSARLSKSRRLENLIAQLPGEKKNGLFGNLIALSLGLTPNFKSNFDLAEDAKLQLSKDTYDDDLDNLLAQIGDQYADLFLAAKNLSDAILLSDILRVNTEITKAPLSASMIKRYDEHHQDLTLLKALVRQQLPEKYKEIFFDQSKNGYAGYIDGGASQEEFYKFIKPILEKMDGTEELLVKLNREDLLRKQRTFDNGSIPHQIHLGELHAILRRQEDFYPFLKDNREKIEKILTFRIPYYVGPLARGNSRFAWMTRKSEETITPWNFEEVVDKGASAQSFIERMTNFDKNLPNEKVLPKHSLLYEYFTVYNELTKVKYVTEGMRKPAFLSGEQKKAIVDLLFKTNRKVTVKQLKEDYFKKIECFDSVEISGVEDRFNASLGTYHDLLKIIKDKDFLDNEENEDILEDIVLTLTLFEDREMIEERLKTYAHLFDDKVMKQLKRRRYTGWGRLSRKLINGIRDKQSGKTILDFLKSDGFANRNFMQLIHDDSLTFKEDIQKAQVSGQGDSLHEHIANLAGSPAIKKGILQTVKVVDELVKVMGRHKPENIVIEMARENQTTQKGQKNSRERMKRIEEGIKELGSQILKEHPVENTQLQNEKLYLYYLQNGRDMYVDQELDINRLSDYDVDHIVPQSFLKDDSIDNKVLTRSDKARGKSDNVPSEEVVKKMKNYWRQLLNAKLITQRKFDNLTKAERGGLSELDKAGFIKRQLVETRQITKHVAQILDSRMNTKYDENDKLIREVKVITLKSKLVSDFRKDFQFYKVREINNYHHAHDAYLNAVVGTALIKKYPKLESEFVYGDYKVYDVRKMIAKSEQEIGKATAKYFFYSNIMNFFKTEITLANGEIRKRPLIETNGETGEIVWDKGRDFATVRKVLSMPQVNIVKKTEVQTGGFSKESILPKRNSDKLIARKKDWDPKKYGGFDSPTVAYSVLVVAKVEKGKSKKLKSVKELLGITIMERSSFEKNPIDFLEAKGYKEVKKDLIIKLPKYSLFELENGRKRMLASAGELQKGNELALPSKYVNFLYLASHYEKLKGSPEDNEQKQLFVEQHKHYLDEIIEQISEFSKRVILADANLDKVLSAYNKHRDKPIREQAENIIHLFTLTNLGAPAAFKYFDTTIDRKRYTSTKEVLDATLIHQSITGLYETRIDLSQLGGDGGEAAAKPAPGGTLGIEDEYRLHETSTEPDVSLGSTWLSDFPQAWAETGGMGLAVRQAPLIIPLKATSTPVSIQQYPMSHEARLGIKPHIQRLLDQGILVPCQSPWNTPLLPVKKPGTNDYRPVQDLREVNKRVEDIHPTVPNPYNLLSGLPPSHQWYTVLDLKDAFFCLRLHPTSQPLFAFEWRDPGMGISGQLTWTRLPQGFKNSPTLFDEALHRDLADFRIQHPDLILLQYVDDILLAATSELDCQQGTRALLQTLGDLGYRASAKKAQICQKQVKYLGYLLREGQRWLTEARKETVMGQPVPKTPRQLREFLGTAGFCRLWIPGFAEMAAPLYPLTKTGTLFSWGPDQQKAYQEIKQALLTAPALGLPDLTKPFELFVDEKQGYAKGVLTQKLGPWRRPVAYLSKKLDPVAAGWPPCLRMVAAIAVLTKDAGKLTMGQPLVILAPHAVEALVKQPPDRWLSNARMTHYQAMLLDTDRVQFGPVVALNPATLLPLPEEGAPHDCLEILAETHGTRPDLTDQPIPDADHTWYTDGSSFLQEGQRKAGAAVTTETEVIWAGALPAGTSAQRAELIALTQALKMAEGKRLNVYTDSRYAFATAHIHGEIYRRRGLLTSEGREIKNKSEILALLKALFLPKRLSIIHCLGHQKGDSAEARGNRLADQAAREAAIKTPPDTSTLLAGKRTADGSEFEKRTADGSEFESPKKKAKVE

SEQ ID NO: 2068 - protein, 2096 aa, synthetic construct
MPAAKRVKLDGGDKKYSIGLDIGTNSVGWAVITDEYKVPSKKFKVLGNTDRHSIKKNLIGALLFDSGETAEATRLKRTARRRYTRRKNRICYLQEIFSNEMAKVDDSFFHRLEESFLVEEDKKHERHPIFGNIVDEVAYHEKYPTIYHLRKKLVDSTDKADLRLIYLALAHMIKFRGHFLIEGDLNPDNSDVDKLFIQLVQTYNQLFEENPINASGVDAKAILSARLSKSRRLENLIAQLPGEKKNGLFGNLIALSLGLTPNFKSNFDLAEDAKLQLSKDTYDDDLDNLLAQIGDQYADLFLAAKNLSDAILLSDILRVNTEITKAPLSASMIKRYDEHHQDLTLLKALVRQQLPEKYKEIFFDQSKNGYAGYIDGGASQEEFYKFIKPILEKMDGTEELLVKLNREDLLRKQRTFDNGSIPHQIHLGELHAILRRQEDFYPFLKDNREKIEKILTFRIPYYVGPLARGNSRFAWMTRKSEETITPWNFEEVVDKGASAQSFIERMTNFDKNLPNEKVLPKHSLLYEYFTVYNELTKVKYVTEGMRKPAFLSGEQKKAIVDLLFKTNRKVTVKQLKEDYFKKIECFDSVEISGVEDRFNASLGTYHDLLKIIKDKDFLDNEENEDILEDIVLTLTLFEDREMIEERLKTYAHLFDDKVMKQLKRRRYTGWGRLSRKLINGIRDKQSGKTILDFLKSDGFANRNFMQLIHDDSLTFKEDIQKAQVSGQGDSLHEHIANLAGSPAIKKGILQTVKVVDELVKVMGRHKPENIVIEMARENQTTQKGQKNSRERMKRIEEGIKELGSQILKEHPVENTQLQNEKLYLYYLQNGRDMYVDQELDINRLSDYDVDHIVPQSFLKDDSIDNKVLTRSDKARGKSDNVPSEEVVKKMKNYWRQLLNAKLITQRKFDNLTKAERGGLSELDKAGFIKRQLVETRQITKHVAQILDSRMNTKYDENDKLIREVKVITLKSKLVSDFRKDFQFYKVREINNYHHAHDAYLNAVVGTALIKKYPKLESEFVYGDYKVYDVRKMIAKSEQEIGKATAKYFFYSNIMNFFKTEITLANGEIRKRPLIETNGETGEIVWDKGRDFATVRKVLSMPQVNIVKKTEVQTGGFSKESILPKRNSDKLIARKKDWDPKKYGGFDSPTVAYSVLVVAKVEKGKSKKLKSVKELLGITIMERSSFEKNPIDFLEAKGYKEVKKDLIIKLPKYSLFELENGRKRMLASAGELQKGNELALPSKYVNFLYLASHYEKLKGSPEDNEQKQLFVEQHKHYLDEIIEQISEFSKRVILADANLDKVLSAYNKHRDKPIREQAENIIHLFTLTNLGAPAAFKYFDTTIDRKRYTSTKEVLDATLIHQSITGLYETRIDLSQLGGDGGGGGGGSEAAAKGGTLGIEDEYRLHETSTEPDVSLGSTWLSDFPQAWAETGGMGLAVRQAPLIIPLKATSTPVSIQQYPMSHEARLGIKPHIQRLLDQGILVPCQSPWNTPLLPVKKPGTNDYRPVQDLREVNKRVEDIHPTVPNPYNLLSGLPPSHQWYTVLDLKDAFFCLRLHPTSQPLFAFEWRDPGMGISGQLTWTRLPQGFKNSPTLFDEALHRDLADFRIQHPDLILLQYVDDILLAATSELDCQQGTRALLQTLGDLGYRASAKKAQICQKQVKYLGYLLREGQRWLTEARKETVMGQPVPKTPRQLREFLGTAGFCRLWIPGFAEMAAPLYPLTKTGTLFSWGPDQQKAYQEIKQALLTAPALGLPDLTKPFELFVDEKQGYAKGVLTQKLGPWRRPVAYLSKKLDPVAAGWPPCLRMVAAIAVLTKDAGKLTMGQPLVILAPHAVEALVKQPPDRWLSNARMTHYQAMLLDTDRVQFGPVVALNPATLLPLPEEGAPHDCLEILAETHGTRPDLTDQPIPDADHTWYTDGSSFLQEGQRKAGAAVTTETEVIWAGALPAGTSAQRAELIALTQALKMAEGKRLNVYTDSRYAFATAHIHGEIYRRRGLLTSEGREIKNKSEILALLKALFLPKRLSIIHCLGHQKGDSAEARGNRLADQAAREAAIKTPPDTSTLLAGKRTADGSEFEKRTADGSEFESPKKKAKVE

SEQ ID NO: 2069 - protein, 2096 aa, synthetic construct
MPAAKRVKLDGGDKKYSIGLDIGTNSVGWAVITDEYKVPSKKFKVLGNTDRHSIKKNLIGALLFDSGETAEATRLKRTARRRYTRRKNRICYLQEIFSNEMAKVDDSFFHRLEESFLVEEDKKHERHPIFGNIVDEVAYHEKYPTIYHLRKKLVDSTDKADLRLIYLALAHMIKFRGHFLIEGDLNPDNSDVDKLFIQLVQTYNQLFEENPINASGVDAKAILSARLSKSRRLENLIAQLPGEKKNGLFGNLIALSLGLTPNFKSNFDLAEDAKLQLSKDTYDDDLDNLLAQIGDQYADLFLAAKNLSDAILLSDILRVNTEITKAPLSASMIKRYDEHHQDLTLLKALVRQQLPEKYKEIFFDQSKNGYAGYIDGGASQEEFYKFIKPILEKMDGTEELLVKLNREDLLRKQRTFDNGSIPHQIHLGELHAILRRQEDFYPFLKDNREKIEKILTFRIPYYVGPLARGNSRFAWMTRKSEETITPWNFEEVVDKGASAQSFIERMTNFDKNLPNEKVLPKHSLLYEYFTVYNELTKVKYVTEGMRKPAFLSGEQKKAIVDLLFKTNRKVTVKQLKEDYFKKIECFDSVEISGVEDRFNASLGTYHDLLKIIKDKDFLDNEENEDILEDIVLTLTLFEDREMIEERLKTYAHLFDDKVMKQLKRRRYTGWGRLSRKLINGIRDKQSGKTILDFLKSDGFANRNFMQLIHDDSLTFKEDIQKAQVSGQGDSLHEHIANLAGSPAIKKGILQTVKVVDELVKVMGRHKPENIVIEMARENQTTQKGQKNSRERMKRIEEGIKELGSQILKEHPVENTQLQNEKLYLYYLQNGRDMYVDQELDINRLSDYDVDHIVPQSFLKDDSIDNKVLTRSDKARGKSDNVPSEEVVKKMKNYWRQLLNAKLITQRKFDNLTKAERGGLSELDKAGFIKRQLVETRQITKHVAQILDSRMNTKYDENDKLIREVKVITLKSKLVSDFRKDFQFYKVREINNYHHAHDAYLNAVVGTALIKKYPKLESEFVYGDYKVYDVRKMIAKSEQEIGKATAKYFFYSNIMNFFKTEITLANGEIRKRPLIETNGETGEIVWDKGRDFATVRKVLSMPQVNIVKKTEVQTGGFSKESILPKRNSDKLIARKKDWDPKKYGGFDSPTVAYSVLVVAKVEKGKSKKLKSVKELLGITIMERSSFEKNPIDFLEAKGYKEVKKDLIIKLPKYSLFELENGRKRMLASAGELQKGNELALPSKYVNFLYLASHYEKLKGSPEDNEQKQLFVEQHKHYLDEIIEQISEFSKRVILADANLDKVLSAYNKHRDKPIREQAENIIHLFTLTNLGAPAAFKYFDTTIDRKRYTSTKEVLDATLIHQSITGLYETRIDLSQLGGDGGGGSEAAAKPAPGGTLGIEDEYRLHETSTEPDVSLGSTWLSDFPQAWAETGGMGLAVRQAPLIIPLKATSTPVSIQQYPMSHEARLGIKPHIQRLLDQGILVPCQSPWNTPLLPVKKPGTNDYRPVQDLREVNKRVEDIHPTVPNPYNLLSGLPPSHQWYTVLDLKDAFFCLRLHPTSQPLFAFEWRDPGMGISGQLTWTRLPQGFKNSPTLFDEALHRDLADFRIQHPDLILLQYVDDILLAATSELDCQQGTRALLQTLGDLGYRASAKKAQICQKQVKYLGYLLREGQRWLTEARKETVMGQPVPKTPRQLREFLGTAGFCRLWIPGFAEMAAPLYPLTKTGTLFSWGPDQQKAYQEIKQALLTAPALGLPDLTKPFELFVDEKQGYAKGVLTQKLGPWRRPVAYLSKKLDPVAAGWPPCLRMVAAIAVLTKDAGKLTMGQPLVILAPHAVEALVKQPPDRWLSNARMTHYQAMLLDTDRVQFGPVVALNPATLLPLPEEGAPHDCLEILAETHGTRPDLTDQPIPDADHTWYTDGSSFLQEGQRKAGAAVTTETEVIWAGALPAGTSAQRAELIALTQALKMAEGKRLNVYTDSRYAFATAHIHGEIYRRRGLLTSEGREIKNKSEILALLKALFLPKRLSIIHCLGHQKGDSAEARGNRLADQAAREAAIKTPPDTSTLLAGKRTADGSEFEKRTADGSEFESPKKKAKVE

SEQ ID NO: 2070 - protein, 2105 aa, synthetic construct
MPAAKRVKLDGGDKKYSIGLDIGTNSVGWAVITDEYKVPSKKFKVLGNTDRHSIKKNLIGALLFDSGETAEATRLKRTARRRYTRRKNRICYLQEIFSNEMAKVDDSFFHRLEESFLVEEDKKHERHPIFGNIVDEVAYHEKYPTIYHLRKKLVDSTDKADLRLIYLALAHMIKFRGHFLIEGDLNPDNSDVDKLFIQLVQTYNQLFEENPINASGVDAKAILSARLSKSRRLENLIAQLPGEKKNGLFGNLIALSLGLTPNFKSNFDLAEDAKLQLSKDTYDDDLDNLLAQIGDQYADLFLAAKNLSDAILLSDILRVNTEITKAPLSASMIKRYDEHHQDLTLLKALVRQQLPEKYKEIFFDQSKNGYAGYIDGGASQEEFYKFIKPILEKMDGTEELLVKLNREDLLRKQRTFDNGSIPHQIHLGELHAILRRQEDFYPFLKDNREKIEKILTFRIPYYVGPLARGNSRFAWMTRKSEETITPWNFEEVVDKGASAQSFIERMTNFDKNLPNEKVLPKHSLLYEYFTVYNELTKVKYVTEGMRKPAFLSGEQKKAIVDLLFKTNRKVTVKQLKEDYFKKIECFDSVEISGVEDRFNASLGTYHDLLKIIKDKDFLDNEENEDILEDIVLTLTLFEDREMIEERLKTYAHLFDDKVMKQLKRRRYTGWGRLSRKLINGIRDKQSGKTILDFLKSDGFANRNFMQLIHDDSLTFKEDIQKAQVSGQGDSLHEHIANLAGSPAIKKGILQTVKVVDELVKVMGRHKPENIVIEMARENQTTQKGQKNSRERMKRIEEGIKELGSQILKEHPVENTQLQNEKLYLYYLQNGRDMYVDQELDINRLSDYDVDHIVPQSFLKDDSIDNKVLTRSDKARGKSDNVPSEEVVKKMKNYWRQLLNAKLITQRKFDNLTKAERGGLSELDKAGFIKRQLVETRQITKHVAQILDSRMNTKYDENDKLIREVKVITLKSKLVSDFRKDFQFYKVREINNYHHAHDAYLNAVVGTALIKKYPKLESEFVYGDYKVYDVRKMIAKSEQEIGKATAKYFFYSNIMNFFKTEITLANGEIRKRPLIETNGETGEIVWDKGRDFATVRKVLSMPQVNIVKKTEVQTGGFSKESILPKRNSDKLIARKKDWDPKKYGGFDSPTVAYSVLVVAKVEKGKSKKLKSVKELLGITIMERSSFEKNPIDFLEAKGYKEVKKDLIIKLPKYSLFELENGRKRMLASAGELQKGNELALPSKYVNFLYLASHYEKLKGSPEDNEQKQLFVEQHKHYLDEIIEQISEFSKRVILADANLDKVLSAYNKHRDKPIREQAENIIHLFTLTNLGAPAAFKYFDTTIDRKRYTSTKEVLDATLIHQSITGLYETRIDLSQLGGDGGEAAAKEAAAKEAAAKEAAAKGGTLGIEDEYRLHETSTEPDVSLGSTWLSDFPQAWAETGGMGLAVRQAPLIIPLKATSTPVSIQQYPMSHEARLGIKPHIQRLLDQGILVPCQSPWNTPLLPVKKPGTNDYRPVQDLREVNKRVEDIHPTVPNPYNLLSGLPPSHQWYTVLDLKDAFFCLRLHPTSQPLFAFEWRDPGMGISGQLTWTRLPQGFKNSPTLFNEALHRDLADFRIQHPDLILLQYVDDILLAATSELDCQQGTRALLQTLGDLGYRASAKKAQICQKQVKYLGYLLREGQRWLTEARKETVMGQPVPKTPRQLREFLGTAGFCRLWIPGFAEMAAPLYPLTKPGTLFSWGPDQQKAYQEIKQALLTAPALGLPDLTKPFELFVDEKQGYAKGVLTQKLGPWRRPVAYLSKKLDPVAAGWPPCLRMVAAIAVLTKDAGKLTMGQPLVILAPHAVEALVKQPPDRWLSNARMTHYQAMLLDTDRVQFGPVVALNPATLLPLPEEGAPHDCLEILAETHGTRPDLTDQPIPDADHTWYTDGSSFLQEGQRKAGAAVTTETEVIWAGALPAGTSAQRAELIALTQALKMAEGKRLNVYTDSRYAFATAHIHGEIYRRRGWLTSEGREIKNKSEILALLKALFLPKRLSIIHCLGHQKGDSAEARGNRLADQAAREAAIKTPPDTSTLLAGKRTADGSEFEKRTADGSEFESPKKKAKVE

SEQ ID NO: 2071 - protein, 2096 aa, synthetic construct
MPAAKRVKLDGGDKKYSIGLDIGTNSVGWAVITDEYKVPSKKFKVLGNTDRHSIKKNLIGALLFDSGETAEATRLKRTARRRYTRRKNRICYLQEIFSNEMAKVDDSFFHRLEESFLVEEDKKHERHPIFGNIVDEVAYHEKYPTIYHLRKKLVDSTDKADLRLIYLALAHMIKFRGHFLIEGDLNPDNSDVDKLFIQLVQTYNQLFEENPINASGVDAKAILSARLSKSRRLENLIAQLPGEKKNGLFGNLIALSLGLTPNFKSNFDLAEDAKLQLSKDTYDDDLDNLLAQIGDQYADLFLAAKNLSDAILLSDILRVNTEITKAPLSASMIKRYDEHHQDLTLLKALVRQQLPEKYKEIFFDQSKNGYAGYIDGGASQEEFYKFIKPILEKMDGTEELLVKLNREDLLRKQRTFDNGSIPHQIHLGELHAILRRQEDFYPFLKDNREKIEKILTFRIPYYVGPLARGNSRFAWMTRKSEETITPWNFEEVVDKGASAQSFIERMTNFDKNLPNEKVLPKHSLLYEYFTVYNELTKVKYVTEGMRKPAFLSGEQKKAIVDLLFKTNRKVTVKQLKEDYFKKIECFDSVEISGVEDRFNASLGTYHDLLKIIKDKDFLDNEENEDILEDIVLTLTLFEDREMIEERLKTYAHLFDDKVMKQLKRRRYTGWGRLSRKLINGIRDKQSGKTILDFLKSDGFANRNFMQLIHDDSLTFKEDIQKAQVSGQGDSLHEHIANLAGSPAIKKGILQTVKVVDELVKVMGRHKPENIVIEMARENQTTQKGQKNSRERMKRIEEGIKELGSQILKEHPVENTQLQNEKLYLYYLQNGRDMYVDQELDINRLSDYDVDHIVPQSFLKDDSIDNKVLTRSDKARGKSDNVPSEEVVKKMKNYWRQLLNAKLITQRKFDNLTKAERGGLSELDKAGFIKRQLVETRQITKHVAQILDSRMNTKYDENDKLIREVKVITLKSKLVSDFRKDFQFYKVREINNYHHAHDAYLNAVVGTALIKKYPKLESEFVYGDYKVYDVRKMIAKSEQEIGKATAKYFFYSNIMNFFKTEITLANGEIRKRPLIETNGETGEIVWDKGRDFATVRKVLSMPQVNIVKKTEVQTGGFSKESILPKRNSDKLIARKKDWDPKKYGGFDSPTVAYSVLVVAKVEKGKSKKLKSVKELLGITIMERSSFEKNPIDFLEAKGYKEVKKDLIIKLPKYSLFELENGRKRMLASAGELQKGNELALPSKYVNFLYLASHYEKLKGSPEDNEQKQLFVEQHKHYLDEIIEQISEFSKRVILADANLDKVLSAYNKHRDKPIREQAENIIHLFTLTNLGAPAAFKYFDTTIDRKRYTSTKEVLDATLIHQSITGLYETRIDLSQLGGDGGGGSEAAAKPAPGGTLGIEDEYRLHETSTEPDVSLGSTWLSDFPQAWAETGGMGLAVRQAPLIIPLKATSTPVSIQQYPMSHEARLGIKPHIQRLLDQGILVPCQSPWNTPLLPVKKPGTNDYRPVQDLREVNKRVEDIHPTVPNPYNLLSGLPPSHQWYTVLDLKDAFFCLRLHPTSQPLFAFEWRDPGMGISGQLTWTRLPQGFKNSPTLFNEALHRDLADFRIQHPDLILLQYVDDILLAATSELDCQQGTRALLQTLGDLGYRASAKKAQICQKQVKYLGYLLREGQRWLTEARKETVMGQPVPKTPRQLREFLGTAGFCRLWIPGFAEMAAPLYPLTKPGTLFSWGPDQQKAYQEIKQALLTAPALGLPDLTKPFELFVDEKQGYAKGVLTQKLGPWRRPVAYLSKKLDPVAAGWPPCLRMVAAIAVLTKDAGKLTMGQPLVILAPHAVEALVKQPPDRWLSNARMTHYQAMLLDTDRVQFGPVVALNPATLLPLPEEGAPHDCLEILAETHGTRPDLTDQPIPDADHTWYTDGSSFLQEGQRKAGAAVTTETEVIWAGALPAGTSAQRAELIALTQALKMAEGKRLNVYTDSRYAFATAHIHGEIYRRRGWLTSEGREIKNKSEILALLKALFLPKRLSIIHCLGHQKGDSAEARGNRLADQAAREAAIKTPPDTSTLLAGKRTADGSEFEKRTADGSEFESPKKKAKVE

SEQ ID NO: 2072 - protein, 2105 aa, synthetic construct
MPAAKRVKLDGGDKKYSIGLDIGTNSVGWAVITDEYKVPSKKFKVLGNTDRHSIKKNLIGALLFDSGETAEATRLKRTARRRYTRRKNRICYLQEIFSNEMAKVDDSFFHRLEESFLVEEDKKHERHPIFGNIVDEVAYHEKYPTIYHLRKKLVDSTDKADLRLIYLALAHMIKFRGHFLIEGDLNPDNSDVDKLFIQLVQTYNQLFEENPINASGVDAKAILSARLSKSRRLENLIAQLPGEKKNGLFGNLIALSLGLTPNFKSNFDLAEDAKLQLSKDTYDDDLDNLLAQIGDQYADLFLAAKNLSDAILLSDILRVNTEITKAPLSASMIKRYDEHHQDLTLLKALVRQQLPEKYKEIFFDQSKNGYAGYIDGGASQEEFYKFIKPILEKMDGTEELLVKLNREDLLRKQRTFDNGSIPHQIHLGELHAILRRQEDFYPFLKDNREKIEKILTFRIPYYVGPLARGNSRFAWMTRKSEETITPWNFEEVVDKGASAQSFIERMTNFDKNLPNEKVLPKHSLLYEYFTVYNELTKVKYVTEGMRKPAFLSGEQKKAIVDLLFKTNRKVTVKQLKEDYFKKIECFDSVEISGVEDRFNASLGTYHDLLKIIKDKDFLDNEENEDILEDIVLTLTLFEDREMIEERLKTYAHLFDDKVMKQLKRRRYTGWGRLSRKLINGIRDKQSGKTILDFLKSDGFANRNFMQLIHDDSLTFKEDIQKAQVSGQGDSLHEHIANLAGSPAIKKGILQTVKVVDELVKVMGRHKPENIVIEMARENQTTQKGQKNSRERMKRIEEGIKELGSQILKEHPVENTQLQNEKLYLYYLQNGRDMYVDQELDINRLSDYDVDHIVPQSFLKDDSIDNKVLTRSDKARGKSDNVPSEEVVKKMKNYWRQLLNAKLITQRKFDNLTKAERGGLSELDKAGFIKRQLVETRQITKHVAQILDSRMNTKYDENDKLIREVKVITLKSKLVSDFRKDFQFYKVREINNYHHAHDAYLNAVVGTALIKKYPKLESEFVYGDYKVYDVRKMIAKSEQEIGKATAKYFFYSNIMNFFKTEITLANGEIRKRPLIETNGETGEIVWDKGRDFATVRKVLSMPQVNIVKKTEVQTGGFSKESILPKRNSDKLIARKKDWDPKKYGGFDSPTVAYSVLVVAKVEKGKSKKLKSVKELLGITIMERSSFEKNPIDFLEAKGYKEVKKDLIIKLPKYSLFELENGRKRMLASAGELQKGNELALPSKYVNFLYLASHYEKLKGSPEDNEQKQLFVEQHKHYLDEIIEQISEFSKRVILADANLDKVLSAYNKHRDKPIREQAENIIHLFTLTNLGAPAAFKYFDTTIDRKRYTSTKEVLDATLIHQSITGLYETRIDLSQLGGDGGGGGGSGGGGSGGGGSGGGGSGGTLGIEDEYRLHETSTEPDVSLGSTWLSDFPQAWAETGGMGLAVRQAPLIIPLKATSTPVSIQQYPMSHEARLGIKPHIQRLLDQGILVPCQSPWNTPLLPVKKPGTNDYRPVQDLREVNKRVEDIHPTVPNPYNLLSGLPPSHQWYTVLDLKDAFFCLRLHPTSQPLFAFEWRDPGMGISGQLTWTRLPQGFKNSPTLFNEALHRDLADFRIQHPDLILLQYVDDILLAATSELDCQQGTRALLQTLGDLGYRASAKKAQICQKQVKYLGYLLREGQRWLTEARKETVMGQPVPKTPRQLREFLGTAGFCRLWIPGFAEMAAPLYPLTKPGTLFSWGPDQQKAYQEIKQALLTAPALGLPDLTKPFELFVDEKQGYAKGVLTQKLGPWRRPVAYLSKKLDPVAAGWPPCLRMVAAIAVLTKDAGKLTMGQPLVILAPHAVEALVKQPPDRWLSNARMTHYQAMLLDTDRVQFGPVVALNPATLLPLPEEGAPHDCLEILAETHGTRPDLTDQPIPDADHTWYTDGSSFLQEGQRKAGAAVTTETEVIWAGALPAGTSAQRAELIALTQALKMAEGKRLNVYTDSRYAFATAHIHGEIYRRRGWLTSEGREIKNKSEILALLKALFLPKRLSIIHCLGHQKGDSAEARGNRLADQAAREAAIKTPPDTSTLLAGKRTADGSEFEKRTADGSEFESPKKKAKVE

SEQ ID NO: 2073 - protein, 2093 aa, synthetic construct
MPAAKRVKLDGGDKKYSIGLDIGTNSVGWAVITDEYKVPSKKFKVLGNTDRHSIKKNLIGALLFDSGETAEATRLKRTARRRYTRRKNRICYLQEIFSNEMAKVDDSFFHRLEESFLVEEDKKHERHPIFGNIVDEVAYHEKYPTIYHLRKKLVDSTDKADLRLIYLALAHMIKFRGHFLIEGDLNPDNSDVDKLFIQLVQTYNQLFEENPINASGVDAKAILSARLSKSRRLENLIAQLPGEKKNGLFGNLIALSLGLTPNFKSNFDLAEDAKLQLSKDTYDDDLDNLLAQIGDQYADLFLAAKNLSDAILLSDILRVNTEITKAPLSASMIKRYDEHHQDLTLLKALVRQQLPEKYKEIFFDQSKNGYAGYIDGGASQEEFYKFIKPILEKMDGTEELLVKLNREDLLRKQRTFDNGSIPHQIHLGELHAILRRQEDFYPFLKDNREKIEKILTFRIPYYVGPLARGNSRFAWMTRKSEETITPWNFEEVVDKGASAQSFIERMTNFDKNLPNEKVLPKHSLLYEYFTVYNELTKVKYVTEGMRKPAFLSGEQKKAIVDLLFKTNRKVTVKQLKEDYFKKIECFDSVEISGVEDRFNASLGTYHDLLKIIKDKDFLDNEENEDILEDIVLTLTLFEDREMIEERLKTYAHLFDDKVMKQLKRRRYTGWGRLSRKLINGIRDKQSGKTILDFLKSDGFANRNFMQLIHDDSLTFKEDIQKAQVSGQGDSLHEHIANLAGSPAIKKGILQTVKVVDELVKVMGRHKPENIVIEMARENQTTQKGQKNSRERMKRIEEGIKELGSQILKEHPVENTQLQNEKLYLYYLQNGRDMYVDQELDINRLSDYDVDHIVPQSFLKDDSIDNKVLTRSDKARGKSDNVPSEEVVKKMKNYWRQLLNAKLITQRKFDNLTKAERGGLSELDKAGFIKRQLVETRQITKHVAQILDSRMNTKYDENDKLIREVKVITLKSKLVSDFRKDFQFYKVREINNYHHAHDAYLNAVVGTALIKKYPKLESEFVYGDYKVYDVRKMIAKSEQEIGKATAKYFFYSNIMNFFKTEITLANGEIRKRPLIETNGETGEIVWDKGRDFATVRKVLSMPQVNIVKKTEVQTGGFSKESILPKRNSDKLIARKKDWDPKKYGGFDSPTVAYSVLVVAKVEKGKSKKLKSVKELLGITIMERSSFEKNPIDFLEAKGYKEVKKDLIIKLPKYSLFELENGRKRMLASAGELQKGNELALPSKYVNFLYLASHYEKLKGSPEDNEQKQLFVEQHKHYLDEIIEQISEFSKRVILADANLDKVLSAYNKHRDKPIREQAENIIHLFTLTNLGAPAAFKYFDTTIDRKRYTSTKEVLDATLIHQSITGLYETRIDLSQLGGDGGGSSEAAAKGGTLGIEDEYRLHETSTEPDVSLGSTWLSDFPQAWAETGGMGLAVRQAPLIIPLKATSTPVSIQQYPMSHEARLGIKPHIQRLLDQGILVPCQSPWNTPLLPVKKPGTNDYRPVQDLREVNKRVEDIHPTVPNPYNLLSGLPPSHQWYTVLDLKDAFFCLRLHPTSQPLFAFEWRDPGMGISGQLTWTRLPQGFKNSPTLFNEALHRDLADFRIQHPDLILLQYVDDILLAATSELDCQQGTRALLQTLGDLGYRASAKKAQICQKQVKYLGYLLREGQRWLTEARKETVMGQPVPKTPRQLREFLGTAGFCRLWIPGFAEMAAPLYPLTKPGTLFSWGPDQQKAYQEIKQALLTAPALGLPDLTKPFELFVDEKQGYAKGVLTQKLGPWRRPVAYLSKKLDPVAAGWPPCLRMVAAIAVLTKDAGKLTMGQPLVILAPHAVEALVKQPPDRWLSNARMTHYQAMLLDTDRVQFGPVVALNPATLLPLPEEGAPHDCLEILAETHGTRPDLTDQPIPDADHTWYTDGSSFLQEGQRKAGAAVTTETEVIWAGALPAGTSAQRAELIALTQALKMAEGKRLNVYTDSRYAFATAHIHGEIYRRRGWLTSEGREIKNKSEILALLKALFLPKRLSIIHCLGHQKGDSAEARGNRLADQAAREAAIKTPPDTSTLLAGKRTADGSEFEKRTADGSEFESPKKKAKVE

SEQ ID NO: 2074 - protein, 2096 aa, synthetic construct
MPAAKRVKLDGGDKKYSIGLDIGTNSVGWAVITDEYKVPSKKFKVLGNTDRHSIKKNLIGALLFDSGETAEATRLKRTARRRYTRRKNRICYLQEIFSNEMAKVDDSFFHRLEESFLVEEDKKHERHPIFGNIVDEVAYHEKYPTIYHLRKKLVDSTDKADLRLIYLALAHMIKFRGHFLIEGDLNPDNSDVDKLFIQLVQTYNQLFEENPINASGVDAKAILSARLSKSRRLENLIAQLPGEKKNGLFGNLIALSLGLTPNFKSNFDLAEDAKLQLSKDTYDDDLDNLLAQIGDQYADLFLAAKNLSDAILLSDILRVNTEITKAPLSASMIKRYDEHHQDLTLLKALVRQQLPEKYKEIFFDQSKNGYAGYIDGGASQEEFYKFIKPILEKMDGTEELLVKLNREDLLRKQRTFDNGSIPHQIHLGELHAILRRQEDFYPFLKDNREKIEKILTFRIPYYVGPLARGNSRFAWMTRKSEETITPWNFEEVVDKGASAQSFIERMTNFDKNLPNEKVLPKHSLLYEYFTVYNELTKVKYVTEGMRKPAFLSGEQKKAIVDLLFKTNRKVTVKQLKEDYFKKIECFDSVEISGVEDRFNASLGTYHDLLKIIKDKDFLDNEENEDILEDIVLTLTLFEDREMIEERLKTYAHLFDDKVMKQLKRRRYTGWGRLSRKLINGIRDKQSGKTILDFLKSDGFANRNFMQLIHDDSLTFKEDIQKAQVSGQGDSLHEHIANLAGSPAIKKGILQTVKVVDELVKVMGRHKPENIVIEMARENQTTQKGQKNSRERMKRIEEGIKELGSQILKEHPVENTQLQNEKLYLYYLQNGRDMYVDQELDINRLSDYDVDHIVPQSFLKDDSIDNKVLTRSDKARGKSDNVPSEEVVKKMKNYWRQLLNAKLITQRKFDNLTKAERGGLSELDKAGFIKRQLVETRQITKHVAQILDSRMNTKYDENDKLIREVKVITLKSKLVSDFRKDFQFYKVREINNYHHAHDAYLNAVVGTALIKKYPKLESEFVYGDYKVYDVRKMIAKSEQEIGKATAKYFFYSNIMNFFKTEITLANGEIRKRPLIETNGETGEIVWDKGRDFATVRKVLSMPQVNIVKKTEVQTGGFSKESILPKRNSDKLIARKKDWDPKKYGGFDSPTVAYSVLVVAKVEKGKSKKLKSVKELLGITIMERSSFEKNPIDFLEAKGYKEVKKDLIIKLPKYSLFELENGRKRMLASAGELQKGNELALPSKYVNFLYLASHYEKLKGSPEDNEQKQLFVEQHKHYLDEIIEQISEFSKRVILADANLDKVLSAYNKHRDKPIREQAENIIHLFTLTNLGAPAAFKYFDTTIDRKRYTSTKEVLDATLIHQSITGLYETRIDLSQLGGDGGGGSEAAAKGGGGGTLGIEDEYRLHETSTEPDVSLGSTWLSDFPQAWAETGGMGLAVRQAPLIIPLKATSTPVSIQQYPMSHEARLGIKPHIQRLLDQGILVPCQSPWNTPLLPVKKPGTNDYRPVQDLREVNKRVEDIHPTVPNPYNLLSGLPPSHQWYTVLDLKDAFFCLRLHPTSQPLFAFEWRDPGMGISGQLTWTRLPQGFKNSPTLFNEALHRDLADFRIQHPDLILLQYVDDILLAATSELDCQQGTRALLQTLGDLGYRASAKKAQICQKQVKYLGYLLREGQRWLTEARKETVMGQPVPKTPRQLREFLGTAGFCRLWIPGFAEMAAPLYPLTKPGTLFSWGPDQQKAYQEIKQALLTAPALGLPDLTKPFELFVDEKQGYAKGVLTQKLGPWRRPVAYLSKKLDPVAAGWPPCLRMVAAIAVLTKDAGKLTMGQPLVILAPHAVEALVKQPPDRWLSNARMTHYQAMLLDTDRVQFGPVVALNPATLLPLPEEGAPHDCLEILAETHGTRPDLTDQPIPDADHTWYTDGSSFLQEGQRKAGAAVTTETEVIWAGALPAGTSAQRAELIALTQALKMAEGKRLNVYTDSRYAFATAHIHGEIYRRRGWLTSEGREIKNKSEILALLKALFLPKRLSIIHCLGHQKGDSAEARGNRLADQAAREAAIKTPPDTSTLLAGKRTADGSEFEKRTADGSEFESPKKKAKVE

SEQ ID NO: 2075 - protein, 2096 aa, synthetic construct
MPAAKRVKLDGGDKKYSIGLDIGTNSVGWAVITDEYKVPSKKFKVLGNTDRHSIKKNLIGALLFDSGETAEATRLKRTARRRYTRRKNRICYLQEIFSNEMAKVDDSFFHRLEESFLVEEDKKHERHPIFGNIVDEVAYHEKYPTIYHLRKKLVDSTDKADLRLIYLALAHMIKFRGHFLIEGDLNPDNSDVDKLFIQLVQTYNQLFEENPINASGVDAKAILSARLSKSRRLENLIAQLPGEKKNGLFGNLIALSLGLTPNFKSNFDLAEDAKLQLSKDTYDDDLDNLLAQIGDQYADLFLAAKNLSDAILLSDILRVNTEITKAPLSASMIKRYDEHHQDLTLLKALVRQQLPEKYKEIFFDQSKNGYAGYIDGGASQEEFYKFIKPILEKMDGTEELLVKLNREDLLRKQRTFDNGSIPHQIHLGELHAILRRQEDFYPFLKDNREKIEKILTFRIPYYVGPLARGNSRFAWMTRKSEETITPWNFEEVVDKGASAQSFIERMTNFDKNLPNEKVLPKHSLLYEYFTVYNELTKVKYVTEGMRKPAFLSGEQKKAIVDLLFKTNRKVTVKQLKEDYFKKIECFDSVEISGVEDRFNASLGTYHDLLKIIKDKDFLDNEENEDILEDIVLTLTLFEDREMIEERLKTYAHLFDDKVMKQLKRRRYTGWGRLSRKLINGIRDKQSGKTILDFLKSDGFANRNFMQLIHDDSLTFKEDIQKAQVSGQGDSLHEHIANLAGSPAIKKGILQTVKVVDELVKVMGRHKPENIVIEMARENQTTQKGQKNSRERMKRIEEGIKELGSQILKEHPVENTQLQNEKLYLYYLQNGRDMYVDQELDINRLSDYDVDHIVPQSFLKDDSIDNKVLTRSDKARGKSDNVPSEEVVKKMKNYWRQLLNAKLITQRKFDNLTKAERGGLSELDKAGFIKRQLVETRQITKHVAQILDSRMNTKYDENDKLIREVKVITLKSKLVSDFRKDFQFYKVREINNYHHAHDAYLNAVVGTALIKKYPKLESEFVYGDYKVYDVRKMIAKSEQEIGKATAKYFFYSNIMNFFKTEITLANGEIRKRPLIETNGETGEIVWDKGRDFATVRKVLSMPQVNIVKKTEVQTGGFSKESILPKRNSDKLIARKKDWDPKKYGGFDSPTVAYSVLVVAKVEKGKSKKLKSVKELLGITIMERSSFEKNPIDFLEAKGYKEVKKDLIIKLPKYSLFELENGRKRMLASAGELQKGNELALPSKYVNFLYLASHYEKLKGSPEDNEQKQLFVEQHKHYLDEIIEQISEFSKRVILADANLDKVLSAYNKHRDKPIREQAENIIHLFTLTNLGAPAAFKYFDTTIDRKRYTSTKEVLDATLIHQSITGLYETRIDLSQLGGDGGGSSEAAAKGGGGGTLGIEDEYRLHETSTEPDVSLGSTWLSDFPQAWAETGGMGLAVRQAPLIIPLKATSTPVSIQQYPMSHEARLGIKPHIQRLLDQGILVPCQSPWNTPLLPVKKPGTNDYRPVQDLREVNKRVEDIHPTVPNPYNLLSGLPPSHQWYTVLDLKDAFFCLRLHPTSQPLFAFEWRDPGMGISGQLTWTRLPQGFKNSPTLFNEALHRDLADFRIQHPDLILLQYVDDILLAATSELDCQQGTRALLQTLGDLGYRASAKKAQICQKQVKYLGYLLREGQRWLTEARKETVMGQPVPKTPRQLREFLGTAGFCRLWIPGFAEMAAPLYPLTKPGTLFSWGPDQQKAYQEIKQALLTAPALGLPDLTKPFELFVDEKQGYAKGVLTQKLGPWRRPVAYLSKKLDPVAAGWPPCLRMVAAIAVLTKDAGKLTMGQPLVILAPHAVEALVKQPPDRWLSNARMTHYQAMLLDTDRVQFGPVVALNPATLLPLPEEGAPHDCLEILAETHGTRPDLTDQPIPDADHTWYTDGSSFLQEGQRKAGAAVTTETEVIWAGALPAGTSAQRAELIALTQALKMAEGKRLNVYTDSRYAFATAHIHGEIYRRRGWLTSEGREIKNKSEILALLKALFLPKRLSIIHCLGHQKGDSAEARGNRLADQAAREAAIKTPPDTSTLLAGKRTADGSEFEKRTADGSEFESPKKKAKVE

SEQ ID NO: 2076 - protein, 2096 aa, synthetic construct
MPAAKRVKLDGGDKKYSIGLDIGTNSVGWAVITDEYKVPSKKFKVLGNTDRHSIKKNLIGALLFDSGETAEATRLKRTARRRYTRRKNRICYLQEIFSNEMAKVDDSFFHRLEESFLVEEDKKHERHPIFGNIVDEVAYHEKYPTIYHLRKKLVDSTDKADLRLIYLALAHMIKFRGHFLIEGDLNPDNSDVDKLFIQLVQTYNQLFEENPINASGVDAKAILSARLSKSRRLENLIAQLPGEKKNGLFGNLIALSLGLTPNFKSNFDLAEDAKLQLSKDTYDDDLDNLLAQIGDQYADLFLAAKNLSDAILLSDILRVNTEITKAPLSASMIKRYDEHHQDLTLLKALVRQQLPEKYKEIFFDQSKNGYAGYIDGGASQEEFYKFIKPILEKMDGTEELLVKLNREDLLRKQRTFDNGSIPHQIHLGELHAILRRQEDFYPFLKDNREKIEKILTFRIPYYVGPLARGNSRFAWMTRKSEETITPWNFEEVVDKGASAQSFIERMTNFDKNLPNEKVLPKHSLLYEYFTVYNELTKVKYVTEGMRKPAFLSGEQKKAIVDLLFKTNRKVTVKQLKEDYFKKIECFDSVEISGVEDRFNASLGTYHDLLKIIKDKDFLDNEENEDILEDIVLTLTLFEDREMIEERLKTYAHLFDDKVMKQLKRRRYTGWGRLSRKLINGIRDKQSGKTILDFLKSDGFANRNFMQLIHDDSLTFKEDIQKAQVSGQGDSLHEHIANLAGSPAIKKGILQTVKVVDELVKVMGRHKPENIVIEMARENQTTQKGQKNSRERMKRIEEGIKELGSQILKEHPVENTQLQNEKLYLYYLQNGRDMYVDQELDINRLSDYDVDHIVPQSFLKDDSIDNKVLTRSDKARGKSDNVPSEEVVKKMKNYWRQLLNAKLITQRKFDNLTKAERGGLSELDKAGFIKRQLVETRQITKHVAQILDSRMNTKYDENDKLIREVKVITLKSKLVSDFRKDFQFYKVREINNYHHAHDAYLNAVVGTALIKKYPKLESEFVYGDYKVYDVRKMIAKSEQEIGKATAKYFFYSNIMNFFKTEITLANGEIRKRPLIETNGETGEIVWDKGRDFATVRKVLSMPQVNIVKKTEVQTGGFSKESILPKRNSDKLIARKKDWDPKKYGGFDSPTVAYSVLVVAKVEKGKSKKLKSVKELLGITIMERSSFEKNPIDFLEAKGYKEVKKDLIIKLPKYSLFELENGRKRMLASAGELQKGNELALPSKYVNFLYLASHYEKLKGSPEDNEQKQLFVEQHKHYLDEIIEQISEFSKRVILADANLDKVLSAYNKHRDKPIREQAENIIHLFTLTNLGAPAAFKYFDTTIDRKRYTSTKEVLDATLIHQSITGLYETRIDLSQLGGDGGGSSGGSEAAAKGGTLGIEDEYRLHETSTEPDVSLGSTWLSDFPQAWAETGGMGLAVRQAPLIIPLKATSTPVSIQQYPMSHEARLGIKPHIQRLLDQGILVPCQSPWNTPLLPVKKPGTNDYRPVQDLREVNKRVEDIHPTVPNPYNLLSGLPPSHQWYTVLDLKDAFFCLRLHPTSQPLFAFEWRDPGMGISGQLTWTRLPQGFKNSPTLFNEALHRDLADFRIQHPDLILLQYVDDILLAATSELDCQQGTRALLQTLGDLGYRASAKKAQICQKQVKYLGYLLREGQRWLTEARKETVMGQPVPKTPRQLREFLGTAGFCRLWIPGFAEMAAPLYPLTKPGTLFSWGPDQQKAYQEIKQALLTAPALGLPDLTKPFELFVDEKQGYAKGVLTQKLGPWRRPVAYLSKKLDPVAAGWPPCLRMVAAIAVLTKDAGKLTMGQPLVILAPHAVEALVKQPPDRWLSNARMTHYQAMLLDTDRVQFGPVVALNPATLLPLPEEGAPHDCLEILAETHGTRPDLTDQPIPDADHTWYTDGSSFLQEGQRKAGAAVTTETEVIWAGALPAGTSAQRAELIALTQALKMAEGKRLNVYTDSRYAFATAHIHGEIYRRRGWLTSEGREIKNKSEILALLKALFLPKRLSIIHCLGHQKGDSAEARGNRLADQAAREAAIKTPPDTSTLLAGKRTADGSEFEKRTADGSEFESPKKKAKVE

SEQ ID NO: 2077 - protein, 2090 aa, synthetic construct
MPAAKRVKLDGGDKKYSIGLDIGTNSVGWAVITDEYKVPSKKFKVLGNTDRHSIKKNLIGALLFDSGETAEATRLKRTARRRYTRRKNRICYLQEIFSNEMAKVDDSFFHRLEESFLVEEDKKHERHPIFGNIVDEVAYHEKYPTIYHLRKKLVDSTDKADLRLIYLALAHMIKFRGHFLIEGDLNPDNSDVDKLFIQLVQTYNQLFEENPINASGVDAKAILSARLSKSRRLENLIAQLPGEKKNGLFGNLIALSLGLTPNFKSNFDLAEDAKLQLSKDTYDDDLDNLLAQIGDQYADLFLAAKNLSDAILLSDILRVNTEITKAPLSASMIKRYDEHHQDLTLLKALVRQQLPEKYKEIFFDQSKNGYAGYIDGGASQEEFYKFIKPILEKMDGTEELLVKLNREDLLRKQRTFDNGSIPHQIHLGELHAILRRQEDFYPFLKDNREKIEKILTFRIPYYVGPLARGNSRFAWMTRKSEETITPWNFEEVVDKGASAQSFIERMTNFDKNLPNEKVLPKHSLLYEYFTVYNELTKVKYVTEGMRKPAFLSGEQKKAIVDLLFKTNRKVTVKQLKEDYFKKIECFDSVEISGVEDRFNASLGTYHDLLKIIKDKDFLDNEENEDILEDIVLTLTLFEDREMIEERLKTYAHLFDDKVMKQLKRRRYTGWGRLSRKLINGIRDKQSGKTILDFLKSDGFANRNFMQLIHDDSLTFKEDIQKAQVSGQGDSLHEHIANLAGSPAIKKGILQTVKVVDELVKVMGRHKPENIVIEMARENQTTQKGQKNSRERMKRIEEGIKELGSQILKEHPVENTQLQNEKLYLYYLQNGRDMYVDQELDINRLSDYDVDHIVPQSFLKDDSIDNKVLTRSDKARGKSDNVPSEEVVKKMKNYWRQLLNAKLITQRKFDNLTKAERGGLSELDKAGFIKRQLVETRQITKHVAQILDSRMNTKYDENDKLIREVKVITLKSKLVSDFRKDFQFYKVREINNYHHAHDAYLNAVVGTALIKKYPKLESEFVYGDYKVYDVRKMIAKSEQEIGKATAKYFFYSNIMNFFKTEITLANGEIRKRPLIETNGETGEIVWDKGRDFATVRKVLSMPQVNIVKKTEVQTGGFSKESILPKRNSDKLIARKKDWDPKKYGGFDSPTVAYSVLVVAKVEKGKSKKLKSVKELLGITIMERSSFEKNPIDFLEAKGYKEVKKDLIIKLPKYSLFELENGRKRMLASAGELQKGNELALPSKYVNFLYLASHYEKLKGSPEDNEQKQLFVEQHKHYLDEIIEQISEFSKRVILADANLDKVLSAYNKHRDKPIREQAENIIHLFTLTNLGAPAAFKYFDTTIDRKRYTSTKEVLDATLIHQSITGLYETRIDLSQLGGDGGPAPAPGGTLGIEDEYRLHETSTEPDVSLGSTWLSDFPQAWAETGGMGLAVRQAPLIIPLKATSTPVSIQQYPMSHEARLGIKPHIQRLLDQGILVPCQSPWNTPLLPVKKPGTNDYRPVQDLREVNKRVEDIHPTVPNPYNLLSGLPPSHQWYTVLDLKDAFFCLRLHPTSQPLFAFEWRDPGMGISGQLTWTRLPQGFKNSPTLFNEALHRDLADFRIQHPDLILLQYVDDILLAATSELDCQQGTRALLQTLGDLGYRASAKKAQICQKQVKYLGYLLREGQRWLTEARKETVMGQPVPKTPRQLREFLGTAGFCRLWIPGFAEMAAPLYPLTKPGTLFSWGPDQQKAYQEIKQALLTAPALGLPDLTKPFELFVDEKQGYAKGVLTQKLGPWRRPVAYLSKKLDPVAAGWPPCLRMVAAIAVLTKDAGKLTMGQPLVILAPHAVEALVKQPPDRWLSNARMTHYQAMLLDTDRVQFGPVVALNPATLLPLPEEGAPHDCLEILAETHGTRPDLTDQPIPDADHTWYTDGSSFLQEGQRKAGAAVTTETEVIWAGALPAGTSAQRAELIALTQALKMAEGKRLNVYTDSRYAFATAHIHGEIYRRRGWLTSEGREIKNKSEILALLKALFLPKRLSIIHCLGHQKGDSAEARGNRLADQAAREAAIKTPPDTSTLLAGKRTADGSEFEKRTADGSEFESPKKKAKVE

SEQ ID NO: 2078 - protein, 2091 aa, synthetic construct
MPAAKRVKLDGGDKKYSIGLDIGTNSVGWAVITDEYKVPSKKFKVLGNTDRHSIKKNLIGALLFDSGETAEATRLKRTARRRYTRRKNRICYLQEIFSNEMAKVDDSFFHRLEESFLVEEDKKHERHPIFGNIVDEVAYHEKYPTIYHLRKKLVDSTDKADLRLIYLALAHMIKFRGHFLIEGDLNPDNSDVDKLFIQLVQTYNQLFEENPINASGVDAKAILSARLSKSRRLENLIAQLPGEKKNGLFGNLIALSLGLTPNFKSNFDLAEDAKLQLSKDTYDDDLDNLLAQIGDQYADLFLAAKNLSDAILLSDILRVNTEITKAPLSASMIKRYDEHHQDLTLLKALVRQQLPEKYKEIFFDQSKNGYAGYIDGGASQEEFYKFIKPILEKMDGTEELLVKLNREDLLRKQRTFDNGSIPHQIHLGELHAILRRQEDFYPFLKDNREKIEKILTFRIPYYVGPLARGNSRFAWMTRKSEETITPWNFEEVVDKGASAQSFIERMTNFDKNLPNEKVLPKHSLLYEYFTVYNELTKVKYVTEGMRKPAFLSGEQKKAIVDLLFKTNRKVTVKQLKEDYFKKIECFDSVEISGVEDRFNASLGTYHDLLKIIKDKDFLDNEENEDILEDIVLTLTLFEDREMIEERLKTYAHLFDDKVMKQLKRRRYTGWGRLSRKLINGIRDKQSGKTILDFLKSDGFANRNFMQLIHDDSLTFKEDIQKAQVSGQGDSLHEHIANLAGSPAIKKGILQTVKVVDELVKVMGRHKPENIVIEMARENQTTQKGQKNSRERMKRIEEGIKELGSQILKEHPVENTQLQNEKLYLYYLQNGRDMYVDQELDINRLSDYDVDHIVPQSFLKDDSIDNKVLTRSDKARGKSDNVPSEEVVKKMKNYWRQLLNAKLITQRKFDNLTKAERGGLSELDKAGFIKRQLVETRQITKHVAQILDSRMNTKYDENDKLIREVKVITLKSKLVSDFRKDFQFYKVREINNYHHAHDAYLNAVVGTALIKKYPKLESEFVYGDYKVYDVRKMIAKSEQEIGKATAKYFFYSNIMNFFKTEITLANGEIRKRPLIETNGETGEIVWDKGRDFATVRKVLSMPQVNIVKKTEVQTGGFSKESILPKRNSDKLIARKKDWDPKKYGGFDSPTVAYSVLVVAKVEKGKSKKLKSVKELLGITIMERSSFEKNPIDFLEAKGYKEVKKDLIIKLPKYSLFELENGRKRMLASAGELQKGNELALPSKYVNFLYLASHYEKLKGSPEDNEQKQLFVEQHKHYLDEIIEQISEFSKRVILADANLDKVLSAYNKHRDKPIREQAENIIHLFTLTNLGAPAAFKYFDTTIDRKRYTSTKEVLDATLIHQSITGLYETRIDLSQLGGDGGPAPGGSGGTLGIEDEYRLHETSTEPDVSLGSTWLSDFPQAWAETGGMGLAVRQAPLIIPLKATSTPVSIQQYPMSHEARLGIKPHIQRLLDQGILVPCQSPWNTPLLPVKKPGTNDYRPVQDLREVNKRVEDIHPTVPNPYNLLSGLPPSHQWYTVLDLKDAFFCLRLHPTSQPLFAFEWRDPGMGISGQLTWTRLPQGFKNSPTLFNEALHRDLADFRIQHPDLILLQYVDDILLAATSELDCQQGTRALLQTLGDLGYRASAKKAQICQKQVKYLGYLLREGQRWLTEARKETVMGQPVPKTPRQLREFLGTAGFCRLWIPGFAEMAAPLYPLTKPGTLFSWGPDQQKAYQEIKQALLTAPALGLPDLTKPFELFVDEKQGYAKGVLTQKLGPWRRPVAYLSKKLDPVAAGWPPCLRMVAAIAVLTKDAGKLTMGQPLVILAPHAVEALVKQPPDRWLSNARMTHYQAMLLDTDRVQFGPVVALNPATLLPLPEEGAPHDCLEILAETHGTRPDLTDQPIPDADHTWYTDGSSFLQEGQRKAGAAVTTETEVIWAGALPAGTSAQRAELIALTQALKMAEGKRLNVYTDSRYAFATAHIHGEIYRRRGWLTSEGREIKNKSEILALLKALFLPKRLSIIHCLGHQKGDSAEARGNRLADQAAREAAIKTPPDTSTLLAGKRTADGSEFEKRTADGSEFESPKKKAKVE

SEQ ID NO: 2079 - protein, 2094 aa, synthetic construct
MPAAKRVKLDGGDKKYSIGLDIGTNSVGWAVITDEYKVPSKKFKVLGNTDRHSIKKNLIGALLFDSGETAEATRLKRTARRRYTRRKNRICYLQEIFSNEMAKVDDSFFHRLEESFLVEEDKKHERHPIFGNIVDEVAYHEKYPTIYHLRKKLVDSTDKADLRLIYLALAHMIKFRGHFLIEGDLNPDNSDVDKLFIQLVQTYNQLFEENPINASGVDAKAILSARLSKSRRLENLIAQLPGEKKNGLFGNLIALSLGLTPNFKSNFDLAEDAKLQLSKDTYDDDLDNLLAQIGDQYADLFLAAKNLSDAILLSDILRVNTEITKAPLSASMIKRYDEHHQDLTLLKALVRQQLPEKYKEIFFDQSKNGYAGYIDGGASQEEFYKFIKPILEKMDGTEELLVKLNREDLLRKQRTFDNGSIPHQIHLGELHAILRRQEDFYPFLKDNREKIEKILTFRIPYYVGPLARGNSRFAWMTRKSEETITPWNFEEVVDKGASAQSFIERMTNFDKNLPNEKVLPKHSLLYEYFTVYNELTKVKYVTEGMRKPAFLSGEQKKAIVDLLFKTNRKVTVKQLKEDYFKKIECFDSVEISGVEDRFNASLGTYHDLLKIIKDKDFLDNEENEDILEDIVLTLTLFEDREMIEERLKTYAHLFDDKVMKQLKRRRYTGWGRLSRKLINGIRDKQSGKTILDFLKSDGFANRNFMQLIHDDSLTFKEDIQKAQVSGQGDSLHEHIANLAGSPAIKKGILQTVKVVDELVKVMGRHKPENIVIEMARENQTTQKGQKNSRERMKRIEEGIKELGSQILKEHPVENTQLQNEKLYLYYLQNGRDMYVDQELDINRLSDYDVDHIVPQSFLKDDSIDNKVLTRSDKARGKSDNVPSEEVVKKMKNYWRQLLNAKLITQRKFDNLTKAERGGLSELDKAGFIKRQLVETRQITKHVAQILDSRMNTKYDENDKLIREVKVITLKSKLVSDFRKDFQFYKVREINNYHHAHDAYLNAVVGTALIKKYPKLESEFVYGDYKVYDVRKMIAKSEQEIGKATAKYFFYSNIMNFFKTEITLANGEIRKRPLIETNGETGEIVWDKGRDFATVRKVLSMPQVNIVKKTEVQTGGFSKESILPKRNSDKLIARKKDWDPKKYGGFDSPTVAYSVLVVAKVEKGKSKKLKSVKELLGITIMERSSFEKNPIDFLEAKGYKEVKKDLIIKLPKYSLFELENGRKRMLASAGELQKGNELALPSKYVNFLYLASHYEKLKGSPEDNEQKQLFVEQHKHYLDEIIEQISEFSKRVILADANLDKVLSAYNKHRDKPIREQAENIIHLFTLTNLGAPAAFKYFDTTIDRKRYTSTKEVLDATLIHQSITGLYETRIDLSQLGGDGGPAPGSSGGGGGTLGIEDEYRLHETSTEPDVSLGSTWLSDFPQAWAETGGMGLAVRQAPLIIPLKATSTPVSIQQYPMSHEARLGIKPHIQRLLDQGILVPCQSPWNTPLLPVKKPGTNDYRPVQDLREVNKRVEDIHPTVPNPYNLLSGLPPSHQWYTVLDLKDAFFCLRLHPTSQPLFAFEWRDPGMGISGQLTWTRLPQGFKNSPTLFNEALHRDLADFRIQHPDLILLQYVDDILLAATSELDCQQGTRALLQTLGDLGYRASAKKAQICQKQVKYLGYLLREGQRWLTEARKETVMGQPVPKTPRQLREFLGTAGFCRLWIPGFAEMAAPLYPLTKPGTLFSWGPDQQKAYQEIKQALLTAPALGLPDLTKPFELFVDEKQGYAKGVLTQKLGPWRRPVAYLSKKLDPVAAGWPPCLRMVAAIAVLTKDAGKLTMGQPLVILAPHAVEALVKQPPDRWLSNARMTHYQAMLLDTDRVQFGPVVALNPATLLPLPEEGAPHDCLEILAETHGTRPDLTDQPIPDADHTWYTDGSSFLQEGQRKAGAAVTTETEVIWAGALPAGTSAQRAELIALTQALKMAEGKRLNVYTDSRYAFATAHIHGEIYRRRGWLTSEGREIKNKSEILALLKALFLPKRLSIIHCLGHQKGDSAEARGNRLADQAAREAAIKTPPDTSTLLAGKRTADGSEFEKRTADGSEFESPKKKAKVE

SEQ ID NO: 2080 - protein, 2094 aa, synthetic construct
MPAAKRVKLDGGDKKYSIGLDIGTNSVGWAVITDEYKVPSKKFKVLGNTDRHSIKKNLIGALLFDSGETAEATRLKRTARRRYTRRKNRICYLQEIFSNEMAKVDDSFFHRLEESFLVEEDKKHERHPIFGNIVDEVAYHEKYPTIYHLRKKLVDSTDKADLRLIYLALAHMIKFRGHFLIEGDLNPDNSDVDKLFIQLVQTYNQLFEENPINASGVDAKAILSARLSKSRRLENLIAQLPGEKKNGLFGNLIALSLGLTPNFKSNFDLAEDAKLQLSKDTYDDDLDNLLAQIGDQYADLFLAAKNLSDAILLSDILRVNTEITKAPLSASMIKRYDEHHQDLTLLKALVRQQLPEKYKEIFFDQSKNGYAGYIDGGASQEEFYKFIKPILEKMDGTEELLVKLNREDLLRKQRTFDNGSIPHQIHLGELHAILRRQEDFYPFLKDNREKIEKILTFRIPYYVGPLARGNSRFAWMTRKSEETITPWNFEEVVDKGASAQSFIERMTNFDKNLPNEKVLPKHSLLYEYFTVYNELTKVKYVTEGMRKPAFLSGEQKKAIVDLLFKTNRKVTVKQLKEDYFKKIECFDSVEISGVEDRFNASLGTYHDLLKIIKDKDFLDNEENEDILEDIVLTLTLFEDREMIEERLKTYAHLFDDKVMKQLKRRRYTGWGRLSRKLINGIRDKQSGKTILDFLKSDGFANRNFMQLIHDDSLTFKEDIQKAQVSGQGDSLHEHIANLAGSPAIKKGILQTVKVVDELVKVMGRHKPENIVIEMARENQTTQKGQKNSRERMKRIEEGIKELGSQILKEHPVENTQLQNEKLYLYYLQNGRDMYVDQELDINRLSDYDVDHIVPQSFLKDDSIDNKVLTRSDKARGKSDNVPSEEVVKKMKNYWRQLLNAKLITQRKFDNLTKAERGGLSELDKAGFIKRQLVETRQITKHVAQILDSRMNTKYDENDKLIREVKVITLKSKLVSDFRKDFQFYKVREINNYHHAHDAYLNAVVGTALIKKYPKLESEFVYGDYKVYDVRKMIAKSEQEIGKATAKYFFYSNIMNFFKTEITLANGEIRKRPLIETNGETGEIVWDKGRDFATVRKVLSMPQVNIVKKTEVQTGGFSKESILPKRNSDKLIARKKDWDPKKYGGFDSPTVAYSVLVVAKVEKGKSKKLKSVKELLGITIMERSSFEKNPIDFLEAKGYKEVKKDLIIKLPKYSLFELENGRKRMLASAGELQKGNELALPSKYVNFLYLASHYEKLKGSPEDNEQKQLFVEQHKHYLDEIIEQISEFSKRVILADANLDKVLSAYNKHRDKPIREQAENIIHLFTLTNLGAPAAFKYFDTTIDRKRYTSTKEVLDATLIHQSITGLYETRIDLSQLGGDGGGSSPAPGGSGGTLGIEDEYRLHETSTEPDVSLGSTWLSDFPQAWAETGGMGLAVRQAPLIIPLKATSTPVSIQQYPMSHEARLGIKPHIQRLLDQGILVPCQSPWNTPLLPVKKPGTNDYRPVQDLREVNKRVEDIHPTVPNPYNLLSGLPPSHQWYTVLDLKDAFFCLRLHPTSQPLFAFEWRDPGMGISGQLTWTRLPQGFKNSPTLFNEALHRDLADFRIQHPDLILLQYVDDILLAATSELDCQQGTRALLQTLGDLGYRASAKKAQICQKQVKYLGYLLREGQRWLTEARKETVMGQPVPKTPRQLREFLGTAGFCRLWIPGFAEMAAPLYPLTKPGTLFSWGPDQQKAYQEIKQALLTAPALGLPDLTKPFELFVDEKQGYAKGVLTQKLGPWRRPVAYLSKKLDPVAAGWPPCLRMVAAIAVLTKDAGKLTMGQPLVILAPHAVEALVKQPPDRWLSNARMTHYQAMLLDTDRVQFGPVVALNPATLLPLPEEGAPHDCLEILAETHGTRPDLTDQPIPDADHTWYTDGSSFLQEGQRKAGAAVTTETEVIWAGALPAGTSAQRAELIALTQALKMAEGKRLNVYTDSRYAFATAHIHGEIYRRRGWLTSEGREIKNKSEILALLKALFLPKRLSIIHCLGHQKGDSAEARGNRLADQAAREAAIKTPPDTSTLLAGKRTADGSEFEKRTADGSEFESPKKKAKVE

SEQ ID NO: 2081 - protein, 2093 aa, synthetic construct
MPAAKRVKLDGGDKKYSIGLDIGTNSVGWAVITDEYKVPSKKFKVLGNTDRHSIKKNLIGALLFDSGETAEATRLKRTARRRYTRRKNRICYLQEIFSNEMAKVDDSFFHRLEESFLVEEDKKHERHPIFGNIVDEVAYHEKYPTIYHLRKKLVDSTDKADLRLIYLALAHMIKFRGHFLIEGDLNPDNSDVDKLFIQLVQTYNQLFEENPINASGVDAKAILSARLSKSRRLENLIAQLPGEKKNGLFGNLIALSLGLTPNFKSNFDLAEDAKLQLSKDTYDDDLDNLLAQIGDQYADLFLAAKNLSDAILLSDILRVNTEITKAPLSASMIKRYDEHHQDLTLLKALVRQQLPEKYKEIFFDQSKNGYAGYIDGGASQEEFYKFIKPILEKMDGTEELLVKLNREDLLRKQRTFDNGSIPHQIHLGELHAILRRQEDFYPFLKDNREKIEKILTFRIPYYVGPLARGNSRFAWMTRKSEETITPWNFEEVVDKGASAQSFIERMTNFDKNLPNEKVLPKHSLLYEYFTVYNELTKVKYVTEGMRKPAFLSGEQKKAIVDLLFKTNRKVTVKQLKEDYFKKIECFDSVEISGVEDRFNASLGTYHDLLKIIKDKDFLDNEENEDILEDIVLTLTLFEDREMIEERLKTYAHLFDDKVMKQLKRRRYTGWGRLSRKLINGIRDKQSGKTILDFLKSDGFANRNFMQLIHDDSLTFKEDIQKAQVSGQGDSLHEHIANLAGSPAIKKGILQTVKVVDELVKVMGRHKPENIVIEMARENQTTQKGQKNSRERMKRIEEGIKELGSQILKEHPVENTQLQNEKLYLYYLQNGRDMYVDQELDINRLSDYDVDHIVPQSFLKDDSIDNKVLTRSDKARGKSDNVPSEEVVKKMKNYWRQLLNAKLITQRKFDNLTKAERGGLSELDKAGFIKRQLVETRQITKHVAQILDSRMNTKYDENDKLIREVKVITLKSKLVSDFRKDFQFYKVREINNYHHAHDAYLNAVVGTALIKKYPKLESEFVYGDYKVYDVRKMIAKSEQEIGKATAKYFFYSNIMNFFKTEITLANGEIRKRPLIETNGETGEIVWDKGRDFATVRKVLSMPQVNIVKKTEVQTGGFSKESILPKRNSDKLIARKKDWDPKKYGGFDSPTVAYSVLVVAKVEKGKSKKLKSVKELLGITIMERSSFEKNPIDFLEAKGYKEVKKDLIIKLPKYSLFELENGRKRMLASAGELQKGNELALPSKYVNFLYLASHYEKLKGSPEDNEQKQLFVEQHKHYLDEIIEQISEFSKRVILADANLDKVLSAYNKHRDKPIREQAENIIHLFTLTNLGAPAAFKYFDTTIDRKRYTSTKEVLDATLIHQSITGLYETRIDLSQLGGDGGEAAAKGGGGGTLGIEDEYRLHETSTEPDVSLGSTWLSDFPQAWAETGGMGLAVRQAPLIIPLKATSTPVSIQQYPMSHEARLGIKPHIQRLLDQGILVPCQSPWNTPLLPVKKPGTNDYRPVQDLREVNKRVEDIHPTVPNPYNLLSGLPPSHQWYTVLDLKDAFFCLRLHPTSQPLFAFEWRDPGMGISGQLTWTRLPQGFKNSPTLFNEALHRDLADFRIQHPDLILLQYVDDILLAATSELDCQQGTRALLQTLGDLGYRASAKKAQICQKQVKYLGYLLREGQRWLTEARKETVMGQPVPKTPRQLREFLGTAGFCRLWIPGFAEMAAPLYPLTKPGTLFSWGPDQQKAYQEIKQALLTAPALGLPDLTKPFELFVDEKQGYAKGVLTQKLGPWRRPVAYLSKKLDPVAAGWPPCLRMVAAIAVLTKDAGKLTMGQPLVILAPHAVEALVKQPPDRWLSNARMTHYQAMLLDTDRVQFGPVVALNPATLLPLPEEGAPHDCLEILAETHGTRPDLTDQPIPDADHTWYTDGSSFLQEGQRKAGAAVTTETEVIWAGALPAGTSAQRAELIALTQALKMAEGKRLNVYTDSRYAFATAHIHGEIYRRRGWLTSEGREIKNKSEILALLKALFLPKRLSIIHCLGHQKGDSAEARGNRLADQAAREAAIKTPPDTSTLLAGKRTADGSEFEKRTADGSEFESPKKKAKVE

SEQ ID NO: 2082 - protein, 2096 aa, synthetic construct
MPAAKRVKLDGGDKKYSIGLDIGTNSVGWAVITDEYKVPSKKFKVLGNTDRHSIKKNLIGALLFDSGETAEATRLKRTARRRYTRRKNRICYLQEIFSNEMAKVDDSFFHRLEESFLVEEDKKHERHPIFGNIVDEVAYHEKYPTIYHLRKKLVDSTDKADLRLIYLALAHMIKFRGHFLIEGDLNPDNSDVDKLFIQLVQTYNQLFEENPINASGVDAKAILSARLSKSRRLENLIAQLPGEKKNGLFGNLIALSLGLTPNFKSNFDLAEDAKLQLSKDTYDDDLDNLLAQIGDQYADLFLAAKNLSDAILLSDILRVNTEITKAPLSASMIKRYDEHHQDLTLLKALVRQQLPEKYKEIFFDQSKNGYAGYIDGGASQEEFYKFIKPILEKMDGTEELLVKLNREDLLRKQRTFDNGSIPHQIHLGELHAILRRQEDFYPFLKDNREKIEKILTFRIPYYVGPLARGNSRFAWMTRKSEETITPWNFEEVVDKGASAQSFIERMTNFDKNLPNEKVLPKHSLLYEYFTVYNELTKVKYVTEGMRKPAFLSGEQKKAIVDLLFKTNRKVTVKQLKEDYFKKIECFDSVEISGVEDRFNASLGTYHDLLKIIKDKDFLDNEENEDILEDIVLTLTLFEDREMIEERLKTYAHLFDDKVMKQLKRRRYTGWGRLSRKLINGIRDKQSGKTILDFLKSDGFANRNFMQLIHDDSLTFKEDIQKAQVSGQGDSLHEHIANLAGSPAIKKGILQTVKVVDELVKVMGRHKPENIVIEMARENQTTQKGQKNSRERMKRIEEGIKELGSQILKEHPVENTQLQNEKLYLYYLQNGRDMYVDQELDINRLSDYDVDHIVPQSFLKDDSIDNKVLTRSDKARGKSDNVPSEEVVKKMKNYWRQLLNAKLITQRKFDNLTKAERGGLSELDKAGFIKRQLVETRQITKHVAQILDSRMNTKYDENDKLIREVKVITLKSKLVSDFRKDFQFYKVREINNYHHAHDAYLNAVVGTALIKKYPKLESEFVYGDYKVYDVRKMIAKSEQEIGKATAKYFFYSNIMNFFKTEITLANGEIRKRPLIETNGETGEIVWDKGRDFATVRKVLSMPQVNIVKKTEVQTGGFSKESILPKRNSDKLIARKKDWDPKKYGGFDSPTVAYSVLVVAKVEKGKSKKLKSVKELLGITIMERSSFEKNPIDFLEAKGYKEVKKDLIIKLPKYSLFELENGRKRMLASAGELQKGNELALPSKYVNFLYLASHYEKLKGSPEDNEQKQLFVEQHKHYLDEIIEQISEFSKRVILADANLDKVLSAYNKHRDKPIREQAENIIHLFTLTNLGAPAAFKYFDTTIDRKRYTSTKEVLDATLIHQSITGLYETRIDLSQLGGDGGGGGGGSEAAAKGGTLGIEDEYRLHETSTEPDVSLGSTWLSDFPQAWAETGGMGLAVRQAPLIIPLKATSTPVSIQQYPMSHEARLGIKPHIQRLLDQGILVPCQSPWNTPLLPVKKPGTNDYRPVQDLREVNKRVEDIHPTVPNPYNLLSGLPPSHQWYTVLDLKDAFFCLRLHPTSQPLFAFEWRDPGMGISGQLTWTRLPQGFKNSPTLFNEALHRDLADFRIQHPDLILLQYVDDILLAATSELDCQQGTRALLQTLGDLGYRASAKKAQICQKQVKYLGYLLREGQRWLTEARKETVMGQPVPKTPRQLREFLGTAGFCRLWIPGFAEMAAPLYPLTKPGTLFSWGPDQQKAYQEIKQALLTAPALGLPDLTKPFELFVDEKQGYAKGVLTQKLGPWRRPVAYLSKKLDPVAAGWPPCLRMVAAIAVLTKDAGKLTMGQPLVILAPHAVEALVKQPPDRWLSNARMTHYQAMLLDTDRVQFGPVVALNPATLLPLPEEGAPHDCLEILAETHGTRPDLTDQPIPDADHTWYTDGSSFLQEGQRKAGAAVTTETEVIWAGALPAGTSAQRAELIALTQALKMAEGKRLNVYTDSRYAFATAHIHGEIYRRRGWLTSEGREIKNKSEILALLKALFLPKRLSIIHCLGHQKGDSAEARGNRLADQAAREAAIKTPPDTSTLLAGKRTADGSEFEKRTADGSEFESPKKKAKVE

SEQ ID NO: 2083 - protein, 2091 aa, synthetic construct
MPAAKRVKLDGGDKKYSIGLDIGTNSVGWAVITDEYKVPSKKFKVLGNTDRHSIKKNLIGALLFDSGETAEATRLKRTARRRYTRRKNRICYLQEIFSNEMAKVDDSFFHRLEESFLVEEDKKHERHPIFGNIVDEVAYHEKYPTIYHLRKKLVDSTDKADLRLIYLALAHMIKFRGHFLIEGDLNPDNSDVDKLFIQLVQTYNQLFEENPINASGVDAKAILSARLSKSRRLENLIAQLPGEKKNGLFGNLIALSLGLTPNFKSNFDLAEDAKLQLSKDTYDDDLDNLLAQIGDQYADLFLAAKNLSDAILLSDILRVNTEITKAPLSASMIKRYDEHHQDLTLLKALVRQQLPEKYKEIFFDQSKNGYAGYIDGGASQEEFYKFIKPILEKMDGTEELLVKLNREDLLRKQRTFDNGSIPHQIHLGELHAILRRQEDFYPFLKDNREKIEKILTFRIPYYVGPLARGNSRFAWMTRKSEETITPWNFEEVVDKGASAQSFIERMTNFDKNLPNEKVLPKHSLLYEYFTVYNELTKVKYVTEGMRKPAFLSGEQKKAIVDLLFKTNRKVTVKQLKEDYFKKIECFDSVEISGVEDRFNASLGTYHDLLKIIKDKDFLDNEENEDILEDIVLTLTLFEDREMIEERLKTYAHLFDDKVMKQLKRRRYTGWGRLSRKLINGIRDKQSGKTILDFLKSDGFANRNFMQLIHDDSLTFKEDIQKAQVSGQGDSLHEHIANLAGSPAIKKGILQTVKVVDELVKVMGRHKPENIVIEMARENQTTQKGQKNSRERMKRIEEGIKELGSQILKEHPVENTQLQNEKLYLYYLQNGRDMYVDQELDINRLSDYDVDHIVPQSFLKDDSIDNKVLTRSDKARGKSDNVPSEEVVKKMKNYWRQLLNAKLITQRKFDNLTKAERGGLSELDKAGFIKRQLVETRQITKHVAQILDSRMNTKYDENDKLIREVKVITLKSKLVSDFRKDFQFYKVREINNYHHAHDAYLNAVVGTALIKKYPKLESEFVYGDYKVYDVRKMIAKSEQEIGKATAKYFFYSNIMNFFKTEITLANGEIRKRPLIETNGETGEIVWDKGRDFATVRKVLSMPQVNIVKKTEVQTGGFSKESILPKRNSDKLIARKKDWDPKKYGGFDSPTVAYSVLVVAKVEKGKSKKLKSVKELLGITIMERSSFEKNPIDFLEAKGYKEVKKDLIIKLPKYSLFELENGRKRMLASAGELQKGNELALPSKYVNFLYLASHYEKLKGSPEDNEQKQLFVEQHKHYLDEIIEQISEFSKRVILADANLDKVLSAYNKHRDKPIREQAENIIHLFTLTNLGAPAAFKYFDTTIDRKRYTSTKEVLDATLIHQSITGLYETRIDLSQLGGDGGGGSPAPGGTLGIEDEYRLHETSTEPDVSLGSTWLSDFPQAWAETGGMGLAVRQAPLIIPLKATSTPVSIQQYPMSHEARLGIKPHIQRLLDQGILVPCQSPWNTPLLPVKKPGTNDYRPVQDLREVNKRVEDIHPTVPNPYNLLSGLPPSHQWYTVLDLKDAFFCLRLHPTSQPLFAFEWRDPGMGISGQLTWTRLPQGFKNSPTLFNEALHRDLADFRIQHPDLILLQYVDDILLAATSELDCQQGTRALLQTLGDLGYRASAKKAQICQKQVKYLGYLLREGQRWLTEARKETVMGQPVPKTPRQLREFLGTAGFCRLWIPGFAEMAAPLYPLTKPGTLFSWGPDQQKAYQEIKQALLTAPALGLPDLTKPFELFVDEKQGYAKGVLTQKLGPWRRPVAYLSKKLDPVAAGWPPCLRMVAAIAVLTKDAGKLTMGQPLVILAPHAVEALVKQPPDRWLSNARMTHYQAMLLDTDRVQFGPVVALNPATLLPLPEEGAPHDCLEILAETHGTRPDLTDQPIPDADHTWYTDGSSFLQEGQRKAGAAVTTETEVIWAGALPAGTSAQRAELIALTQALKMAEGKRLNVYTDSRYAFATAHIHGEIYRRRGWLTSEGREIKNKSEILALLKALFLPKRLSIIHCLGHQKGDSAEARGNRLADQAAREAAIKTPPDTSTLLAGKRTADGSEFEKRTADGSEFESPKKKAKVE

SEQ ID NO: 2084 - protein, 2110 aa, synthetic construct
MPAAKRVKLDGGDKKYSIGLDIGTNSVGWAVITDEYKVPSKKFKVLGNTDRHSIKKNLIGALLFDSGETAEATRLKRTARRRYTRRKNRICYLQEIFSNEMAKVDDSFFHRLEESFLVEEDKKHERHPIFGNIVDEVAYHEKYPTIYHLRKKLVDSTDKADLRLIYLALAHMIKFRGHFLIEGDLNPDNSDVDKLFIQLVQTYNQLFEENPINASGVDAKAILSARLSKSRRLENLIAQLPGEKKNGLFGNLIALSLGLTPNFKSNFDLAEDAKLQLSKDTYDDDLDNLLAQIGDQYADLFLAAKNLSDAILLSDILRVNTEITKAPLSASMIKRYDEHHQDLTLLKALVRQQLPEKYKEIFFDQSKNGYAGYIDGGASQEEFYKFIKPILEKMDGTEELLVKLNREDLLRKQRTFDNGSIPHQIHLGELHAILRRQEDFYPFLKDNREKIEKILTFRIPYYVGPLARGNSRFAWMTRKSEETITPWNFEEVVDKGASAQSFIERMTNFDKNLPNEKVLPKHSLLYEYFTVYNELTKVKYVTEGMRKPAFLSGEQKKAIVDLLFKTNRKVTVKQLKEDYFKKIECFDSVEISGVEDRFNASLGTYHDLLKIIKDKDFLDNEENEDILEDIVLTLTLFEDREMIEERLKTYAHLFDDKVMKQLKRRRYTGWGRLSRKLINGIRDKQSGKTILDFLKSDGFANRNFMQLIHDDSLTFKEDIQKAQVSGQGDSLHEHIANLAGSPAIKKGILQTVKVVDELVKVMGRHKPENIVIEMARENQTTQKGQKNSRERMKRIEEGIKELGSQILKEHPVENTQLQNEKLYLYYLQNGRDMYVDQELDINRLSDYDVDHIVPQSFLKDDSIDNKVLTRSDKARGKSDNVPSEEVVKKMKNYWRQLLNAKLITQRKFDNLTKAERGGLSELDKAGFIKRQLVETRQITKHVAQILDSRMNTKYDENDKLIREVKVITLKSKLVSDFRKDFQFYKVREINNYHHAHDAYLNAVVGTALIKKYPKLESEFVYGDYKVYDVRKMIAKSEQEIGKATAKYFFYSNIMNFFKTEITLANGEIRKRPLIETNGETGEIVWDKGRDFATVRKVLSMPQVNIVKKTEVQTGGFSKESILPKRNSDKLIARKKDWDPKKYGGFDSPTVAYSVLVVAKVEKGKSKKLKSVKELLGITIMERSSFEKNPIDFLEAKGYKEVKKDLIIKLPKYSLFELENGRKRMLASAGELQKGNELALPSKYVNFLYLASHYEKLKGSPEDNEQKQLFVEQHKHYLDEIIEQISEFSKRVILADANLDKVLSAYNKHRDKPIREQAENIIHLFTLTNLGAPAAFKYFDTTIDRKRYTSTKEVLDATLIHQSITGLYETRIDLSQLGGDGGGGGGSGGGGSGGGGSGGGGSGGGGSGGLGIEDEYRLHETSTEPDVSLGSTWLSDFPQAWAETGGMGLAVRQAPLIIPLKATSTPVSIQQYPMSHEARLGIKPHIQRLLDQGILVPCQSPWNTPLLPVKKPGTNDYRPVQDLREVNKRVEDIHPTVPNPYNLLSGLPPSHQWYTVLDLKDAFFCLRLHPTSQPLFAFEWRDPGMGISGQLTWTRLPQGFKNSPTLFNEALHRDLADFRIQHPDLILLQYVDDILLAATSELDCQQGTRALLQTLGDLGYRASAKKAQICQKQVKYLGYLLREGQRWLTEARKETVMGQPVPKTPRQLREFLGKAGFCRLFIPGFAEMAAPLYPLTKPGTLFSWGPDQQKAYQEIKQALLTAPALGLPDLTKPFELFVDEKQGYAKGVLTQKLGPWRRPVAYLSKKLDPVAAGWPPCLRMVAAIAVLTKDAGKLTMGQPLVILAPHAVEALVKQPPDRWLSNARMTHYQAMLLDTDRVQFGPVVALNPATLLPLPEEGAPHDCLEILAETHGTRPDLTDQPIPDADHTWYTDGSSFLQEGQRKAGAAVTTETEVIWAGALPAGTSAQRAELIALTQALKMAEGKRLNVYTDSRYAFATAHIHGEIYRRRGWLTSEGREIKNKSEILALLKALFLPKRLSIIHCLGHQKGDSAEARGNRLADQAAREAAIKTPPDTSTLLIAGKRTADGSEFEKRTADGSEFESPKKKAKVE

SEQ ID NO: 2085 - protein, 2105 aa, synthetic construct
MPAAKRVKLDGGDKKYSIGLDIGTNSVGWAVITDEYKVPSKKFKVLGNTDRHSIKKNLIGALLFDSGETAEATRLKRTARRRYTRRKNRICYLQEIFSNEMAKVDDSFFHRLEESFLVEEDKKHERHPIFGNIVDEVAYHEKYPTIYHLRKKLVDSTDKADLRLIYLALAHMIKFRGHFLIEGDLNPDNSDVDKLFIQLVQTYNQLFEENPINASGVDAKAILSARLSKSRRLENLIAQLPGEKKNGLFGNLIALSLGLTPNFKSNFDLAEDAKLQLSKDTYDDDLDNLLAQIGDQYADLFLAAKNLSDAILLSDILRVNTEITKAPLSASMIKRYDEHHQDLTLLKALVRQQLPEKYKEIFFDQSKNGYAGYIDGGASQEEFYKFIKPILEKMDGTEELLVKLNREDLLRKQRTFDNGSIPHQIHLGELHAILRRQEDFYPFLKDNREKIEKILTFRIPYYVGPLARGNSRFAWMTRKSEETITPWNFEEVVDKGASAQSFIERMTNFDKNLPNEKVLPKHSLLYEYFTVYNELTKVKYVTEGMRKPAFLSGEQKKAIVDLLFKTNRKVTVKQLKEDYFKKIECFDSVEISGVEDRFNASLGTYHDLLKIIKDKDFLDNEENEDILEDIVLTLTLFEDREMIEERLKTYAHLFDDKVMKQLKRRRYTGWGRLSRKLINGIRDKQSGKTILDFLKSDGFANRNFMQLIHDDSLTFKEDIQKAQVSGQGDSLHEHIANLAGSPAIKKGILQTVKVVDELVKVMGRHKPENIVIEMARENQTTQKGQKNSRERMKRIEEGIKELGSQILKEHPVENTQLQNEKLYLYYLQNGRDMYVDQELDINRLSDYDVDHIVPQSFLKDDSIDNKVLTRSDKARGKSDNVPSEEVVKKMKNYWRQLLNAKLITQRKFDNLTKAERGGLSELDKAGFIKRQLVETRQITKHVAQILDSRMNTKYDENDKLIREVKVITLKSKLVSDFRKDFQFYKVREINNYHHAHDAYLNAVVGTALIKKYPKLESEFVYGDYKVYDVRKMIAKSEQEIGKATAKYFFYSNIMNFFKTEITLANGEIRKRPLIETNGETGEIVWDKGRDFATVRKVLSMPQVNIVKKTEVQTGGFSKESILPKRNSDKLIARKKDWDPKKYGGFDSPTVAYSVLVVAKVEKGKSKKLKSVKELLGITIMERSSFEKNPIDFLEAKGYKEVKKDLIIKLPKYSLFELENGRKRMLASAGELQKGNELALPSKYVNFLYLASHYEKLKGSPEDNEQKQLFVEQHKHYLDEIIEQISEFSKRVILADANLDKVLSAYNKHRDKPIREQAENIIHLFTLTNLGAPAAFKYFDTTIDRKRYTSTKEVLDATLIHQSITGLYETRIDLSQLGGDGGGGGGSGGGGSGGGGSGGGGSGGLGIEDEYRLHETSTEPDVSLGSTWLSDFPQAWAETGGMGLAVRQAPLIIPLKATSTPVSIQQYPMSHEARLGIKPHIQRLLDQGILVPCQSPWNTPLLPVKKPGTNDYRPVQDLREVNKRVEDIHPTVPNPYNLLSGLPPSHQWYTVLDLKDAFFCLRLHPTSQPLFAFEWRDPGMGISGQLTWTRLPQGFKNSPTLFNEALHRDLADFRIQHPDLILLQYVDDILLAATSELDCQQGTRALLQTLGDLGYRASAKKAQICQKQVKYLGYLLREGQRWLTEARKETVMGQPVPKTPRQLREFLGKAGFCRLFIPGFAEMAAPLYPLTKPGTLFSWGPDQQKAYQEIKQALLTAPALGLPDLTKPFELFVDEKQGYAKGVLTQKLGPWRRPVAYLSKKLDPVAAGWPPCLRMVAAIAVLTKDAGKLTMGQPLVILAPHAVEALVKQPPDRWLSNARMTHYQAMLLDTDRVQFGPVVALNPATLLPLPEEGAPHDCLEILAETHGTRPDLTDQPIPDADHTWYTDGSSFLQEGQRKAGAAVTTETEVIWAGALPAGTSAQRAELIALTQALKMAEGKRLNVYTDSRYAFATAHIHGEIYRRRGWLTSEGREIKNKSEILALLKALFLPKRLSIIHCLGHQKGDSAEARGNRLADQAAREAAIKTPPDTSTLLIAGKRTADGSEFEKRTADGSEFESPKKKAKVE

SEQ ID NO: 2086 - protein, 2110 aa, synthetic construct
MPAAKRVKLDGGDKKYSIGLDIGTNSVGWAVITDEYKVPSKKFKVLGNTDRHSIKKNLIGALLFDSGETAEATRLKRTARRRYTRRKNRICYLQEIFSNEMAKVDDSFFHRLEESFLVEEDKKHERHPIFGNIVDEVAYHEKYPTIYHLRKKLVDSTDKADLRLIYLALAHMIKFRGHFLIEGDLNPDNSDVDKLFIQLVQTYNQLFEENPINASGVDAKAILSARLSKSRRLENLIAQLPGEKKNGLFGNLIALSLGLTPNFKSNFDLAEDAKLQLSKDTYDDDLDNLLAQIGDQYADLFLAAKNLSDAILLSDILRVNTEITKAPLSASMIKRYDEHHQDLTLLKALVRQQLPEKYKEIFFDQSKNGYAGYIDGGASQEEFYKFIKPILEKMDGTEELLVKLNREDLLRKQRTFDNGSIPHQIHLGELHAILRRQEDFYPFLKDNREKIEKILTFRIPYYVGPLARGNSRFAWMTRKSEETITPWNFEEVVDKGASAQSFIERMTNFDKNLPNEKVLPKHSLLYEYFTVYNELTKVKYVTEGMRKPAFLSGEQKKAIVDLLFKTNRKVTVKQLKEDYFKKIECFDSVEISGVEDRFNASLGTYHDLLKIIKDKDFLDNEENEDILEDIVLTLTLFEDREMIEERLKTYAHLFDDKVMKQLKRRRYTGWGRLSRKLINGIRDKQSGKTILDFLKSDGFANRNFMQLIHDDSLTFKEDIQKAQVSGQGDSLHEHIANLAGSPAIKKGILQTVKVVDELVKVMGRHKPENIVIEMARENQTTQKGQKNSRERMKRIEEGIKELGSQILKEHPVENTQLQNEKLYLYYLQNGRDMYVDQELDINRLSDYDVDHIVPQSFLKDDSIDNKVLTRSDKARGKSDNVPSEEVVKKMKNYWRQLLNAKLITQRKFDNLTKAERGGLSELDKAGFIKRQLVETRQITKHVAQILDSRMNTKYDENDKLIREVKVITLKSKLVSDFRKDFQFYKVREINNYHHAHDAYLNAVVGTALIKKYPKLESEFVYGDYKVYDVRKMIAKSEQEIGKATAKYFFYSNIMNFFKTEITLANGEIRKRPLIETNGETGEIVWDKGRDFATVRKVLSMPQVNIVKKTEVQTGGFSKESILPKRNSDKLIARKKDWDPKKYGGFDSPTVAYSVLVVAKVEKGKSKKLKSVKELLGITIMERSSFEKNPIDFLEAKGYKEVKKDLIIKLPKYSLFELENGRKRMLASAGELQKGNELALPSKYVNFLYLASHYEKLKGSPEDNEQKQLFVEQHKHYLDEIIEQISEFSKRVILADANLDKVLSAYNKHRDKPIREQAENIIHLFTLTNLGAPAAFKYFDTTIDRKRYTSTKEVLDATLIHQSITGLYETRIDLSQLGGDGGEAAAKEAAAKEAAAKEAAAKEAAAKGGLGIEDEYRLHETSTEPDVSLGSTWLSDFPQAWAETGGMGLAVRQAPLIIPLKATSTPVSIQQYPMSHEARLGIKPHIQRLLDQGILVPCQSPWNTPLLPVKKPGTNDYRPVQDLREVNKRVEDIHPTVPNPYNLLSGLPPSHQWYTVLDLKDAFFCLRLHPTSQPLFAFEWRDPGMGISGQLTWTRLPQGFKNSPTLFNEALHRDLADFRIQHPDLILLQYVDDILLAATSELDCQQGTRALLQTLGDLGYRASAKKAQICQKQVKYLGYLLREGQRWLTEARKETVMGQPVPKTPRQLREFLGKAGFCRLFIPGFAEMAAPLYPLTKPGTLFSWGPDQQKAYQEIKQALLTAPALGLPDLTKPFELFVDEKQGYAKGVLTQKLGPWRRPVAYLSKKLDPVAAGWPPCLRMVAAIAVLTKDAGKLTMGQPLVILAPHAVEALVKQPPDRWLSNARMTHYQAMLLDTDRVQFGPVVALNPATLLPLPEEGAPHDCLEILAETHGTRPDLTDQPIPDADHTWYTDGSSFLQEGQRKAGAAVTTETEVIWAGALPAGTSAQRAELIALTQALKMAEGKRLNVYTDSRYAFATAHIHGEIYRRRGWLTSEGREIKNKSEILALLKALFLPKRLSIIHCLGHQKGDSAEARGNRLADQAAREAAIKTPPDTSTLLIAGKRTADGSEFEKRTADGSEFESPKKKAKVE

SEQ ID NO: 2087 - protein, 2098 aa, synthetic construct
MPAAKRVKLDGGDKKYSIGLDIGTNSVGWAVITDEYKVPSKKFKVLGNTDRHSIKKNLIGALLFDSGETAEATRLKRTARRRYTRRKNRICYLQEIFSNEMAKVDDSFFHRLEESFLVEEDKKHERHPIFGNIVDEVAYHEKYPTIYHLRKKLVDSTDKADLRLIYLALAHMIKFRGHFLIEGDLNPDNSDVDKLFIQLVQTYNQLFEENPINASGVDAKAILSARLSKSRRLENLIAQLPGEKKNGLFGNLIALSLGLTPNFKSNFDLAEDAKLQLSKDTYDDDLDNLLAQIGDQYADLFLAAKNLSDAILLSDILRVNTEITKAPLSASMIKRYDEHHQDLTLLKALVRQQLPEKYKEIFFDQSKNGYAGYIDGGASQEEFYKFIKPILEKMDGTEELLVKLNREDLLRKQRTFDNGSIPHQIHLGELHAILRRQEDFYPFLKDNREKIEKILTFRIPYYVGPLARGNSRFAWMTRKSEETITPWNFEEVVDKGASAQSFIERMTNFDKNLPNEKVLPKHSLLYEYFTVYNELTKVKYVTEGMRKPAFLSGEQKKAIVDLLFKTNRKVTVKQLKEDYFKKIECFDSVEISGVEDRFNASLGTYHDLLKIIKDKDFLDNEENEDILEDIVLTLTLFEDREMIEERLKTYAHLFDDKVMKQLKRRRYTGWGRLSRKLINGIRDKQSGKTILDFLKSDGFANRNFMQLIHDDSLTFKEDIQKAQVSGQGDSLHEHIANLAGSPAIKKGILQTVKVVDELVKVMGRHKPENIVIEMARENQTTQKGQKNSRERMKRIEEGIKELGSQILKEHPVENTQLQNEKLYLYYLQNGRDMYVDQELDINRLSDYDVDHIVPQSFLKDDSIDNKVLTRSDKARGKSDNVPSEEVVKKMKNYWRQLLNAKLITQRKFDNLTKAERGGLSELDKAGFIKRQLVETRQITKHVAQILDSRMNTKYDENDKLIREVKVITLKSKLVSDFRKDFQFYKVREINNYHHAHDAYLNAVVGTALIKKYPKLESEFVYGDYKVYDVRKMIAKSEQEIGKATAKYFFYSNIMNFFKTEITLANGEIRKRPLIETNGETGEIVWDKGRDFATVRKVLSMPQVNIVKKTEVQTGGFSKESILPKRNSDKLIARKKDWDPKKYGGFDSPTVAYSVLVVAKVEKGKSKKLKSVKELLGITIMERSSFEKNPIDFLEAKGYKEVKKDLIIKLPKYSLFELENGRKRMLASAGELQKGNELALPSKYVNFLYLASHYEKLKGSPEDNEQKQLFVEQHKHYLDEIIEQISEFSKRVILADANLDKVLSAYNKHRDKPIREQAENIIHLFTLTNLGAPAAFKYFDTTIDRKRYTSTKEVLDATLIHQSITGLYETRIDLSQLGGDGGPAPAPAPAPAPAPGGLGIEDEYRLHETSTEPDVSLGSTWLSDFPQAWAETGGMGLAVRQAPLIIPLKATSTPVSIQQYPMSHEARLGIKPHIQRLLDQGILVPCQSPWNTPLLPVKKPGTNDYRPVQDLREVNKRVEDIHPTVPNPYNLLSGLPPSHQWYTVLDLKDAFFCLRLHPTSQPLFAFEWRDPGMGISGQLTWTRLPQGFKNSPTLFNEALHRDLADFRIQHPDLILLQYVDDILLAATSELDCQQGTRALLQTLGDLGYRASAKKAQICQKQVKYLGYLLREGQRWLTEARKETVMGQPVPKTPRQLREFLGKAGFCRLFIPGFAEMAAPLYPLTKPGTLFSWGPDQQKAYQEIKQALLTAPALGLPDLTKPFELFVDEKQGYAKGVLTQKLGPWRRPVAYLSKKLDPVAAGWPPCLRMVAAIAVLTKDAGKLTMGQPLVILAPHAVEALVKQPPDRWLSNARMTHYQAMLLDTDRVQFGPVVALNPATLLPLPEEGAPHDCLEILAETHGTRPDLTDQPIPDADHTWYTDGSSFLQEGQRKAGAAVTTETEVIWAGALPAGTSAQRAELIALTQALKMAEGKRLNVYTDSRYAFATAHIHGEIYRRRGWLTSEGREIKNKSEILALLKALFLPKRLSIIHCLGHQKGDSAEARGNRLADQAAREAAIKTPPDTSTLLIAGKRTADGSEFEKRTADGSEFESPKKKAKVE

SEQ ID NO: 2088 - protein, 2131 aa, synthetic construct
MPAAKRVKLDGGDKKYSIGLDIGTNSVGWAVITDEYKVPSKKFKVLGNTDRHSIKKNLIGALLFDSGETAEATRLKRTARRRYTRRKNRICYLQEIFSNEMAKVDDSFFHRLEESFLVEEDKKHERHPIFGNIVDEVAYHEKYPTIYHLRKKLVDSTDKADLRLIYLALAHMIKFRGHFLIEGDLNPDNSDVDKLFIQLVQTYNQLFEENPINASGVDAKAILSARLSKSRRLENLIAQLPGEKKNGLFGNLIALSLGLTPNFKSNFDLAEDAKLQLSKDTYDDDLDNLLAQIGDQYADLFLAAKNLSDAILLSDILRVNTEITKAPLSASMIKRYDEHHQDLTLLKALVRQQLPEKYKEIFFDQSKNGYAGYIDGGASQEEFYKFIKPILEKMDGTEELLVKLNREDLLRKQRTFDNGSIPHQIHLGELHAILRRQEDFYPFLKDNREKIEKILTFRIPYYVGPLARGNSRFAWMTRKSEETITPWNFEEVVDKGASAQSFIERMTNFDKNLPNEKVLPKHSLLYEYFTVYNELTKVKYVTEGMRKPAFLSGEQKKAIVDLLFKTNRKVTVKQLKEDYFKKIECFDSVEISGVEDRFNASLGTYHDLLKIIKDKDFLDNEENEDILEDIVLTLTLFEDREMIEERLKTYAHLFDDKVMKQLKRRRYTGWGRLSRKLINGIRDKQSGKTILDFLKSDGFANRNFMQLIHDDSLTFKEDIQKAQVSGQGDSLHEHIANLAGSPAIKKGILQTVKVVDELVKVMGRHKPENIVIEMARENQTTQKGQKNSRERMKRIEEGIKELGSQILKEHPVENTQLQNEKLYLYYLQNGRDMYVDQELDINRLSDYDVDHIVPQSFLKDDSIDNKVLTRSDKARGKSDNVPSEEVVKKMKNYWRQLLNAKLITQRKFDNLTKAERGGLSELDKAGFIKRQLVETRQITKHVAQILDSRMNTKYDENDKLIREVKVITLKSKLVSDFRKDFQFYKVREINNYHHAHDAYLNAVVGTALIKKYPKLESEFVYGDYKVYDVRKMIAKSEQEIGKATAKYFFYSNIMNFFKTEITLANGEIRKRPLIETNGETGEIVWDKGRDFATVRKVLSMPQVNIVKKTEVQTGGFSKESILPKRNSDKLIARKKDWDPKKYGGFDSPTVAYSVLVVAKVEKGKSKKLKSVKELLGITIMERSSFEKNPIDFLEAKGYKEVKKDLIIKLPKYSLFELENGRKRMLASAGELQKGNELALPSKYVNFLYLASHYEKLKGSPEDNEQKQLFVEQHKHYLDEIIEQISEFSKRVILADANLDKVLSAYNKHRDKPIREQAENIIHLFTLTNLGAPAAFKYFDTTIDRKRYTSTKEVLDATLIHQSITGLYETRIDLSQLGGDGGAEAAAKEAAAKEAAAKEAAAKALEAEAAAKEAAAKEAAAKEAAAKAGGLGIEDEYRLHETSTEPDVSLGSTWLSDFPQAWAETGGMGLAVRQAPLIIPLKATSTPVSIQQYPMSHEARLGIKPHIQRLLDQGILVPCQSPWNTPLLPVKKPGTNDYRPVQDLREVNKRVEDIHPTVPNPYNLLSGLPPSHQWYTVLDLKDAFFCLRLHPTSQPLFAFEWRDPGMGISGQLTWTRLPQGFKNSPTLFNEALHRDLADFRIQHPDLILLQYVDDILLAATSELDCQQGTRALLQTLGDLGYRASAKKAQICQKQVKYLGYLLREGQRWLTEARKETVMGQPVPKTPRQLREFLGKAGFCRLFIPGFAEMAAPLYPLTKPGTLFSWGPDQQKAYQEIKQALLTAPALGLPDLTKPFELFVDEKQGYAKGVLTQKLGPWRRPVAYLSKKLDPVAAGWPPCLRMVAAIAVLTKDAGKLTMGQPLVILAPHAVEALVKQPPDRWLSNARMTHYQAMLLDTDRVQFGPVVALNPATLLPLPEEGAPHDCLEILAETHGTRPDLTDQPIPDADHTWYTDGSSFLQEGQRKAGAAVTTETEVIWAGALPAGTSAQRAELIALTQALKMAEGKRLNVYTDSRYAFATAHIHGEIYRRRGWLTSEGREIKNKSEILALLKALFLPKRLSIIHCLGHQKGDSAEARGNRLADQAAREAAIKTPPDTSTLLIAGKRTADGSEFEKRTADGSEFESPKKKAKVE

SEQ ID NO: 2089 - protein, 2096 aa, synthetic construct; identical to SEQ ID NO: 2050

SEQ ID NO: 2090 - protein, 2100 aa, synthetic construct; identical to SEQ ID NO: 2049

SEQ ID NO: 2091 - protein, 2094 aa, synthetic construct
MPAAKRVKLDGGDKKYSIGLDIGTNSVGWAVITDEYKVPSKKFKVLGNTDRHSIKKNLIGALLFDSGETAEATRLKRTARRRYTRRKNRICYLQEIFSNEMAKVDDSFFHRLEESFLVEEDKKHERHPIFGNIVDEVAYHEKYPTIYHLRKKLVDSTDKADLRLIYLALAHMIKFRGHFLIEGDLNPDNSDVDKLFIQLVQTYNQLFEENPINASGVDAKAILSARLSKSRRLENLIAQLPGEKKNGLFGNLIALSLGLTPNFKSNFDLAEDAKLQLSKDTYDDDLDNLLAQIGDQYADLFLAAKNLSDAILLSDILRVNTEITKAPLSASMIKRYDEHHQDLTLLKALVRQQLPEKYKEIFFDQSKNGYAGYIDGGASQEEFYKFIKPILEKMDGTEELLVKLNREDLLRKQRTFDNGSIPHQIHLGELHAILRRQEDFYPFLKDNREKIEKILTFRIPYYVGPLARGNSRFAWMTRKSEETITPWNFEEVVDKGASAQSFIERMTNFDKNLPNEKVLPKHSLLYEYFTVYNELTKVKYVTEGMRKPAFLSGEQKKAIVDLLFKTNRKVTVKQLKEDYFKKIECFDSVEISGVEDRFNASLGTYHDLLKIIKDKDFLDNEENEDILEDIVLTLTLFEDREMIEERLKTYAHLFDDKVMKQLKRRRYTGWGRLSRKLINGIRDKQSGKTILDFLKSDGFANRNFMQLIHDDSLTFKEDIQKAQVSGQGDSLHEHIANLAGSPAIKKGILQTVKVVDELVKVMGRHKPENIVIEMARENQTTQKGQKNSRERMKRIEEGIKELGSQILKEHPVENTQLQNEKLYLYYLQNGRDMYVDQELDINRLSDYDVDHIVPQSFLKDDSIDNKVLTRSDKARGKSDNVPSEEVVKKMKNYWRQLLNAKLITQRKFDNLTKAERGGLSELDKAGFIKRQLVETRQITKHVAQILDSRMNTKYDENDKLIREVKVITLKSKLVSDFRKDFQFYKVREINNYHHAHDAYLNAVVGTALIKKYPKLESEFVYGDYKVYDVRKMIAKSEQEIGKATAKYFFYSNIMNFFKTEITLANGEIRKRPLIETNGETGEIVWDKGRDFATVRKVLSMPQVNIVKKTEVQTGGFSKESILPKRNSDKLIARKKDWDPKKYGGFDSPTVAYSVLVVAKVEKGKSKKLKSVKELLGITIMERSSFEKNPIDFLEAKGYKEVKKDLIIKLPKYSLFELENGRKRMLASAGELQKGNELALPSKYVNFLYLASHYEKLKGSPEDNEQKQLFVEQHKHYLDEIIEQISEFSKRVILADANLDKVLSAYNKHRDKPIREQAENIIHLFTLTNLGAPAAFKYFDTTIDRKRYTSTKEVLDATLIHQSITGLYETRIDLSQLGGDGGPAPGSSGGGGGLGIEDEYRLHETSTEPDVSLGSTWLSDFPQAWAETGGMGLAVRQAPLIIPLKATSTPVSIQQYPMSHEARLGIKPHIQRLLDQGILVPCQSPWNTPLLPVKKPGTNDYRPVQDLREVNKRVEDIHPTVPNPYNLLSGLPPSHQWYTVLDLKDAFFCLRLHPTSQPLFAFEWRDPGMGISGQLTWTRLPQGFKNSPTLFNEALHRDLADFRIQHPDLILLQYVDDILLAATSELDCQQGTRALLQTLGDLGYRASAKKAQICQKQVKYLGYLLREGQRWLTEARKETVMGQPVPKTPRQLREFLGKAGFCRLFIPGFAEMAAPLYPLTKPGTLFSWGPDQQKAYQEIKQALLTAPALGLPDLTKPFELFVDEKQGYAKGVLTQKLGPWRRPVAYLSKKLDPVAAGWPPCLRMVAAIAVLTKDAGKLTMGQPLVILAPHAVEALVKQPPDRWLSNARMTHYQAMLLDTDRVQFGPVVALNPATLLPLPEEGAPHDCLEILAETHGTRPDLTDQPIPDADHTWYTDGSSFLQEGQRKAGAAVTTETEVIWAGALPAGTSAQRAELIALTQALKMAEGKRLNVYTDSRYAFATAHIHGEIYRRRGWLTSEGREIKNKSEILALLKALFLPKRLSIIHCLGHQKGDSAEARGNRLADQAAREAAIKTPPDTSTLLIAGKRTADGSEFEKRTADGSEFESPKKKAKVE

SEQ ID NO: 2092 - protein, 2105 aa, synthetic construct
MPAAKRVKLDGGDKKYSIGLDIGTNSVGWAVITDEYKVPSKKFKVLGNTDRHSIKKNLIGALLFDSGETAEATRLKRTARRRYTRRKNRICYLQEIFSNEMAKVDDSFFHRLEESFLVEEDKKHERHPIFGNIVDEVAYHEKYPTIYHLRKKLVDSTDKADLRLIYLALAHMIKFRGHFLIEGDLNPDNSDVDKLFIQLVQTYNQLFEENPINASGVDAKAILSARLSKSRRLENLIAQLPGEKKNGLFGNLIALSLGLTPNFKSNFDLAEDAKLQLSKDTYDDDLDNLLAQIGDQYADLFLAAKNLSDAILLSDILRVNTEITKAPLSASMIKRYDEHHQDLTLLKALVRQQLPEKYKEIFFDQSKNGYAGYIDGGASQEEFYKFIKPILEKMDGTEELLVKLNREDLLRKQRTFDNGSIPHQIHLGELHAILRRQEDFYPFLKDNREKIEKILTFRIPYYVGPLARGNSRFAWMTRKSEETITPWNFEEVVDKGASAQSFIERMTNFDKNLPNEKVLPKHSLLYEYFTVYNELTKVKYVTEGMRKPAFLSGEQKKAIVDLLFKTNRKVTVKQLKEDYFKKIECFDSVEISGVEDRFNASLGTYHDLLKIIKDKDFLDNEENEDILEDIVLTLTLFEDREMIEERLKTYAHLFDDKVMKQLKRRRYTGWGRLSRKLINGIRDKQSGKTILDFLKSDGFANRNFMQLIHDDSLTFKEDIQKAQVSGQGDSLHEHIANLAGSPAIKKGILQTVKVVDELVKVMGRHKPENIVIEMARENQTTQKGQKNSRERMKRIEEGIKELGSQILKEHPVENTQLQNEKLYLYYLQNGRDMYVDQELDINRLSDYDVDHIVPQSFLKDDSIDNKVLTRSDKARGKSDNVPSEEVVKKMKNYWRQLLNAKLITQRKFDNLTKAERGGLSELDKAGFIKRQLVETRQITKHVAQILDSRMNTKYDENDKLIREVKVITLKSKLVSDFRKDFQFYKVREINNYHHAHDAYLNAVVGTALIKKYPKLESEFVYGDYKVYDVRKMIAKSEQEIGKATAKYFFYSNIMNFFKTEITLANGEIRKRPLIETNGETGEIVWDKGRDFATVRKVLSMPQVNIVKKTEVQTGGFSKESILPKRNSDKLIARKKDWDPKKYGGFDSPTVAYSVLVVAKVEKGKSKKLKSVKELLGITIMERSSFEKNPIDFLEAKGYKEVKKDLIIKLPKYSLFELENGRKRMLASAGELQKGNELALPSKYVNFLYLASHYEKLKGSPEDNEQKQLFVEQHKHYLDEIIEQISEFSKRVILADANLDKVLSAYNKHRDKPIREQAENIIHLFTLTNLGAPAAFKYFDTTIDRKRYTSTKEVLDATLIHQSITGLYETRIDLSQLGGDGGEAAAKEAAAKEAAAKEAAAKGGLGIEDEYRLHETSTEPDVSLGSTWLSDFPQAWAETGGMGLAVRQAPLIIPLKATSTPVSIQQYPMSHEARLGIKPHIQRLLDQGILVPCQSPWNTPLLPVKKPGTNDYRPVQDLREVNKRVEDIHPTVPNPYNLLSGLPPSHQWYTVLDLKDAFFCLRLHPTSQPLFAFEWRDPGMGISGQLTWTRLPQGFKNSPTLFNEALHRDLADFRIQHPDLILLQYVDDILLAATSELDCQQGTRALLQTLGDLGYRASAKKAQICQKQVKYLGYLLREGQRWLTEARKETVMGQPVPKTPRQLREFLGKAGFCRLFIPGFAEMAAPLYPLTKPGTLFSWGPDQQKAYQEIKQALLTAPALGLPDLTKPFELFVDEKQGYAKGVLTQKLGPWRRPVAYLSKKLDPVAAGWPPCLRMVAAIAVLTKDAGKLTMGQPLVILAPHAVEALVKQPPDRWLSNARMTHYQAMLLDTDRVQFGPVVALNPATLLPLPEEGAPHDCLEILAETHGTRPDLTDQPIPDADHTWYTDGSSFLQEGQRKAGAAVTTETEVIWAGALPAGTSAQRAELIALTQALKMAEGKRLNVYTDSRYAFATAHIHGEIYRRRGWLTSEGREIKNKSEILALLKALFLPKRLSIIHCLGHQKGDSAEARGNRLADQAAREAAIKTPPDTSTLLIAGKRTADGSEFEKRTADGSEFESPKKKAKVE

SEQ ID NO: 2093 - protein, 2096 aa, synthetic construct; identical to SEQ ID NO: 2048

SEQ ID NO: 2094 - protein, 2115 aa, synthetic construct
MPAAKRVKLDGGDKKYSIGLDIGTNSVGWAVITDEYKVPSKKFKVLGNTDRHSIKKNLIGALLFDSGETAEATRLKRTARRRYTRRKNRICYLQEIFSNEMAKVDDSFFHRLEESFLVEEDKKHERHPIFGNIVDEVAYHEKYPTIYHLRKKLVDSTDKADLRLIYLALAHMIKFRGHFLIEGDLNPDNSDVDKLFIQLVQTYNQLFEENPINASGVDAKAILSARLSKSRRLENLIAQLPGEKKNGLFGNLIALSLGLTPNFKSNFDLAEDAKLQLSKDTYDDDLDNLLAQIGDQYADLFLAAKNLSDAILLSDILRVNTEITKAPLSASMIKRYDEHHQDLTLLKALVRQQLPEKYKEIFFDQSKNGYAGYIDGGASQEEFYKFIKPILEKMDGTEELLVKLNREDLLRKQRTFDNGSIPHQIHLGELHAILRRQEDFYPFLKDNREKIEKILTFRIPYYVGPLARGNSRFAWMTRKSEETITPWNFEEVVDKGASAQSFIERMTNFDKNLPNEKVLPKHSLLYEYFTVYNELTKVKYVTEGMRKPAFLSGEQKKAIVDLLFKTNRKVTVKQLKEDYFKKIECFDSVEISGVEDRFNASLGTYHDLLKIIKDKDFLDNEENEDILEDIVLTLTLFEDREMIEERLKTYAHLFDDKVMKQLKRRRYTGWGRLSRKLINGIRDKQSGKTILDFLKSDGFANRNFMQLIHDDSLTFKEDIQKAQVSGQGDSLHEHIANLAGSPAIKKGILQTVKVVDELVKVMGRHKPENIVIEMARENQTTQKGQKNSRERMKRIEEGIKELGSQILKEHPVENTQLQNEKLYLYYLQNGRDMYVDQELDINRLSDYDVDHIVPQSFLKDDSIDNKVLTRSDKARGKSDNVPSEEVVKKMKNYWRQLLNAKLITQRKFDNLTKAERGGLSELDKAGFIKRQLVETRQITKHVAQILDSRMNTKYDENDKLIREVKVITLKSKLVSDFRKDFQFYKVREINNYHHAHDAYLNAVVGTALIKKYPKLESEFVYGDYKVYDVRKMIAKSEQEIGKATAKYFFYSNIMNFFKTEITLANGEIRKRPLIETNGETGEIVWDKGRDFATVRKVLSMPQVNIVKKTEVQTGGFSKESILPKRNSDKLIARKKDWDPKKYGGFDSPTVAYSVLVVAKVEKGKSKKLKSVKELLGITIMERSSFEKNPIDFLEAKGYKEVKKDLIIKLPKYSLFELENGRKRMLASAGELQKGNELALPSKYVNFLYLASHYEKLKGSPEDNEQKQLFVEQHKHYLDEIIEQISEFSKRVILADANLDKVLSAYNKHRDKPIREQAENIIHLFTLTNLGAPAAFKYFDTTIDRKRYTSTKEVLDATLIHQSITGLYETRIDLSQLGGDGGGGGGSGGGGSGGGGSGGGGSGGGGSGGGGSGGLGIEDEYRLHETSTEPDVSLGSTWLSDFPQAWAETGGMGLAVRQAPLIIPLKATSTPVSIQQYPMSHEARLGIKPHIQRLLDQGILVPCQSPWNTPLLPVKKPGTNDYRPVQDLREVNKRVEDIHPTVPNPYNLLSGLPPSHQWYTVLDLKDAFFCLRLHPTSQPLFAFEWRDPGMGISGQLTWTRLPQGFKNSPTLFNEALHRDLADFRIQHPDLILLQYVDDILLAATSELDCQQGTRALLQTLGDLGYRASAKKAQICQKQVKYLGYLLREGQRWLTEARKETVMGQPVPKTPRQLREFLGKAGFCRLFIPGFAEMAAPLYPLTKPGTLFSWGPDQQKAYQEIKQALLTAPALGLPDLTKPFELFVDEKQGYAKGVLTQKLGPWRRPVAYLSKKLDPVAAGWPPCLRMVAAIAVLTKDAGKLTMGQPLVILAPHAVEALVKQPPDRWLSNARMTHYQAMLLDTDRVQFGPVVALNPATLLPLPEEGAPHDCLEILAETHGTRPDLTDQPIPDADHTWYTDGSSFLQEGQRKAGAAVTTETEVIWAGALPAGTSAQRAELIALTQALKMAEGKRLNVYTDSRYAFATAHIHGEIYRRRGWLTSEGREIKNKSEILALLKALFLPKRLSIIHCLGHQKGDSAEARGNRLADQAAREAAIKTPPDTSTLLIAGKRTADGSEFEKRTADGSEFESPKKKAKVE

SEQ ID NO: 2095 - protein, 2096 aa, synthetic construct
MPAAKRVKLDGGDKKYSIGLDIGTNSVGWAVITDEYKVPSKKFKVLGNTDRHSIKKNLIGALLFDSGETAEATRLKRTARRRYTRRKNRICYLQEIFSNEMAKVDDSFFHRLEESFLVEEDKKHERHPIFGNIVDEVAYHEKYPTIYHLRKKLVDSTDKADLRLIYLALAHMIKFRGHFLIEGDLNPDNSDVDKLFIQLVQTYNQLFEENPINASGVDAKAILSARLSKSRRLENLIAQLPGEKKNGLFGNLIALSLGLTPNFKSNFDLAEDAKLQLSKDTYDDDLDNLLAQIGDQYADLFLAAKNLSDAILLSDILRVNTEITKAPLSASMIKRYDEHHQDLTLLKALVRQQLPEKYKEIFFDQSKNGYAGYIDGGASQEEFYKFIKPILEKMDGTEELLVKLNREDLLRKQRTFDNGSIPHQIHLGELHAILRRQEDFYPFLKDNREKIEKILTFRIPYYVGPLARGNSRFAWMTRKSEETITPWNFEEVVDKGASAQSFIERMTNFDKNLPNEKVLPKHSLLYEYFTVYNELTKVKYVTEGMRKPAFLSGEQKKAIVDLLFKTNRKVTVKQLKEDYFKKIECFDSVEISGVEDRFNASLGTYHDLLKIIKDKDFLDNEENEDILEDIVLTLTLFEDREMIEERLKTYAHLFDDKVMKQLKRRRYTGWGRLSRKLINGIRDKQSGKTILDFLKSDGFANRNFMQLIHDDSLTFKEDIQKAQVSGQGDSLHEHIANLAGSPAIKKGILQTVKVVDELVKVMGRHKPENIVIEMARENQTTQKGQKNSRERMKRIEEGIKELGSQILKEHPVENTQLQNEKLYLYYLQNGRDMYVDQELDINRLSDYDVDHIVPQSFLKDDSIDNKVLTRSDKARGKSDNVPSEEVVKKMKNYWRQLLNAKLITQRKFDNLTKAERGGLSELDKAGFIKRQLVETRQITKHVAQILDSRMNTKYDENDKLIREVKVITLKSKLVSDFRKDFQFYKVREINNYHHAHDAYLNAVVGTALIKKYPKLESEFVYGDYKVYDVRKMIAKSEQEIGKATAKYFFYSNIMNFFKTEITLANGEIRKRPLIETNGETGEIVWDKGRDFATVRKVLSMPQVNIVKKTEVQTGGFSKESILPKRNSDKLIARKKDWDPKKYGGFDSPTVAYSVLVVAKVEKGKSKKLKSVKELLGITIMERSSFEKNPIDFLEAKGYKEVKKDLIIKLPKYSLFELENGRKRMLASAGELQKGNELALPSKYVNFLYLASHYEKLKGSPEDNEQKQLFVEQHKHYLDEIIEQISEFSKRVILADANLDKVLSAYNKHRDKPIREQAENIIHLFTLTNLGAPAAFKYFDTTIDRKRYTSTKEVLDATLIHQSITGLYETRIDLSQLGGDGGPAPEAAAKGSSGGLGIEDEYRLHETSTEPDVSLGSTWLSDFPQAWAETGGMGLAVRQAPLIIPLKATSTPVSIQQYPMSHEARLGIKPHIQRLLDQGILVPCQSPWNTPLLPVKKPGTNDYRPVQDLREVNKRVEDIHPTVPNPYNLLSGLPPSHQWYTVLDLKDAFFCLRLHPTSQPLFAFEWRDPGMGISGQLTWTRLPQGFKNSPTLFNEALHRDLADFRIQHPDLILLQYVDDILLAATSELDCQQGTRALLQTLGDLGYRASAKKAQICQKQVKYLGYLLREGQRWLTEARKETVMGQPVPKTPRQLREFLGKAGFCRLFIPGFAEMAAPLYPLTKPGTLFSWGPDQQKAYQEIKQALLTAPALGLPDLTKPFELFVDEKQGYAKGVLTQKLGPWRRPVAYLSKKLDPVAAGWPPCLRMVAAIAVLTKDAGKLTMGQPLVILAPHAVEALVKQPPDRWLSNARMTHYQAMLLDTDRVQFGPVVALNPATLLPLPEEGAPHDCLEILAETHGTRPDLTDQPIPDADHTWYTDGSSFLQEGQRKAGAAVTTETEVIWAGALPAGTSAQRAELIALTQALKMAEGKRLNVYTDSRYAFATAHIHGEIYRRRGWLTSEGREIKNKSEILALLKALFLPKRLSIIHCLGHQKGDSAEARGNRLADQAAREAAIKTPPDTSTLLIAGKRTADGSEFEKRTADGSEFESPKKKAKVE

SEQ ID NO: 2096 - protein, 2090 aa, synthetic construct
MPAAKRVKLDGGDKKYSIGLDIGTNSVGWAVITDEYKVPSKKFKVLGNTDRHSIKKNLIGALLFDSGETAEATRLKRTARRRYTRRKNRICYLQEIFSNEMAKVDDSFFHRLEESFLVEEDKKHERHPIFGNIVDEVAYHEKYPTIYHLRKKLVDSTDKADLRLIYLALAHMIKFRGHFLIEGDLNPDNSDVDKLFIQLVQTYNQLFEENPINASGVDAKAILSARLSKSRRLENLIAQLPGEKKNGLFGNLIALSLGLTPNFKSNFDLAEDAKLQLSKDTYDDDLDNLLAQIGDQYADLFLAAKNLSDAILLSDILRVNTEITKAPLSASMIKRYDEHHQDLTLLKALVRQQLPEKYKEIFFDQSKNGYAGYIDGGASQEEFYKFIKPILEKMDGTEELLVKLNREDLLRKQRTFDNGSIPHQIHLGELHAILRRQEDFYPFLKDNREKIEKILTFRIPYYVGPLARGNSRFAWMTRKSEETITPWNFEEVVDKGASAQSFIERMTNFDKNLPNEKVLPKHSLLYEYFTVYNELTKVKYVTEGMRKPAFLSGEQKKAIVDLLFKTNRKVTVKQLKEDYFKKIECFDSVEISGVEDRFNASLGTYHDLLKIIKDKDFLDNEENEDILEDIVLTLTLFEDREMIEERLKTYAHLFDDKVMKQLKRRRYTGWGRLSRKLINGIRDKQSGKTILDFLKSDGFANRNFMQLIHDDSLTFKEDIQKAQVSGQGDSLHEHIANLAGSPAIKKGILQTVKVVDELVKVMGRHKPENIVIEMARENQTTQKGQKNSRERMKRIEEGIKELGSQILKEHPVENTQLQNEKLYLYYLQNGRDMYVDQELDINRLSDYDVDHIVPQSFLKDDSIDNKVLTRSDKARGKSDNVPSEEVVKKMKNYWRQLLNAKLITQRKFDNLTKAERGGLSELDKAGFIKRQLVETRQITKHVAQILDSRMNTKYDENDKLIREVKVITLKSKLVSDFRKDFQFYKVREINNYHHAHDAYLNAVVGTALIKKYPKLESEFVYGDYKVYDVRKMIAKSEQEIGKATAKYFFYSNIMNFFKTEITLANGEIRKRPLIETNGETGEIVWDKGRDFATVRKVLSMPQVNIVKKTEVQTGGFSKESILPKRNSDKLIARKKDWDPKKYGGFDSPTVAYSVLVVAKVEKGKSKKLKSVKELLGITIMERSSFEKNPIDFLEAKGYKEVKKDLIIKLPKYSLFELENGRKRMLASAGELQKGNELALPSKYVNFLYLASHYEKLKGSPEDNEQKQLFVEQHKHYLDEIIEQISEFSKRVILADANLDKVLSAYNKHRDKPIREQAENIIHLFTLTNLGAPAAFKYFDTTIDRKRYTSTKEVLDATLIHQSITGLYETRIDLSQLGGDGGEAAAKGGLGIEDEYRLHETSTEPDVSLGSTWLSDFPQAWAETGGMGLAVRQAPLIIPLKATSTPVSIQQYPMSHEARLGIKPHIQRLLDQGILVPCQSPWNTPLLPVKKPGTNDYRPVQDLREVNKRVEDIHPTVPNPYNLLSGLPPSHQWYTVLDLKDAFFCLRLHPTSQPLFAFEWRDPGMGISGQLTWTRLPQGFKNSPTLFNEALHRDLADFRIQHPDLILLQYVDDILLAATSELDCQQGTRALLQTLGDLGYRASAKKAQICQKQVKYLGYLLREGQRWLTEARKETVMGQPVPKTPRQLREFLGKAGFCRLFIPGFAEMAAPLYPLTKPGTLFSWGPDQQKAYQEIKQALLTAPALGLPDLTKPFELFVDEKQGYAKGVLTQKLGPWRRPVAYLSKKLDPVAAGWPPCLRMVAAIAVLTKDAGKLTMGQPLVILAPHAVEALVKQPPDRWLSNARMTHYQAMLLDTDRVQFGPVVALNPATLLPLPEEGAPHDCLEILAETHGTRPDLTDQPIPDADHTWYTDGSSFLQEGQRKAGAAVTTETEVIWAGALPAGTSAQRAELIALTQALKMAEGKRLNVYTDSRYAFATAHIHGEIYRRRGWLTSEGREIKNKSEILALLKALFLPKRLSIIHCLGHQKGDSAEARGNRLADQAAREAAIKTPPDTSTLLIAGKRTADGSEFEKRTADGSEFESPKKKAKVE

SEQ ID NO: 2097 - protein, 2096 aa, synthetic construct
MPAAKRVKLDGGDKKYSIGLDIGTNSVGWAVITDEYKVPSKKFKVLGNTDRHSIKKNLIGALLFDSGETAEATRLKRTARRRYTRRKNRICYLQEIFSNEMAKVDDSFFHRLEESFLVEEDKKHERHPIFGNIVDEVAYHEKYPTIYHLRKKLVDSTDKADLRLIYLALAHMIKFRGHFLIEGDLNPDNSDVDKLFIQLVQTYNQLFEENPINASGVDAKAILSARLSKSRRLENLIAQLPGEKKNGLFGNLIALSLGLTPNFKSNFDLAEDAKLQLSKDTYDDDLDNLLAQIGDQYADLFLAAKNLSDAILLSDILRVNTEITKAPLSASMIKRYDEHHQDLTLLKALVRQQLPEKYKEIFFDQSKNGYAGYIDGGASQEEFYKFIKPILEKMDGTEELLVKLNREDLLRKQRTFDNGSIPHQIHLGELHAILRRQEDFYPFLKDNREKIEKILTFRIPYYVGPLARGNSRFAWMTRKSEETITPWNFEEVVDKGASAQSFIERMTNFDKNLPNEKVLPKHSLLYEYFTVYNELTKVKYVTEGMRKPAFLSGEQKKAIVDLLFKTNRKVTVKQLKEDYFKKIECFDSVEISGVEDRFNASLGTYHDLLKIIKDKDFLDNEENEDILEDIVLTLTLFEDREMIEERLKTYAHLFDDKVMKQLKRRRYTGWGRLSRKLINGIRDKQSGKTILDFLKSDGFANRNFMQLIHDDSLTFKEDIQKAQVSGQGDSLHEHIANLAGSPAIKKGILQTVKVVDELVKVMGRHKPENIVIEMARENQTTQKGQKNSRERMKRIEEGIKELGSQILKEHPVENTQLQNEKLYLYYLQNGRDMYVDQELDINRLSDYDVDHIVPQSFLKDDSIDNKVLTRSDKARGKSDNVPSEEVVKKMKNYWRQLLNAKLITQRKFDNLTKAERGGLSELDKAGFIKRQLVETRQITKHVAQILDSRMNTKYDENDKLIREVKVITLKSKLVSDFRKDFQFYKVREINNYHHAHDAYLNAVVGTALIKKYPKLESEFVYGDYKVYDVRKMIAKSEQEIGKATAKYFFYSNIMNFFKTEITLANGEIRKRPLIETNGETGEIVWDKGRDFATVRKVLSMPQVNIVKKTEVQTGGFSKESILPKRNSDKLIARKKDWDPKKYGGFDSPTVAYSVLVVAKVEKGKSKKLKSVKELLGITIMERSSFEKNPIDFLEAKGYKEVKKDLIIKLPKYSLFELENGRKRMLASAGELQKGNELALPSKYVNFLYLASHYEKLKGSPEDNEQKQLFVEQHKHYLDEIIEQISEFSKRVILADANLDKVLSAYNKHRDKPIREQAENIIHLFTLTNLGAPAAFKYFDTTIDRKRYTSTKEVLDATLIHQSITGLYETRIDLSQLGGDGGPAPEAAAKGGSGGLGIEDEYRLHETSTEPDVSLGSTWLSDFPQAWAETGGMGLAVRQAPLIIPLKATSTPVSIQQYPMSHEARLGIKPHIQRLLDQGILVPCQSPWNTPLLPVKKPGTNDYRPVQDLREVNKRVEDIHPTVPNPYNLLSGLPPSHQWYTVLDLKDAFFCLRLHPTSQPLFAFEWRDPGMGISGQLTWTRLPQGFKNSPTLFNEALHRDLADFRIQHPDLILLQYVDDILLAATSELDCQQGTRALLQTLGDLGYRASAKKAQICQKQVKYLGYLLREGQRWLTEARKETVMGQPVPKTPRQLREFLGKAGFCRLFIPGFAEMAAPLYPLTKPGTLFSWGPDQQKAYQEIKQALLTAPALGLPDLTKPFELFVDEKQGYAKGVLTQKLGPWRRPVAYLSKKLDPVAAGWPPCLRMVAAIAVLTKDAGKLTMGQPLVILAPHAVEALVKQPPDRWLSNARMTHYQAMLLDTDRVQFGPVVALNPATLLPLPEEGAPHDCLEILAETHGTRPDLTDQPIPDADHTWYTDGSSFLQEGQRKAGAAVTTETEVIWAGALPAGTSAQRAELIALTQALKMAEGKRLNVYTDSRYAFATAHIHGEIYRRRGWLTSEGREIKNKSEILALLKALFLPKRLSIIHCLGHQKGDSAEARGNRLADQAAREAAIKTPPDTSTLLIAGKRTADGSEFEKRTADGSEFESPKKKAKVE

SEQ ID NO: 2098 - protein, 2115 aa, synthetic construct
MPAAKRVKLDGGDKKYSIGLDIGTNSVGWAVITDEYKVPSKKFKVLGNTDRHSIKKNLIGALLFDSGETAEATRLKRTARRRYTRRKNRICYLQEIFSNEMAKVDDSFFHRLEESFLVEEDKKHERHPIFGNIVDEVAYHEKYPTIYHLRKKLVDSTDKADLRLIYLALAHMIKFRGHFLIEGDLNPDNSDVDKLFIQLVQTYNQLFEENPINASGVDAKAILSARLSKSRRLENLIAQLPGEKKNGLFGNLIALSLGLTPNFKSNFDLAEDAKLQLSKDTYDDDLDNLLAQIGDQYADLFLAAKNLSDAILLSDILRVNTEITKAPLSASMIKRYDEHHQDLTLLKALVRQQLPEKYKEIFFDQSKNGYAGYIDGGASQEEFYKFIKPILEKMDGTEELLVKLNREDLLRKQRTFDNGSIPHQIHLGELHAILRRQEDFYPFLKDNREKIEKILTFRIPYYVGPLARGNSRFAWMTRKSEETITPWNFEEVVDKGASAQSFIERMTNFDKNLPNEKVLPKHSLLYEYFTVYNELTKVKYVTEGMRKPAFLSGEQKKAIVDLLFKTNRKVTVKQLKEDYFKKIECFDSVEISGVEDRFNASLGTYHDLLKIIKDKDFLDNEENEDILEDIVLTLTLFEDREMIEERLKTYAHLFDDKVMKQLKRRRYTGWGRLSRKLINGIRDKQSGKTILDFLKSDGFANRNFMQLIHDDSLTFKEDIQKAQVSGQGDSLHEHIANLAGSPAIKKGILQTVKVVDELVKVMGRHKPENIVIEMARENQTTQKGQKNSRERMKRIEEGIKELGSQILKEHPVENTQLQNEKLYLYYLQNGRDMYVDQELDINRLSDYDVDHIVPQSFLKDDSIDNKVLTRSDKARGKSDNVPSEEVVKKMKNYWRQLLNAKLITQRKFDNLTKAERGGLSELDKAGFIKRQLVETRQITKHVAQILDSRMNTKYDENDKLIREVKVITLKSKLVSDFRKDFQFYKVREINNYHHAHDAYLNAVVGTALIKKYPKLESEFVYGDYKVYDVRKMIAKSEQEIGKATAKYFFYSNIMNFFKTEITLANGEIRKRPLIETNGETGEIVWDKGRDFATVRKVLSMPQVNIVKKTEVQTGGFSKESILPKRNSDKLIARKKDWDPKKYGGFDSPTVAYSVLVVAKVEKGKSKKLKSVKELLGITIMERSSFEKNPIDFLEAKGYKEVKKDLIIKLPKYSLFELENGRKRMLASAGELQKGNELALPSKYVNFLYLASHYEKLKGSPEDNEQKQLFVEQHKHYLDEIIEQISEFSKRVILADANLDKVLSAYNKHRDKPIREQAENIIHLFTLTNLGAPAAFKYFDTTIDRKRYTSTKEVLDATLIHQSITGLYETRIDLSQLGGDGGEAAAKEAAAKEAAAKEAAAKEAAAKEAAAKGGLGIEDEYRLHETSTEPDVSLGSTWLSDFPQAWAETGGMGLAVRQAPLIIPLKATSTPVSIQQYPMSHEARLGIKPHIQRLLDQGILVPCQSPWNTPLLPVKKPGTNDYRPVQDLREVNKRVEDIHPTVPNPYNLLSGLPPSHQWYTVLDLKDAFFCLRLHPTSQPLFAFEWRDPGMGISGQLTWTRLPQGFKNSPTLFNEALHRDLADFRIQHPDLILLQYVDDILLAATSELDCQQGTRALLQTLGDLGYRASAKKAQICQKQVKYLGYLLREGQRWLTEARKETVMGQPVPKTPRQLREFLGKAGFCRLFIPGFAEMAAPLYPLTKPGTLFSWGPDQQKAYQEIKQALLTAPALGLPDLTKPFELFVDEKQGYAKGVLTQKLGPWRRPVAYLSKKLDPVAAGWPPCLRMVAAIAVLTKDAGKLTMGQPLVILAPHAVEALVKQPPDRWLSNARMTHYQAMLLDTDRVQFGPVVALNPATLLPLPEEGAPHDCLEILAETHGTRPDLTDQPIPDADHTWYTDGSSFLQEGQRKAGAAVTTETEVIWAGALPAGTSAQRAELIALTQALKMAEGKRLNVYTDSRYAFATAHIHGEIYRRRGWLTSEGREIKNKSEILALLKALFLPKRLSIIHCLGHQKGDSAEARGNRLADQAAREAAIKTPPDTSTLLIAGKRTADGSEFEKRTADGSEFESPKKKAKVE

SEQ ID NO: 2099 - protein, 2096 aa, synthetic construct
MPAAKRVKLDGGDKKYSIGLDIGTNSVGWAVITDEYKVPSKKFKVLGNTDRHSIKKNLIGALLFDSGETAEATRLKRTARRRYTRRKNRICYLQEIFSNEMAKVDDSFFHRLEESFLVEEDKKHERHPIFGNIVDEVAYHEKYPTIYHLRKKLVDSTDKADLRLIYLALAHMIKFRGHFLIEGDLNPDNSDVDKLFIQLVQTYNQLFEENPINASGVDAKAILSARLSKSRRLENLIAQLPGEKKNGLFGNLIALSLGLTPNFKSNFDLAEDAKLQLSKDTYDDDLDNLLAQIGDQYADLFLAAKNLSDAILLSDILRVNTEITKAPLSASMIKRYDEHHQDLTLLKALVRQQLPEKYKEIFFDQSKNGYAGYIDGGASQEEFYKFIKPILEKMDGTEELLVKLNREDLLRKQRTFDNGSIPHQIHLGELHAILRRQEDFYPFLKDNREKIEKILTFRIPYYVGPLARGNSRFAWMTRKSEETITPWNFEEVVDKGASAQSFIERMTNFDKNLPNEKVLPKHSLLYEYFTVYNELTKVKYVTEGMRKPAFLSGEQKKAIVDLLFKTNRKVTVKQLKEDYFKKIECFDSVEISGVEDRFNASLGTYHDLLKIIKDKDFLDNEENEDILEDIVLTLTLFEDREMIEERLKTYAHLFDDKVMKQLKRRRYTGWGRLSRKLINGIRDKQSGKTILDFLKSDGFANRNFMQLIHDDSLTFKEDIQKAQVSGQGDSLHEHIANLAGSPAIKKGILQTVKVVDELVKVMGRHKPENIVIEMARENQTTQKGQKNSRERMKRIEEGIKELGSQILKEHPVENTQLQNEKLYLYYLQNGRDMYVDQELDINRLSDYDVDHIVPQSFLKDDSIDNKVLTRSDKARGKSDNVPSEEVVKKMKNYWRQLLNAKLITQRKFDNLTKAERGGLSELDKAGFIKRQLVETRQITKHVAQILDSRMNTKYDENDKLIREVKVITLKSKLVSDFRKDFQFYKVREINNYHHAHDAYLNAVVGTALIKKYPKLESEFVYGDYKVYDVRKMIAKSEQEIGKATAKYFFYSNIMNFFKTEITLANGEIRKRPLIETNGETGEIVWDKGRDFATVRKVLSMPQVNIVKKTEVQTGGFSKESILPKRNSDKLIARKKDWDPKKYGGFDSPTVAYSVLVVAKVEKGKSKKLKSVKELLGITIMERSSFEKNPIDFLEAKGYKEVKKDLIIKLPKYSLFELENGRKRMLASAGELQKGNELALPSKYVNFLYLASHYEKLKGSPEDNEQKQLFVEQHKHYLDEIIEQISEFSKRVILADANLDKVLSAYNKHRDKPIREQAENIIHLFTLTNLGAPAAFKYFDTTIDRKRYTSTKEVLDATLIHQSITGLYETRIDLSQLGGDGGEAAAKPAPGGSGGLGIEDEYRLHETSTEPDVSLGSTWLSDFPQAWAETGGMGLAVRQAPLIIPLKATSTPVSIQQYPMSHEARLGIKPHIQRLLDQGILVPCQSPWNTPLLPVKKPGTNDYRPVQDLREVNKRVEDIHPTVPNPYNLLSGLPPSHQWYTVLDLKDAFFCLRLHPTSQPLFAFEWRDPGMGISGQLTWTRLPQGFKNSPTLFNEALHRDLADFRIQHPDLILLQYVDDILLAATSELDCQQGTRALLQTLGDLGYRASAKKAQICQKQVKYLGYLLREGQRWLTEARKETVMGQPVPKTPRQLREFLGKAGFCRLFIPGFAEMAAPLYPLTKPGTLFSWGPDQQKAYQEIKQALLTAPALGLPDLTKPFELFVDEKQGYAKGVLTQKLGPWRRPVAYLSKKLDPVAAGWPPCLRMVAAIAVLTKDAGKLTMGQPLVILAPHAVEALVKQPPDRWLSNARMTHYQAMLLDTDRVQFGPVVALNPATLLPLPEEGAPHDCLEILAETHGTRPDLTDQPIPDADHTWYTDGSSFLQEGQRKAGAAVTTETEVIWAGALPAGTSAQRAELIALTQALKMAEGKRLNVYTDSRYAFATAHIHGEIYRRRGWLTSEGREIKNKSEILALLKALFLPKRLSIIHCLGHQKGDSAEARGNRLADQAAREAAIKTPPDTSTLLIAGKRTADGSEFEKRTADGSEFESPKKKAKVE

SEQ ID NO: 2100 - protein, 2096 aa, synthetic construct
MPAAKRVKLDGGDKKYSIGLDIGTNSVGWAVITDEYKVPSKKFKVLGNTDRHSIKKNLIGALLFDSGETAEATRLKRTARRRYTRRKNRICYLQEIFSNEMAKVDDSFFHRLEESFLVEEDKKHERHPIFGNIVDEVAYHEKYPTIYHLRKKLVDSTDKADLRLIYLALAHMIKFRGHFLIEGDLNPDNSDVDKLFIQLVQTYNQLFEENPINASGVDAKAILSARLSKSRRLENLIAQLPGEKKNGLFGNLIALSLGLTPNFKSNFDLAEDAKLQLSKDTYDDDLDNLLAQIGDQYADLFLAAKNLSDAILLSDILRVNTEITKAPLSASMIKRYDEHHQDLTLLKALVRQQLPEKYKEIFFDQSKNGYAGYIDGGASQEEFYKFIKPILEKMDGTEELLVKLNREDLLRKQRTFDNGSIPHQIHLGELHAILRRQEDFYPFLKDNREKIEKILTFRIPYYVGPLARGNSRFAWMTRKSEETITPWNFEEVVDKGASAQSFIERMTNFDKNLPNEKVLPKHSLLYEYFTVYNELTKVKYVTEGMRKPAFLSGEQKKAIVDLLFKTNRKVTVKQLKEDYFKKIECFDSVEISGVEDRFNASLGTYHDLLKIIKDKDFLDNEENEDILEDIVLTLTLFEDREMIEERLKTYAHLFDDKVMKQLKRRRYTGWGRLSRKLINGIRDKQSGKTILDFLKSDGFANRNFMQLIHDDSLTFKEDIQKAQVSGQGDSLHEHIANLAGSPAIKKGILQTVKVVDELVKVMGRHKPENIVIEMARENQTTQKGQKNSRERMKRIEEGIKELGSQILKEHPVENTQLQNEKLYLYYLQNGRDMYVDQELDINRLSDYDVDHIVPQSFLKDDSIDNKVLTRSDKARGKSDNVPSEEVVKKMKNYWRQLLNAKLITQRKFDNLTKAERGGLSELDKAGFIKRQLVETRQITKHVAQILDSRMNTKYDENDKLIREVKVITLKSKLVSDFRKDFQFYKVREINNYHHAHDAYLNAVVGTALIKKYPKLESEFVYGDYKVYDVRKMIAKSEQEIGKATAKYFFYSNIMNFFKTEITLANGEIRKRPLIETNGETGEIVWDKGRDFATVRKVLSMPQVNIVKKTEVQTGGFSKESILPKRNSDKLIARKKDWDPKKYGGFDSPTVAYSVLVVAKVEKGKSKKLKSVKELLGITIMERSSFEKNPIDFLEAKGYKEVKKDLIIKLPKYSLFELENGRKRMLASAGELQKGNELALPSKYVNFLYLASHYEKLKGSPEDNEQKQLFVEQHKHYLDEIIEQISEFSKRVILADANLDKVLSAYNKHRDKPIREQAENIIHLFTLTNLGAPAAFKYFDTTIDRKRYTSTKEVLDATLIHQSITGLYETRIDLSQLGGDGGGGSGSSEAAAKGGLGIEDEYRLHETSTEPDVSLGSTWLSDFPQAWAETGGMGLAVRQAPLIIPLKATSTPVSIQQYPMSHEARLGIKPHIQRLLDQGILVPCQSPWNTPLLPVKKPGTNDYRPVQDLREVNKRVEDIHPTVPNPYNLLSGLPPSHQWYTVLDLKDAFFCLRLHPTSQPLFAFEWRDPGMGISGQLTWTRLPQGFKNSPTLFNEALHRDLADFRIQHPDLILLQYVDDILLAATSELDCQQGTRALLQTLGDLGYRASAKKAQICQKQVKYLGYLLREGQRWLTEARKETVMGQPVPKTPRQLREFLGKAGFCRLFIPGFAEMAAPLYPLTKPGTLFSWGPDQQKAYQEIKQALLTAPALGLPDLTKPFELFVDEKQGYAKGVLTQKLGPWRRPVAYLSKKLDPVAAGWPPCLRMVAAIAVLTKDAGKLTMGQPLVILAPHAVEALVKQPPDRWLSNARMTHYQAMLLDTDRVQFGPVVALNPATLLPLPEEGAPHDCLEILAETHGTRPDLTDQPIPDADHTWYTDGSSFLQEGQRKAGAAVTTETEVIWAGALPAGTSAQRAELIALTQALKMAEGKRLNVYTDSRYAFATAHIHGEIYRRRGWLTSEGREIKNKSEILALLKALFLPKRLSIIHCLGHQKGDSAEARGNRLADQAAREAAIKTPPDTSTLLIAGKRTADGSEFEKRTADGSEFESPKKKAKVE

SEQ ID NO: 2101 - protein, 2094 aa, synthetic construct
MPAAKRVKLDGGDKKYSIGLDIGTNSVGWAVITDEYKVPSKKFKVLGNTDRHSIKKNLIGALLFDSGETAEATRLKRTARRRYTRRKNRICYLQEIFSNEMAKVDDSFFHRLEESFLVEEDKKHERHPIFGNIVDEVAYHEKYPTIYHLRKKLVDSTDKADLRLIYLALAHMIKFRGHFLIEGDLNPDNSDVDKLFIQLVQTYNQLFEENPINASGVDAKAILSARLSKSRRLENLIAQLPGEKKNGLFGNLIALSLGLTPNFKSNFDLAEDAKLQLSKDTYDDDLDNLLAQIGDQYADLFLAAKNLSDAILLSDILRVNTEITKAPLSASMIKRYDEHHQDLTLLKALVRQQLPEKYKEIFFDQSKNGYAGYIDGGASQEEFYKFIKPILEKMDGTEELLVKLNREDLLRKQRTFDNGSIPHQIHLGELHAILRRQEDFYPFLKDNREKIEKILTFRIPYYVGPLARGNSRFAWMTRKSEETITPWNFEEVVDKGASAQSFIERMTNFDKNLPNEKVLPKHSLLYEYFTVYNELTKVKYVTEGMRKPAFLSGEQKKAIVDLLFKTNRKVTVKQLKEDYFKKIECFDSVEISGVEDRFNASLGTYHDLLKIIKDKDFLDNEENEDILEDIVLTLTLFEDREMIEERLKTYAHLFDDKVMKQLKRRRYTGWGRLSRKLINGIRDKQSGKTILDFLKSDGFANRNFMQLIHDDSLTFKEDIQKAQVSGQGDSLHEHIANLAGSPAIKKGILQTVKVVDELVKVMGRHKPENIVIEMARENQTTQKGQKNSRERMKRIEEGIKELGSQILKEHPVENTQLQNEKLYLYYLQNGRDMYVDQELDINRLSDYDVDHIVPQSFLKDDSIDNKVLTRSDKARGKSDNVPSEEVVKKMKNYWRQLLNAKLITQRKFDNLTKAERGGLSELDKAGFIKRQLVETRQITKHVAQILDSRMNTKYDENDKLIREVKVITLKSKLVSDFRKDFQFYKVREINNYHHAHDAYLNAVVGTALIKKYPKLESEFVYGDYKVYDVRKMIAKSEQEIGKATAKYFFYSNIMNFFKTEITLANGEIRKRPLIETNGETGEIVWDKGRDFATVRKVLSMPQVNIVKKTEVQTGGFSKESILPKRNSDKLIARKKDWDPKKYGGFDSPTVAYSVLVVAKVEKGKSKKLKSVKELLGITIMERSSFEKNPIDFLEAKGYKEVKKDLIIKLPKYSLFELENGRKRMLASAGELQKGNELALPSKYVNFLYLASHYEKLKGSPEDNEQKQLFVEQHKHYLDEIIEQISEFSKRVILADANLDKVLSAYNKHRDKPIREQAENIIHLFTLTNLGAPAAFKYFDTTIDRKRYTSTKEVLDATLIHQSITGLYETRIDLSQLGGDGGPAPGGGGSSGGLGIEDEYRLHETSTEPDVSLGSTWLSDFPQAWAETGGMGLAVRQAPLIIPLKATSTPVSIQQYPMSHEARLGIKPHIQRLLDQGILVPCQSPWNTPLLPVKKPGTNDYRPVQDLREVNKRVEDIHPTVPNPYNLLSGLPPSHQWYTVLDLKDAFFCLRLHPTSQPLFAFEWRDPGMGISGQLTWTRLPQGFKNSPTLFNEALHRDLADFRIQHPDLILLQYVDDILLAATSELDCQQGTRALLQTLGDLGYRASAKKAQICQKQVKYLGYLLREGQRWLTEARKETVMGQPVPKTPRQLREFLGKAGFCRLFIPGFAEMAAPLYPLTKPGTLFSWGPDQQKAYQEIKQALLTAPALGLPDLTKPFELFVDEKQGYAKGVLTQKLGPWRRPVAYLSKKLDPVAAGWPPCLRMVAAIAVLTKDAGKLTMGQPLVILAPHAVEALVKQPPDRWLSNARMTHYQAMLLDTDRVQFGPVVALNPATLLPLPEEGAPHDCLEILAETHGTRPDLTDQPIPDADHTWYTDGSSFLQEGQRKAGAAVTTETEVIWAGALPAGTSAQRAELIALTQALKMAEGKRLNVYTDSRYAFATAHIHGEIYRRRGWLTSEGREIKNKSEILALLKALFLPKRLSIIHCLGHQKGDSAEARGNRLADQAAREAAIKTPPDTSTLLIAGKRTADGSEFEKRTADGSEFESPKKKAKVE

SEQ ID NO: 2102 - protein, 2096 aa, synthetic construct
MPAAKRVKLDGGDKKYSIGLDIGTNSVGWAVITDEYKVPSKKFKVLGNTDRHSIKKNLIGALLFDSGETAEATRLKRTARRRYTRRKNRICYLQEIFSNEMAKVDDSFFHRLEESFLVEEDKKHERHPIFGNIVDEVAYHEKYPTIYHLRKKLVDSTDKADLRLIYLALAHMIKFRGHFLIEGDLNPDNSDVDKLFIQLVQTYNQLFEENPINASGVDAKAILSARLSKSRRLENLIAQLPGEKKNGLFGNLIALSLGLTPNFKSNFDLAEDAKLQLSKDTYDDDLDNLLAQIGDQYADLFLAAKNLSDAILLSDILRVNTEITKAPLSASMIKRYDEHHQDLTLLKALVRQQLPEKYKEIFFDQSKNGYAGYIDGGASQEEFYKFIKPILEKMDGTEELLVKLNREDLLRKQRTFDNGSIPHQIHLGELHAILRRQEDFYPFLKDNREKIEKILTFRIPYYVGPLARGNSRFAWMTRKSEETITPWNFEEVVDKGASAQSFIERMTNFDKNLPNEKVLPKHSLLYEYFTVYNELTKVKYVTEGMRKPAFLSGEQKKAIVDLLFKTNRKVTVKQLKEDYFKKIECFDSVEISGVEDRFNASLGTYHDLLKIIKDKDFLDNEENEDILEDIVLTLTLFEDREMIEERLKTYAHLFDDKVMKQLKRRRYTGWGRLSRKLINGIRDKQSGKTILDFLKSDGFANRNFMQLIHDDSLTFKEDIQKAQVSGQGDSLHEHIANLAGSPAIKKGILQTVKVVDELVKVMGRHKPENIVIEMARENQTTQKGQKNSRERMKRIEEGIKELGSQILKEHPVENTQLQNEKLYLYYLQNGRDMYVDQELDINRLSDYDVDHIVPQSFLKDDSIDNKVLTRSDKARGKSDNVPSEEVVKKMKNYWRQLLNAKLITQRKFDNLTKAERGGLSELDKAGFIKRQLVETRQITKHVAQILDSRMNTKYDENDKLIREVKVITLKSKLVSDFRKDFQFYKVREINNYHHAHDAYLNAVVGTALIKKYPKLESEFVYGDYKVYDVRKMIAKSEQEIGKATAKYFFYSNIMNFFKTEITLANGEIRKRPLIETNGETGEIVWDKGRDFATVRKVLSMPQVNIVKKTEVQTGGFSKESILPKRNSDKLIARKKDWDPKKYGGFDSPTVAYSVLVVAKVEKGKSKKLKSVKELLGITIMERSSFEKNPIDFLEAKGYKEVKKDLIIKLPKYSLFELENGRKRMLASAGELQKGNELALPSKYVNFLYLASHYEKLKGSPEDNEQKQLFVEQHKHYLDEIIEQISEFSKRVILADANLDKVLSAYNKHRDKPIREQAENIIHLFTLTNLGAPAAFKYFDTTIDRKRYTSTKEVLDATLIHQSITGLYETRIDLSQLGGDGGGGSEAAAKGGGGGLGIEDEYRLHETSTEPDVSLGSTWLSDFPQAWAETGGMGLAVRQAPLIIPLKATSTPVSIQQYPMSHEARLGIKPHIQRLLDQGILVPCQSPWNTPLLPVKKPGTNDYRPVQDLREVNKRVEDIHPTVPNPYNLLSGLPPSHQWYTVLDLKDAFFCLRLHPTSQPLFAFEWRDPGMGISGQLTWTRLPQGFKNSPTLFNEALHRDLADFRIQHPDLILLQYVDDILLAATSELDCQQGTRALLQTLGDLGYRASAKKAQICQKQVKYLGYLLREGQRWLTEARKETVMGQPVPKTPRQLREFLGKAGFCRLFIPGFAEMAAPLYPLTKPGTLFSWGPDQQKAYQEIKQALLTAPALGLPDLTKPFELFVDEKQGYAKGVLTQKLGPWRRPVAYLSKKLDPVAAGWPPCLRMVAAIAVLTKDAGKLTMGQPLVILAPHAVEALVKQPPDRWLSNARMTHYQAMLLDTDRVQFGPVVALNPATLLPLPEEGAPHDCLEILAETHGTRPDLTDQPIPDADHTWYTDGSSFLQEGQRKAGAAVTTETEVIWAGALPAGTSAQRAELIALTQALKMAEGKRLNVYTDSRYAFATAHIHGEIYRRRGWLTSEGREIKNKSEILALLKALFLPKRLSIIHCLGHQKGDSAEARGNRLADQAAREAAIKTPPDTSTLLIAGKRTADGSEFEKRTADGSEFESPKKKAKVE

SEQ ID NO: 2103 - protein, 2088 aa, synthetic construct
MPAAKRVKLDGGDKKYSIGLDIGTNSVGWAVITDEYKVPSKKFKVLGNTDRHSIKKNLIGALLFDSGETAEATRLKRTARRRYTRRKNRICYLQEIFSNEMAKVDDSFFHRLEESFLVEEDKKHERHPIFGNIVDEVAYHEKYPTIYHLRKKLVDSTDKADLRLIYLALAHMIKFRGHFLIEGDLNPDNSDVDKLFIQLVQTYNQLFEENPINASGVDAKAILSARLSKSRRLENLIAQLPGEKKNGLFGNLIALSLGLTPNFKSNFDLAEDAKLQLSKDTYDDDLDNLLAQIGDQYADLFLAAKNLSDAILLSDILRVNTEITKAPLSASMIKRYDEHHQDLTLLKALVRQQLPEKYKEIFFDQSKNGYAGYIDGGASQEEFYKFIKPILEKMDGTEELLVKLNREDLLRKQRTFDNGSIPHQIHLGELHAILRRQEDFYPFLKDNREKIEKILTFRIPYYVGPLARGNSRFAWMTRKSEETITPWNFEEVVDKGASAQSFIERMTNFDKNLPNEKVLPKHSLLYEYFTVYNELTKVKYVTEGMRKPAFLSGEQKKAIVDLLFKTNRKVTVKQLKEDYFKKIECFDSVEISGVEDRFNASLGTYHDLLKIIKDKDFLDNEENEDILEDIVLTLTLFEDREMIEERLKTYAHLFDDKVMKQLKRRRYTGWGRLSRKLINGIRDKQSGKTILDFLKSDGFANRNFMQLIHDDSLTFKEDIQKAQVSGQGDSLHEHIANLAGSPAIKKGILQTVKVVDELVKVMGRHKPENIVIEMARENQTTQKGQKNSRERMKRIEEGIKELGSQILKEHPVENTQLQNEKLYLYYLQNGRDMYVDQELDINRLSDYDVDHIVPQSFLKDDSIDNKVLTRSDKARGKSDNVPSEEVVKKMKNYWRQLLNAKLITQRKFDNLTKAERGGLSELDKAGFIKRQLVETRQITKHVAQILDSRMNTKYDENDKLIREVKVITLKSKLVSDFRKDFQFYKVREINNYHHAHDAYLNAVVGTALIKKYPKLESEFVYGDYKVYDVRKMIAKSEQEIGKATAKYFFYSNIMNFFKTEITLANGEIRKRPLIETNGETGEIVWDKGRDFATVRKVLSMPQVNIVKKTEVQTGGFSKESILPKRNSDKLIARKKDWDPKKYGGFDSPTVAYSVLVVAKVEKGKSKKLKSVKELLGITIMERSSFEKNPIDFLEAKGYKEVKKDLIIKLPKYSLFELENGRKRMLASAGELQKGNELALPSKYVNFLYLASHYEKLKGSPEDNEQKQLFVEQHKHYLDEIIEQISEFSKRVILADANLDKVLSAYNKHRDKPIREQAENIIHLFTLTNLGAPAAFKYFDTTIDRKRYTSTKEVLDATLIHQSITGLYETRIDLSQLGGDGGPAPGGLGIEDEYRLHETSTEPDVSLGSTWLSDFPQAWAETGGMGLAVRQAPLIIPLKATSTPVSIQQYPMSHEARLGIKPHIQRLLDQGILVPCQSPWNTPLLPVKKPGTNDYRPVQDLREVNKRVEDIHPTVPNPYNLLSGLPPSHQWYTVLDLKDAFFCLRLHPTSQPLFAFEWRDPGMGISGQLTWTRLPQGFKNSPTLFNEALHRDLADFRIQHPDLILLQYVDDILLAATSELDCQQGTRALLQTLGDLGYRASAKKAQICQKQVKYLGYLLREGQRWLTEARKETVMGQPVPKTPRQLREFLGKAGFCRLFIPGFAEMAAPLYPLTKPGTLFSWGPDQQKAYQEIKQALLTAPALGLPDLTKPFELFVDEKQGYAKGVLTQKLGPWRRPVAYLSKKLDPVAAGWPPCLRMVAAIAVLTKDAGKLTMGQPLVILAPHAVEALVKQPPDRWLSNARMTHYQAMLLDTDRVQFGPVVALNPATLLPLPEEGAPHDCLEILAETHGTRPDLTDQPIPDADHTWYTDGSSFLQEGQRKAGAAVTTETEVIWAGALPAGTSAQRAELIALTQALKMAEGKRLNVYTDSRYAFATAHIHGEIYRRRGWLTSEGREIKNKSEILALLKALFLPKRLSIIHCLGHQKGDSAEARGNRLADQAAREAAIKTPPDTSTLLIAGKRTADGSEFEKRTADGSEFESPKKKAKVE

SEQ ID NO: 2104 - protein, 2093 aa, synthetic construct
MPAAKRVKLDGGDKKYSIGLDIGTNSVGWAVITDEYKVPSKKFKVLGNTDRHSIKKNLIGALLFDSGETAEATRLKRTARRRYTRRKNRICYLQEIFSNEMAKVDDSFFHRLEESFLVEEDKKHERHPIFGNIVDEVAYHEKYPTIYHLRKKLVDSTDKADLRLIYLALAHMIKFRGHFLIEGDLNPDNSDVDKLFIQLVQTYNQLFEENPINASGVDAKAILSARLSKSRRLENLIAQLPGEKKNGLFGNLIALSLGLTPNFKSNFDLAEDAKLQLSKDTYDDDLDNLLAQIGDQYADLFLAAKNLSDAILLSDILRVNTEITKAPLSASMIKRYDEHHQDLTLLKALVRQQLPEKYKEIFFDQSKNGYAGYIDGGASQEEFYKFIKPILEKMDGTEELLVKLNREDLLRKQRTFDNGSIPHQIHLGELHAILRRQEDFYPFLKDNREKIEKILTFRIPYYVGPLARGNSRFAWMTRKSEETITPWNFEEVVDKGASAQSFIERMTNFDKNLPNEKVLPKHSLLYEYFTVYNELTKVKYVTEGMRKPAFLSGEQKKAIVDLLFKTNRKVTVKQLKEDYFKKIECFDSVEISGVEDRFNASLGTYHDLLKIIKDKDFLDNEENEDILEDIVLTLTLFEDREMIEERLKTYAHLFDDKVMKQLKRRRYTGWGRLSRKLINGIRDKQSGKTILDFLKSDGFANRNFMQLIHDDSLTFKEDIQKAQVSGQGDSLHEHIANLAGSPAIKKGILQTVKVVDELVKVMGRHKPENIVIEMARENQTTQKGQKNSRERMKRIEEGIKELGSQILKEHPVENTQLQNEKLYLYYLQNGRDMYVDQELDINRLSDYDVDHIVPQSFLKDDSIDNKVLTRSDKARGKSDNVPSEEVVKKMKNYWRQLLNAKLITQRKFDNLTKAERGGLSELDKAGFIKRQLVETRQITKHVAQILDSRMNTKYDENDKLIREVKVITLKSKLVSDFRKDFQFYKVREINNYHHAHDAYLNAVVGTALIKKYPKLESEFVYGDYKVYDVRKMIAKSEQEIGKATAKYFFYSNIMNFFKTEITLANGEIRKRPLIETNGETGEIVWDKGRDFATVRKVLSMPQVNIVKKTEVQTGGFSKESILPKRNSDKLIARKKDWDPKKYGGFDSPTVAYSVLVVAKVEKGKSKKLKSVKELLGITIMERSSFEKNPIDFLEAKGYKEVKKDLIIKLPKYSLFELENGRKRMLASAGELQKGNELALPSKYVNFLYLASHYEKLKGSPEDNEQKQLFVEQHKHYLDEIIEQISEFSKRVILADANLDKVLSAYNKHRDKPIREQAENIIHLFTLTNLGAPAAFKYFDTTIDRKRYTSTKEVLDATLIHQSITGLYETRIDLSQLGGDGGEAAAKGGSGGLGIEDEYRLHETSTEPDVSLGSTWLSDFPQAWAETGGMGLAVRQAPLIIPLKATSTPVSIQQYPMSHEARLGIKPHIQRLLDQGILVPCQSPWNTPLLPVKKPGTNDYRPVQDLREVNKRVEDIHPTVPNPYNLLSGLPPSHQWYTVLDLKDAFFCLRLHPTSQPLFAFEWRDPGMGISGQLTWTRLPQGFKNSPTLFNEALHRDLADFRIQHPDLILLQYVDDILLAATSELDCQQGTRALLQTLGDLGYRASAKKAQICQKQVKYLGYLLREGQRWLTEARKETVMGQPVPKTPRQLREFLGKAGFCRLFIPGFAEMAAPLYPLTKPGTLFSWGPDQQKAYQEIKQALLTAPALGLPDLTKPFELFVDEKQGYAKGVLTQKLGPWRRPVAYLSKKLDPVAAGWPPCLRMVAAIAVLTKDAGKLTMGQPLVILAPHAVEALVKQPPDRWLSNARMTHYQAMLLDTDRVQFGPVVALNPATLLPLPEEGAPHDCLEILAETHGTRPDLTDQPIPDADHTWYTDGSSFLQEGQRKAGAAVTTETEVIWAGALPAGTSAQRAELIALTQALKMAEGKRLNVYTDSRYAFATAHIHGEIYRRRGWLTSEGREIKNKSEILALLKALFLPKRLSIIHCLGHQKGDSAEARGNRLADQAAREAAIKTPPDTSTLLIAGKRTADGSEFEKRTADGSEFESPKKKAKVE

SEQ ID NO: 2105 - protein, 2093 aa, synthetic construct
MPAAKRVKLDGGDKKYSIGLDIGTNSVGWAVITDEYKVPSKKFKVLGNTDRHSIKKNLIGALLFDSGETAEATRLKRTARRRYTRRKNRICYLQEIFSNEMAKVDDSFFHRLEESFLVEEDKKHERHPIFGNIVDEVAYHEKYPTIYHLRKKLVDSTDKADLRLIYLALAHMIKFRGHFLIEGDLNPDNSDVDKLFIQLVQTYNQLFEENPINASGVDAKAILSARLSKSRRLENLIAQLPGEKKNGLFGNLIALSLGLTPNFKSNFDLAEDAKLQLSKDTYDDDLDNLLAQIGDQYADLFLAAKNLSDAILLSDILRVNTEITKAPLSASMIKRYDEHHQDLTLLKALVRQQLPEKYKEIFFDQSKNGYAGYIDGGASQEEFYKFIKPILEKMDGTEELLVKLNREDLLRKQRTFDNGSIPHQIHLGELHAILRRQEDFYPFLKDNREKIEKILTFRIPYYVGPLARGNSRFAWMTRKSEETITPWNFEEVVDKGASAQSFIERMTNFDKNLPNEKVLPKHSLLYEYFTVYNELTKVKYVTEGMRKPAFLSGEQKKAIVDLLFKTNRKVTVKQLKEDYFKKIECFDSVEISGVEDRFNASLGTYHDLLKIIKDKDFLDNEENEDILEDIVLTLTLFEDREMIEERLKTYAHLFDDKVMKQLKRRRYTGWGRLSRKLINGIRDKQSGKTILDFLKSDGFANRNFMQLIHDDSLTFKEDIQKAQVSGQGDSLHEHIANLAGSPAIKKGILQTVKVVDELVKVMGRHKPENIVIEMARENQTTQKGQKNSRERMKRIEEGIKELGSQILKEHPVENTQLQNEKLYLYYLQNGRDMYVDQELDINRLSDYDVDHIVPQSFLKDDSIDNKVLTRSDKARGKSDNVPSEEVVKKMKNYWRQLLNAKLITQRKFDNLTKAERGGLSELDKAGFIKRQLVETRQITKHVAQILDSRMNTKYDENDKLIREVKVITLKSKLVSDFRKDFQFYKVREINNYHHAHDAYLNAVVGTALIKKYPKLESEFVYGDYKVYDVRKMIAKSEQEIGKATAKYFFYSNIMNFFKTEITLANGEIRKRPLIETNGETGEIVWDKGRDFATVRKVLSMPQVNIVKKTEVQTGGFSKESILPKRNSDKLIARKKDWDPKKYGGFDSPTVAYSVLVVAKVEKGKSKKLKSVKELLGITIMERSSFEKNPIDFLEAKGYKEVKKDLIIKLPKYSLFELENGRKRMLASAGELQKGNELALPSKYVNFLYLASHYEKLKGSPEDNEQKQLFVEQHKHYLDEIIEQISEFSKRVILADANLDKVLSAYNKHRDKPIREQAENIIHLFTLTNLGAPAAFKYFDTTIDRKRYTSTKEVLDATLIHQSITGLYETRIDLSQLGGDGGGGSEAAAKGGLGIEDEYRLHETSTEPDVSLGSTWLSDFPQAWAETGGMGLAVRQAPLIIPLKATSTPVSIQQYPMSHEARLGIKPHIQRLLDQGILVPCQSPWNTPLLPVKKPGTNDYRPVQDLREVNKRVEDIHPTVPNPYNLLSGLPPSHQWYTVLDLKDAFFCLRLHPTSQPLFAFEWRDPGMGISGQLTWTRLPQGFKNSPTLFNEALHRDLADFRIQHPDLILLQYVDDILLAATSELDCQQGTRALLQTLGDLGYRASAKKAQICQKQVKYLGYLLREGQRWLTEARKETVMGQPVPKTPRQLREFLGKAGFCRLFIPGFAEMAAPLYPLTKPGTLFSWGPDQQKAYQEIKQALLTAPALGLPDLTKPFELFVDEKQGYAKGVLTQKLGPWRRPVAYLSKKLDPVAAGWPPCLRMVAAIAVLTKDAGKLTMGQPLVILAPHAVEALVKQPPDRWLSNARMTHYQAMLLDTDRVQFGPVVALNPATLLPLPEEGAPHDCLEILAETHGTRPDLTDQPIPDADHTWYTDGSSFLQEGQRKAGAAVTTETEVIWAGALPAGTSAQRAELIALTQALKMAEGKRLNVYTDSRYAFATAHIHGEIYRRRGWLTSEGREIKNKSEILALLKALFLPKRLSIIHCLGHQKGDSAEARGNRLADQAAREAAIKTPPDTSTLLIAGKRTADGSEFEKRTADGSEFESPKKKAKVE

SEQ ID NO: 2106 - protein, 2100 aa, synthetic construct
MPAAKRVKLDGGDKKYSIGLDIGTNSVGWAVITDEYKVPSKKFKVLGNTDRHSIKKNLIGALLFDSGETAEATRLKRTARRRYTRRKNRICYLQEIFSNEMAKVDDSFFHRLEESFLVEEDKKHERHPIFGNIVDEVAYHEKYPTIYHLRKKLVDSTDKADLRLIYLALAHMIKFRGHFLIEGDLNPDNSDVDKLFIQLVQTYNQLFEENPINASGVDAKAILSARLSKSRRLENLIAQLPGEKKNGLFGNLIALSLGLTPNFKSNFDLAEDAKLQLSKDTYDDDLDNLLAQIGDQYADLFLAAKNLSDAILLSDILRVNTEITKAPLSASMIKRYDEHHQDLTLLKALVRQQLPEKYKEIFFDQSKNGYAGYIDGGASQEEFYKFIKPILEKMDGTEELLVKLNREDLLRKQRTFDNGSIPHQIHLGELHAILRRQEDFYPFLKDNREKIEKILTFRIPYYVGPLARGNSRFAWMTRKSEETITPWNFEEVVDKGASAQSFIERMTNFDKNLPNEKVLPKHSLLYEYFTVYNELTKVKYVTEGMRKPAFLSGEQKKAIVDLLFKTNRKVTVKQLKEDYFKKIECFDSVEISGVEDRFNASLGTYHDLLKIIKDKDFLDNEENEDILEDIVLTLTLFEDREMIEERLKTYAHLFDDKVMKQLKRRRYTGWGRLSRKLINGIRDKQSGKTILDFLKSDGFANRNFMQLIHDDSLTFKEDIQKAQVSGQGDSLHEHIANLAGSPAIKKGILQTVKVVDELVKVMGRHKPENIVIEMARENQTTQKGQKNSRERMKRIEEGIKELGSQILKEHPVENTQLQNEKLYLYYLQNGRDMYVDQELDINRLSDYDVDHIVPQSFLKDDSIDNKVLTRSDKARGKSDNVPSEEVVKKMKNYWRQLLNAKLITQRKFDNLTKAERGGLSELDKAGFIKRQLVETRQITKHVAQILDSRMNTKYDENDKLIREVKVITLKSKLVSDFRKDFQFYKVREINNYHHAHDAYLNAVVGTALIKKYPKLESEFVYGDYKVYDVRKMIAKSEQEIGKATAKYFFYSNIMNFFKTEITLANGEIRKRPLIETNGETGEIVWDKGRDFATVRKVLSMPQVNIVKKTEVQTGGFSKESILPKRNSDKLIARKKDWDPKKYGGFDSPTVAYSVLVVAKVEKGKSKKLKSVKELLGITIMERSSFEKNPIDFLEAKGYKEVKKDLIIKLPKYSLFELENGRKRMLASAGELQKGNELALPSKYVNFLYLASHYEKLKGSPEDNEQKQLFVEQHKHYLDEIIEQISEFSKRVILADANLDKVLSAYNKHRDKPIREQAENIIHLFTLTNLGAPAAFKYFDTTIDRKRYTSTKEVLDATLIHQSITGLYETRIDLSQLGGDGGGGGGSEAAAKGGGGSGGLGIEDEYRLHETSTEPDVSLGSTWLSDFPQAWAETGGMGLAVRQAPLIIPLKATSTPVSIQQYPMSHEARLGIKPHIQRLLDQGILVPCQSPWNTPLLPVKKPGTNDYRPVQDLREVNKRVEDIHPTVPNPYNLLSGLPPSHQWYTVLDLKDAFFCLRLHPTSQPLFAFEWRDPGMGISGQLTWTRLPQGFKNSPTLFNEALHRDLADFRIQHPDLILLQYVDDILLAATSELDCQQGTRALLQTLGDLGYRASAKKAQICQKQVKYLGYLLREGQRWLTEARKETVMGQPVPKTPRQLREFLGKAGFCRLFIPGFAEMAAPLYPLTKPGTLFSWGPDQQKAYQEIKQALLTAPALGLPDLTKPFELFVDEKQGYAKGVLTQKLGPWRRPVAYLSKKLDPVAAGWPPCLRMVAAIAVLTKDAGKLTMGQPLVILAPHAVEALVKQPPDRWLSNARMTHYQAMLLDTDRVQFGPVVALNPATLLPLPEEGAPHDCLEILAETHGTRPDLTDQPIPDADHTWYTDGSSFLQEGQRKAGAAVTTETEVIWAGALPAGTSAQRAELIALTQALKMAEGKRLNVYTDSRYAFATAHIHGEIYRRRGWLTSEGREIKNKSEILALLKALFLPKRLSIIHCLGHQKGDSAEARGNRLADQAAREAAIKTPPDTSTLLIAGKRTADGSEFEKRTADGSEFESPKKKAKVE

SEQ ID NO: 2107 - protein, 2094 aa, synthetic construct
MPAAKRVKLDGGDKKYSIGLDIGTNSVGWAVITDEYKVPSKKFKVLGNTDRHSIKKNLIGALLFDSGETAEATRLKRTARRRYTRRKNRICYLQEIFSNEMAKVDDSFFHRLEESFLVEEDKKHERHPIFGNIVDEVAYHEKYPTIYHLRKKLVDSTDKADLRLIYLALAHMIKFRGHFLIEGDLNPDNSDVDKLFIQLVQTYNQLFEENPINASGVDAKAILSARLSKSRRLENLIAQLPGEKKNGLFGNLIALSLGLTPNFKSNFDLAEDAKLQLSKDTYDDDLDNLLAQIGDQYADLFLAAKNLSDAILLSDILRVNTEITKAPLSASMIKRYDEHHQDLTLLKALVRQQLPEKYKEIFFDQSKNGYAGYIDGGASQEEFYKFIKPILEKMDGTEELLVKLNREDLLRKQRTFDNGSIPHQIHLGELHAILRRQEDFYPFLKDNREKIEKILTFRIPYYVGPLARGNSRFAWMTRKSEETITPWNFEEVVDKGASAQSFIERMTNFDKNLPNEKVLPKHSLLYEYFTVYNELTKVKYVTEGMRKPAFLSGEQKKAIVDLLFKTNRKVTVKQLKEDYFKKIECFDSVEISGVEDRFNASLGTYHDLLKIIKDKDFLDNEENEDILEDIVLTLTLFEDREMIEERLKTYAHLFDDKVMKQLKRRRYTGWGRLSRKLINGIRDKQSGKTILDFLKSDGFANRNFMQLIHDDSLTFKEDIQKAQVSGQGDSLHEHIANLAGSPAIKKGILQTVKVVDELVKVMGRHKPENIVIEMARENQTTQKGQKNSRERMKRIEEGIKELGSQILKEHPVENTQLQNEKLYLYYLQNGRDMYVDQELDINRLSDYDVDHIVPQSFLKDDSIDNKVLTRSDKARGKSDNVPSEEVVKKMKNYWRQLLNAKLITQRKFDNLTKAERGGLSELDKAGFIKRQLVETRQITKHVAQILDSRMNTKYDENDKLIREVKVITLKSKLVSDFRKDFQFYKVREINNYHHAHDAYLNAVVGTALIKKYPKLESEFVYGDYKVYDVRKMIAKSEQEIGKATAKYFFYSNIMNFFKTEITLANGEIRKRPLIETNGETGEIVWDKGRDFATVRKVLSMPQVNIVKKTEVQTGGFSKESILPKRNSDKLIARKKDWDPKKYGGFDSPTVAYSVLVVAKVEKGKSKKLKSVKELLGITIMERSSFEKNPIDFLEAKGYKEVKKDLIIKLPKYSLFELENGRKRMLASAGELQKGNELALPSKYVNFLYLASHYEKLKGSPEDNEQKQLFVEQHKHYLDEIIEQISEFSKRVILADANLDKVLSAYNKHRDKPIREQAENIIHLFTLTNLGAPAAFKYFDTTIDRKRYTSTKEVLDATLIHQSITGLYETRIDLSQLGGDGGGGGGSSGGSGGLGIEDEYRLHETSTEPDVSLGSTWLSDFPQAWAETGGMGLAVRQAPLIIPLKATSTPVSIQQYPMSHEARLGIKPHIQRLLDQGILVPCQSPWNTPLLPVKKPGTNDYRPVQDLREVNKRVEDIHPTVPNPYNLLSGLPPSHQWYTVLDLKDAFFCLRLHPTSQPLFAFEWRDPGMGISGQLTWTRLPQGFKNSPTLFNEALHRDLADFRIQHPDLILLQYVDDILLAATSELDCQQGTRALLQTLGDLGYRASAKKAQICQKQVKYLGYLLREGQRWLTEARKETVMGQPVPKTPRQLREFLGKAGFCRLFIPGFAEMAAPLYPLTKPGTLFSWGPDQQKAYQEIKQALLTAPALGLPDLTKPFELFVDEKQGYAKGVLTQKLGPWRRPVAYLSKKLDPVAAGWPPCLRMVAAIAVLTKDAGKLTMGQPLVILAPHAVEALVKQPPDRWLSNARMTHYQAMLLDTDRVQFGPVVALNPATLLPLPEEGAPHDCLEILAETHGTRPDLTDQPIPDADHTWYTDGSSFLQEGQRKAGAAVTTETEVIWAGALPAGTSAQRAELIALTQALKMAEGKRLNVYTDSRYAFATAHIHGEIYRRRGWLTSEGREIKNKSEILALLKALFLPKRLSIIHCLGHQKGDSAEARGNRLADQAAREAAIKTPPDTSTLLIAGKRTADGSEFEKRTADGSEFESPKKKAKVE

SEQ ID NO: 2108 - protein, 2096 aa, synthetic construct
MPAAKRVKLDGGDKKYSIGLDIGTNSVGWAVITDEYKVPSKKFKVLGNTDRHSIKKNLIGALLFDSGETAEATRLKRTARRRYTRRKNRICYLQEIFSNEMAKVDDSFFHRLEESFLVEEDKKHERHPIFGNIVDEVAYHEKYPTIYHLRKKLVDSTDKADLRLIYLALAHMIKFRGHFLIEGDLNPDNSDVDKLFIQLVQTYNQLFEENPINASGVDAKAILSARLSKSRRLENLIAQLPGEKKNGLFGNLIALSLGLTPNFKSNFDLAEDAKLQLSKDTYDDDLDNLLAQIGDQYADLFLAAKNLSDAILLSDILRVNTEITKAPLSASMIKRYDEHHQDLTLLKALVRQQLPEKYKEIFFDQSKNGYAGYIDGGASQEEFYKFIKPILEKMDGTEELLVKLNREDLLRKQRTFDNGSIPHQIHLGELHAILRRQEDFYPFLKDNREKIEKILTFRIPYYVGPLARGNSRFAWMTRKSEETITPWNFEEVVDKGASAQSFIERMTNFDKNLPNEKVLPKHSLLYEYFTVYNELTKVKYVTEGMRKPAFLSGEQKKAIVDLLFKTNRKVTVKQLKEDYFKKIECFDSVEISGVEDRFNASLGTYHDLLKIIKDKDFLDNEENEDILEDIVLTLTLFEDREMIEERLKTYAHLFDDKVMKQLKRRRYTGWGRLSRKLINGIRDKQSGKTILDFLKSDGFANRNFMQLIHDDSLTFKEDIQKAQVSGQGDSLHEHIANLAGSPAIKKGILQTVKVVDELVKVMGRHKPENIVIEMARENQTTQKGQKNSRERMKRIEEGIKELGSQILKEHPVENTQLQNEKLYLYYLQNGRDMYVDQELDINRLSDYDVDHIVPQSFLKDDSIDNKVLTRSDKARGKSDNVPSEEVVKKMKNYWRQLLNAKLITQRKFDNLTKAERGGLSELDKAGFIKRQLVETRQITKHVAQILDSRMNTKYDENDKLIREVKVITLKSKLVSDFRKDFQFYKVREINNYHHAHDAYLNAVVGTALIKKYPKLESEFVYGDYKVYDVRKMIAKSEQEIGKATAKYFFYSNIMNFFKTEITLANGEIRKRPLIETNGETGEIVWDKGRDFATVRKVLSMPQVNIVKKTEVQTGGFSKESILPKRNSDKLIARKKDWDPKKYGGFDSPTVAYSVLVVAKVEKGKSKKLKSVKELLGITIMERSSFEKNPIDFLEAKGYKEVKKDLIIKLPKYSLFELENGRKRMLASAGELQKGNELALPSKYVNFLYLASHYEKLKGSPEDNEQKQLFVEQHKHYLDEIIEQISEFSKRVILADANLDKVLSAYNKHRDKPIREQAENIIHLFTLTNLGAPAAFKYFDTTIDRKRYTSTKEVLDATLIHQSITGLYETRIDLSQLGGDGGGSSGGGEAAAKGGLGIEDEYRLHETSTEPDVSLGSTWLSDFPQAWAETGGMGLAVRQAPLIIPLKATSTPVSIQQYPMSHEARLGIKPHIQRLLDQGILVPCQSPWNTPLLPVKKPGTNDYRPVQDLREVNKRVEDIHPTVPNPYNLLSGLPPSHQWYTVLDLKDAFFCLRLHPTSQPLFAFEWRDPGMGISGQLTWTRLPQGFKNSPTLFNEALHRDLADFRIQHPDLILLQYVDDILLAATSELDCQQGTRALLQTLGDLGYRASAKKAQICQKQVKYLGYLLREGQRWLTEARKETVMGQPVPKTPRQLREFLGKAGFCRLFIPGFAEMAAPLYPLTKPGTLFSWGPDQQKAYQEIKQALLTAPALGLPDLTKPFELFVDEKQGYAKGVLTQKLGPWRRPVAYLSKKLDPVAAGWPPCLRMVAAIAVLTKDAGKLTMGQPLVILAPHAVEALVKQPPDRWLSNARMTHYQAMLLDTDRVQFGPVVALNPATLLPLPEEGAPHDCLEILAETHGTRPDLTDQPIPDADHTWYTDGSSFLQEGQRKAGAAVTTETEVIWAGALPAGTSAQRAELIALTQALKMAEGKRLNVYTDSRYAFATAHIHGEIYRRRGWLTSEGREIKNKSEILALLKALFLPKRLSIIHCLGHQKGDSAEARGNRLADQAAREAAIKTPPDTSTLLIAGKRTADGSEFEKRTADGSEFESPKKKAKVE

SEQ ID NO: 2109 - protein, 2096 aa, synthetic construct
MPAAKRVKLDGGDKKYSIGLDIGTNSVGWAVITDEYKVPSKKFKVLGNTDRHSIKKNLIGALLFDSGETAEATRLKRTARRRYTRRKNRICYLQEIFSNEMAKVDDSFFHRLEESFLVEEDKKHERHPIFGNIVDEVAYHEKYPTIYHLRKKLVDSTDKADLRLIYLALAHMIKFRGHFLIEGDLNPDNSDVDKLFIQLVQTYNQLFEENPINASGVDAKAILSARLSKSRRLENLIAQLPGEKKNGLFGNLIALSLGLTPNFKSNFDLAEDAKLQLSKDTYDDDLDNLLAQIGDQYADLFLAAKNLSDAILLSDILRVNTEITKAPLSASMIKRYDEHHQDLTLLKALVRQQLPEKYKEIFFDQSKNGYAGYIDGGASQEEFYKFIKPILEKMDGTEELLVKLNREDLLRKQRTFDNGSIPHQIHLGELHAILRRQEDFYPFLKDNREKIEKILTFRIPYYVGPLARGNSRFAWMTRKSEETITPWNFEEVVDKGASAQSFIERMTNFDKNLPNEKVLPKHSLLYEYFTVYNELTKVKYVTEGMRKPAFLSGEQKKAIVDLLFKTNRKVTVKQLKEDYFKKIECFDSVEISGVEDRFNASLGTYHDLLKIIKDKDFLDNEENEDILEDIVLTLTLFEDREMIEERLKTYAHLFDDKVMKQLKRRRYTGWGRLSRKLINGIRDKQSGKTILDFLKSDGFANRNFMQLIHDDSLTFKEDIQKAQVSGQGDSLHEHIANLAGSPAIKKGILQTVKVVDELVKVMGRHKPENIVIEMARENQTTQKGQKNSRERMKRIEEGIKELGSQILKEHPVENTQLQNEKLYLYYLQNGRDMYVDQELDINRLSDYDVDHIVPQSFLKDDSIDNKVLTRSDKARGKSDNVPSEEVVKKMKNYWRQLLNAKLITQRKFDNLTKAERGGLSELDKAGFIKRQLVETRQITKHVAQILDSRMNTKYDENDKLIREVKVITLKSKLVSDFRKDFQFYKVREINNYHHAHDAYLNAVVGTALIKKYPKLESEFVYGDYKVYDVRKMIAKSEQEIGKATAKYFFYSNIMNFFKTEITLANGEIRKRPLIETNGETGEIVWDKGRDFATVRKVLSMPQVNIVKKTEVQTGGFSKESILPKRNSDKLIARKKDWDPKKYGGFDSPTVAYSVLVVAKVEKGKSKKLKSVKELLGITIMERSSFEKNPIDFLEAKGYKEVKKDLIIKLPKYSLFELENGRKRMLASAGELQKGNELALPSKYVNFLYLASHYEKLKGSPEDNEQKQLFVEQHKHYLDEIIEQISEFSKRVILADANLDKVLSAYNKHRDKPIREQAENIIHLFTLTNLGAPAAFKYFDTTIDRKRYTSTKEVLDATLIHQSITGLYETRIDLSQLGGDGGGSSEAAAKPAPGGLGIEDEYRLHETSTEPDVSLGSTWLSDFPQAWAETGGMGLAVRQAPLIIPLKATSTPVSIQQYPMSHEARLGIKPHIQRLLDQGILVPCQSPWNTPLLPVKKPGTNDYRPVQDLREVNKRVEDIHPTVPNPYNLLSGLPPSHQWYTVLDLKDAFFCLRLHPTSQPLFAFEWRDPGMGISGQLTWTRLPQGFKNSPTLFNEALHRDLADFRIQHPDLILLQYVDDILLAATSELDCQQGTRALLQTLGDLGYRASAKKAQICQKQVKYLGYLLREGQRWLTEARKETVMGQPVPKTPRQLREFLGKAGFCRLFIPGFAEMAAPLYPLTKPGTLFSWGPDQQKAYQEIKQALLTAPALGLPDLTKPFELFVDEKQGYAKGVLTQKLGPWRRPVAYLSKKLDPVAAGWPPCLRMVAAIAVLTKDAGKLTMGQPLVILAPHAVEALVKQPPDRWLSNARMTHYQAMLLDTDRVQFGPVVALNPATLLPLPEEGAPHDCLEILAETHGTRPDLTDQPIPDADHTWYTDGSSFLQEGQRKAGAAVTTETEVIWAGALPAGTSAQRAELIALTQALKMAEGKRLNVYTDSRYAFATAHIHGEIYRRRGWLTSEGREIKNKSEILALLKALFLPKRLSIIHCLGHQKGDSAEARGNRLADQAAREAAIKTPPDTSTLLIAGKRTADGSEFEKRTADGSEFESPKKKAKVE

SEQ ID NO: 2110 - protein, 2092 aa, synthetic construct
MPAAKRVKLDGGDKKYSIGLDIGTNSVGWAVITDEYKVPSKKFKVLGNTDRHSIKKNLIGALLFDSGETAEATRLKRTARRRYTRRKNRICYLQEIFSNEMAKVDDSFFHRLEESFLVEEDKKHERHPIFGNIVDEVAYHEKYPTIYHLRKKLVDSTDKADLRLIYLALAHMIKFRGHFLIEGDLNPDNSDVDKLFIQLVQTYNQLFEENPINASGVDAKAILSARLSKSRRLENLIAQLPGEKKNGLFGNLIALSLGLTPNFKSNFDLAEDAKLQLSKDTYDDDLDNLLAQIGDQYADLFLAAKNLSDAILLSDILRVNTEITKAPLSASMIKRYDEHHQDLTLLKALVRQQLPEKYKEIFFDQSKNGYAGYIDGGASQEEFYKFIKPILEKMDGTEELLVKLNREDLLRKQRTFDNGSIPHQIHLGELHAILRRQEDFYPFLKDNREKIEKILTFRIPYYVGPLARGNSRFAWMTRKSEETITPWNFEEVVDKGASAQSFIERMTNFDKNLPNEKVLPKHSLLYEYFTVYNELTKVKYVTEGMRKPAFLSGEQKKAIVDLLFKTNRKVTVKQLKEDYFKKIECFDSVEISGVEDRFNASLGTYHDLLKIIKDKDFLDNEENEDILEDIVLTLTLFEDREMIEERLKTYAHLFDDKVMKQLKRRRYTGWGRLSRKLINGIRDKQSGKTILDFLKSDGFANRNFMQLIHDDSLTFKEDIQKAQVSGQGDSLHEHIANLAGSPAIKKGILQTVKVVDELVKVMGRHKPENIVIEMARENQTTQKGQKNSRERMKRIEEGIKELGSQILKEHPVENTQLQNEKLYLYYLQNGRDMYVDQELDINRLSDYDVDHIVPQSFLKDDSIDNKVLTRSDKARGKSDNVPSEEVVKKMKNYWRQLLNAKLITQRKFDNLTKAERGGLSELDKAGFIKRQLVETRQITKHVAQILDSRMNTKYDENDKLIREVKVITLKSKLVSDFRKDFQFYKVREINNYHHAHDAYLNAVVGTALIKKYPKLESEFVYGDYKVYDVRKMIAKSEQEIGKATAKYFFYSNIMNFFKTEITLANGEIRKRPLIETNGETGEIVWDKGRDFATVRKVLSMPQVNIVKKTEVQTGGFSKESILPKRNSDKLIARKKDWDPKKYGGFDSPTVAYSVLVVAKVEKGKSKKLKSVKELLGITIMERSSFEKNPIDFLEAKGYKEVKKDLIIKLPKYSLFELENGRKRMLASAGELQKGNELALPSKYVNFLYLASHYEKLKGSPEDNEQKQLFVEQHKHYLDEIIEQISEFSKRVILADANLDKVLSAYNKHRDKPIREQAENIIHLFTLTNLGAPAAFKYFDTTIDRKRYTSTKEVLDATLIHQSITGLYETRIDLSQLGGDGGGGGGGGGGGLGIEDEYRLHETSTEPDVSLGSTWLSDFPQAWAETGGMGLAVRQAPLIIPLKATSTPVSIQQYPMSHEARLGIKPHIQRLLDQGILVPCQSPWNTPLLPVKKPGTNDYRPVQDLREVNKRVEDIHPTVPNPYNLLSGLPPSHQWYTVLDLKDAFFCLRLHPTSQPLFAFEWRDPGMGISGQLTWTRLPQGFKNSPTLFNEALHRDLADFRIQHPDLILLQYVDDILLAATSELDCQQGTRALLQTLGDLGYRASAKKAQICQKQVKYLGYLLREGQRWLTEARKETVMGQPVPKTPRQLREFLGKAGFCRLFIPGFAEMAAPLYPLTKPGTLFSWGPDQQKAYQEIKQALLTAPALGLPDLTKPFELFVDEKQGYAKGVLTQKLGPWRRPVAYLSKKLDPVAAGWPPCLRMVAAIAVLTKDAGKLTMGQPLVILAPHAVEALVKQPPDRWLSNARMTHYQAMLLDTDRVQFGPVVALNPATLLPLPEEGAPHDCLEILAETHGTRPDLTDQPIPDADHTWYTDGSSFLQEGQRKAGAAVTTETEVIWAGALPAGTSAQRAELIALTQALKMAEGKRLNVYTDSRYAFATAHIHGEIYRRRGWLTSEGREIKNKSEILALLKALFLPKRLSIIHCLGHQKGDSAEARGNRLADQAAREAAIKTPPDTSTLLIAGKRTADGSEFEKRTADGSEFESPKKKAKVE

SEQ ID NO: 2111 - protein, 2091 aa, synthetic construct
MPAAKRVKLDGGDKKYSIGLDIGTNSVGWAVITDEYKVPSKKFKVLGNTDRHSIKKNLIGALLFDSGETAEATRLKRTARRRYTRRKNRICYLQEIFSNEMAKVDDSFFHRLEESFLVEEDKKHERHPIFGNIVDEVAYHEKYPTIYHLRKKLVDSTDKADLRLIYLALAHMIKFRGHFLIEGDLNPDNSDVDKLFIQLVQTYNQLFEENPINASGVDAKAILSARLSKSRRLENLIAQLPGEKKNGLFGNLIALSLGLTPNFKSNFDLAEDAKLQLSKDTYDDDLDNLLAQIGDQYADLFLAAKNLSDAILLSDILRVNTEITKAPLSASMIKRYDEHHQDLTLLKALVRQQLPEKYKEIFFDQSKNGYAGYIDGGASQEEFYKFIKPILEKMDGTEELLVKLNREDLLRKQRTFDNGSIPHQIHLGELHAILRRQEDFYPFLKDNREKIEKILTFRIPYYVGPLARGNSRFAWMTRKSEETITPWNFEEVVDKGASAQSFIERMTNFDKNLPNEKVLPKHSLLYEYFTVYNELTKVKYVTEGMRKPAFLSGEQKKAIVDLLFKTNRKVTVKQLKEDYFKKIECFDSVEISGVEDRFNASLGTYHDLLKIIKDKDFLDNEENEDILEDIVLTLTLFEDREMIEERLKTYAHLFDDKVMKQLKRRRYTGWGRLSRKLINGIRDKQSGKTILDFLKSDGFANRNFMQLIHDDSLTFKEDIQKAQVSGQGDSLHEHIANLAGSPAIKKGILQTVKVVDELVKVMGRHKPENIVIEMARENQTTQKGQKNSRERMKRIEEGIKELGSQILKEHPVENTQLQNEKLYLYYLQNGRDMYVDQELDINRLSDYDVDHIVPQSFLKDDSIDNKVLTRSDKARGKSDNVPSEEVVKKMKNYWRQLLNAKLITQRKFDNLTKAERGGLSELDKAGFIKRQLVETRQITKHVAQILDSRMNTKYDENDKLIREVKVITLKSKLVSDFRKDFQFYKVREINNYHHAHDAYLNAVVGTALIKKYPKLESEFVYGDYKVYDVRKMIAKSEQEIGKATAKYFFYSNIMNFFKTEITLANGEIRKRPLIETNGETGEIVWDKGRDFATVRKVLSMPQVNIVKKTEVQTGGFSKESILPKRNSDKLIARKKDWDPKKYGGFDSPTVAYSVLVVAKVEKGKSKKLKSVKELLGITIMERSSFEKNPIDFLEAKGYKEVKKDLIIKLPKYSLFELENGRKRMLASAGELQKGNELALPSKYVNFLYLASHYEKLKGSPEDNEQKQLFVEQHKHYLDEIIEQISEFSKRVILADANLDKVLSAYNKHRDKPIREQAENIIHLFTLTNLGAPAAFKYFDTTIDRKRYTSTKEVLDATLIHQSITGLYETRIDLSQLGGDGGGGGGGGGGLGIEDEYRLHETSTEPDVSLGSTWLSDFPQAWAETGGMGLAVRQAPLIIPLKATSTPVSIQQYPMSHEARLGIKPHIQRLLDQGILVPCQSPWNTPLLPVKKPGTNDYRPVQDLREVNKRVEDIHPTVPNPYNLLSGLPPSHQWYTVLDLKDAFFCLRLHPTSQPLFAFEWRDPGMGISGQLTWTRLPQGFKNSPTLFNEALHRDLADFRIQHPDLILLQYVDDILLAATSELDCQQGTRALLQTLGDLGYRASAKKAQICQKQVKYLGYLLREGQRWLTEARKETVMGQPVPKTPRQLREFLGKAGFCRLFIPGFAEMAAPLYPLTKPGTLFSWGPDQQKAYQEIKQALLTAPALGLPDLTKPFELFVDEKQGYAKGVLTQKLGPWRRPVAYLSKKLDPVAAGWPPCLRMVAAIAVLTKDAGKLTMGQPLVILAPHAVEALVKQPPDRWLSNARMTHYQAMLLDTDRVQFGPVVALNPATLLPLPEEGAPHDCLEILAETHGTRPDLTDQPIPDADHTWYTDGSSFLQEGQRKAGAAVTTETEVIWAGALPAGTSAQRAELIALTQALKMAEGKRLNVYTDSRYAFATAHIHGEIYRRRGWLTSEGREIKNKSEILALLKALFLPKRLSIIHCLGHQKGDSAEARGNRLADQAAREAAIKTPPDTSTLLIAGKRTADGSEFEKRTADGSEFESPKKKAKVE

SEQ ID NO: 2112 - protein, 2096 aa, synthetic construct
MPAAKRVKLDGGDKKYSIGLDIGTNSVGWAVITDEYKVPSKKFKVLGNTDRHSIKKNLIGALLFDSGETAEATRLKRTARRRYTRRKNRICYLQEIFSNEMAKVDDSFFHRLEESFLVEEDKKHERHPIFGNIVDEVAYHEKYPTIYHLRKKLVDSTDKADLRLIYLALAHMIKFRGHFLIEGDLNPDNSDVDKLFIQLVQTYNQLFEENPINASGVDAKAILSARLSKSRRLENLIAQLPGEKKNGLFGNLIALSLGLTPNFKSNFDLAEDAKLQLSKDTYDDDLDNLLAQIGDQYADLFLAAKNLSDAILLSDILRVNTEITKAPLSASMIKRYDEHHQDLTLLKALVRQQLPEKYKEIFFDQSKNGYAGYIDGGASQEEFYKFIKPILEKMDGTEELLVKLNREDLLRKQRTFDNGSIPHQIHLGELHAILRRQEDFYPFLKDNREKIEKILTFRIPYYVGPLARGNSRFAWMTRKSEETITPWNFEEVVDKGASAQSFIERMTNFDKNLPNEKVLPKHSLLYEYFTVYNELTKVKYVTEGMRKPAFLSGEQKKAIVDLLFKTNRKVTVKQLKEDYFKKIECFDSVEISGVEDRFNASLGTYHDLLKIIKDKDFLDNEENEDILEDIVLTLTLFEDREMIEERLKTYAHLFDDKVMKQLKRRRYTGWGRLSRKLINGIRDKQSGKTILDFLKSDGFANRNFMQLIHDDSLTFKEDIQKAQVSGQGDSLHEHIANLAGSPAIKKGILQTVKVVDELVKVMGRHKPENIVIEMARENQTTQKGQKNSRERMKRIEEGIKELGSQILKEHPVENTQLQNEKLYLYYLQNGRDMYVDQELDINRLSDYDVDHIVPQSFLKDDSIDNKVLTRSDKARGKSDNVPSEEVVKKMKNYWRQLLNAKLITQRKFDNLTKAERGGLSELDKAGFIKRQLVETRQITKHVAQILDSRMNTKYDENDKLIREVKVITLKSKLVSDFRKDFQFYKVREINNYHHAHDAYLNAVVGTALIKKYPKLESEFVYGDYKVYDVRKMIAKSEQEIGKATAKYFFYSNIMNFFKTEITLANGEIRKRPLIETNGETGEIVWDKGRDFATVRKVLSMPQVNIVKKTEVQTGGFSKESILPKRNSDKLIARKKDWDPKKYGGFDSPTVAYSVLVVAKVEKGKSKKLKSVKELLGITIMERSSFEKNPIDFLEAKGYKEVKKDLIIKLPKYSLFELENGRKRMLASAGELQKGNELALPSKYVNFLYLASHYEKLKGSPEDNEQKQLFVEQHKHYLDEIIEQISEFSKRVILADANLDKVLSAYNKHRDKPIREQAENIIHLFTLTNLGAPAAFKYFDTTIDRKRYTSTKEVLDATLIHQSITGLYETRIDLSQLGGDGGEAAAKGGSPAPGGLGIEDEYRLHETSTEPDVSLGSTWLSDFPQAWAETGGMGLAVRQAPLIIPLKATSTPVSIQQYPMSHEARLGIKPHIQRLLDQGILVPCQSPWNTPLLPVKKPGTNDYRPVQDLREVNKRVEDIHPTVPNPYNLLSGLPPSHQWYTVLDLKDAFFCLRLHPTSQPLFAFEWRDPGMGISGQLTWTRLPQGFKNSPTLFNEALHRDLADFRIQHPDLILLQYVDDILLAATSELDCQQGTRALLQTLGDLGYRASAKKAQICQKQVKYLGYLLREGQRWLTEARKETVMGQPVPKTPRQLREFLGKAGFCRLFIPGFAEMAAPLYPLTKPGTLFSWGPDQQKAYQEIKQALLTAPALGLPDLTKPFELFVDEKQGYAKGVLTQKLGPWRRPVAYLSKKLDPVAAGWPPCLRMVAAIAVLTKDAGKLTMGQPLVILAPHAVEALVKQPPDRWLSNARMTHYQAMLLDTDRVQFGPVVALNPATLLPLPEEGAPHDCLEILAETHGTRPDLTDQPIPDADHTWYTDGSSFLQEGQRKAGAAVTTETEVIWAGALPAGTSAQRAELIALTQALKMAEGKRLNVYTDSRYAFATAHIHGEIYRRRGWLTSEGREIKNKSEILALLKALFLPKRLSIIHCLGHQKGDSAEARGNRLADQAAREAAIKTPPDTSTLLIAGKRTADGSEFEKRTADGSEFESPKKKAKVE

SEQ ID NO: 2113 - protein, 2088 aa, synthetic construct; identical to SEQ ID NO: 2053

SEQ ID NO: 2114 - protein, 2094 aa, synthetic construct; identical to SEQ ID NO: 2060

SEQ ID NO: 2115 - protein, 2093 aa, synthetic construct
MPAAKRVKLDGGDKKYSIGLDIGTNSVGWAVITDEYKVPSKKFKVLGNTDRHSIKKNLIGALLFDSGETAEATRLKRTARRRYTRRKNRICYLQEIFSNEMAKVDDSFFHRLEESFLVEEDKKHERHPIFGNIVDEVAYHEKYPTIYHLRKKLVDSTDKADLRLIYLALAHMIKFRGHFLIEGDLNPDNSDVDKLFIQLVQTYNQLFEENPINASGVDAKAILSARLSKSRRLENLIAQLPGEKKNGLFGNLIALSLGLTPNFKSNFDLAEDAKLQLSKDTYDDDLDNLLAQIGDQYADLFLAAKNLSDAILLSDILRVNTEITKAPLSASMIKRYDEHHQDLTLLKALVRQQLPEKYKEIFFDQSKNGYAGYIDGGASQEEFYKFIKPILEKMDGTEELLVKLNREDLLRKQRTFDNGSIPHQIHLGELHAILRRQEDFYPFLKDNREKIEKILTFRIPYYVGPLARGNSRFAWMTRKSEETITPWNFEEVVDKGASAQSFIERMTNFDKNLPNEKVLPKHSLLYEYFTVYNELTKVKYVTEGMRKPAFLSGEQKKAIVDLLFKTNRKVTVKQLKEDYFKKIECFDSVEISGVEDRFNASLGTYHDLLKIIKDKDFLDNEENEDILEDIVLTLTLFEDREMIEERLKTYAHLFDDKVMKQLKRRRYTGWGRLSRKLINGIRDKQSGKTILDFLKSDGFANRNFMQLIHDDSLTFKEDIQKAQVSGQGDSLHEHIANLAGSPAIKKGILQTVKVVDELVKVMGRHKPENIVIEMARENQTTQKGQKNSRERMKRIEEGIKELGSQILKEHPVENTQLQNEKLYLYYLQNGRDMYVDQELDINRLSDYDVDHIVPQSFLKDDSIDNKVLTRSDKARGKSDNVPSEEVVKKMKNYWRQLLNAKLITQRKFDNLTKAERGGLSELDKAGFIKRQLVETRQITKHVAQILDSRMNTKYDENDKLIREVKVITLKSKLVSDFRKDFQFYKVREINNYHHAHDAYLNAVVGTALIKKYPKLESEFVYGDYKVYDVRKMIAKSEQEIGKATAKYFFYSNIMNFFKTEITLANGEIRKRPLIETNGETGEIVWDKGRDFATVRKVLSMPQVNIVKKTEVQTGGFSKESILPKRNSDKLIARKKDWDPKKYGGFDSPTVAYSVLVVAKVEKGKSKKLKSVKELLGITIMERSSFEKNPIDFLEAKGYKEVKKDLIIKLPKYSLFELENGRKRMLASAGELQKGNELALPSKYVNFLYLASHYEKLKGSPEDNEQKQLFVEQHKHYLDEIIEQISEFSKRVILADANLDKVLSAYNKHRDKPIREQAENIIHLFTLTNLGAPAAFKYFDTTIDRKRYTSTKEVLDATLIHQSITGLYETRIDLSQLGGDGGGSSEAAAKGGLGIEDEYRLHETSTEPDVSLGSTWLSDFPQAWAETGGMGLAVRQAPLIIPLKATSTPVSIQQYPMSHEARLGIKPHIQRLLDQGILVPCQSPWNTPLLPVKKPGTNDYRPVQDLREVNKRVEDIHPTVPNPYNLLSGLPPSHQWYTVLDLKDAFFCLRLHPTSQPLFAFEWRDPGMGISGQLTWTRLPQGFKNSPTLFNEALHRDLADFRIQHPDLILLQYVDDILLAATSELDCQQGTRALLQTLGDLGYRASAKKAQICQKQVKYLGYLLREGQRWLTEARKETVMGQPVPKTPRQLREFLGKAGFCRLFIPGFAEMAAPLYPLTKPGTLFSWGPDQQKAYQEIKQALLTAPALGLPDLTKPFELFVDEKQGYAKGVLTQKLGPWRRPVAYLSKKLDPVAAGWPPCLRMVAAIAVLTKDAGKLTMGQPLVILAPHAVEALVKQPPDRWLSNARMTHYQAMLLDTDRVQFGPVVALNPATLLPLPEEGAPHDCLEILAETHGTRPDLTDQPIPDADHTWYTDGSSFLQEGQRKAGAAVTTETEVIWAGALPAGTSAQRAELIALTQALKMAEGKRLNVYTDSRYAFATAHIHGEIYRRRGWLTSEGREIKNKSEILALLKALFLPKRLSIIHCLGHQKGDSAEARGNRLADQAAREAAIKTPPDTSTLLIAGKRTADGSEFEKRTADGSEFESPKKKAKVE

SEQ ID NO: 2116 - protein, 2100 aa, synthetic construct
MPAAKRVKLDGGDKKYSIGLDIGTNSVGWAVITDEYKVPSKKFKVLGNTDRHSIKKNLIGALLFDSGETAEATRLKRTARRRYTRRKNRICYLQEIFSNEMAKVDDSFFHRLEESFLVEEDKKHERHPIFGNIVDEVAYHEKYPTIYHLRKKLVDSTDKADLRLIYLALAHMIKFRGHFLIEGDLNPDNSDVDKLFIQLVQTYNQLFEENPINASGVDAKAILSARLSKSRRLENLIAQLPGEKKNGLFGNLIALSLGLTPNFKSNFDLAEDAKLQLSKDTYDDDLDNLLAQIGDQYADLFLAAKNLSDAILLSDILRVNTEITKAPLSASMIKRYDEHHQDLTLLKALVRQQLPEKYKEIFFDQSKNGYAGYIDGGASQEEFYKFIKPILEKMDGTEELLVKLNREDLLRKQRTFDNGSIPHQIHLGELHAILRRQEDFYPFLKDNREKIEKILTFRIPYYVGPLARGNSRFAWMTRKSEETITPWNFEEVVDKGASAQSFIERMTNFDKNLPNEKVLPKHSLLYEYFTVYNELTKVKYVTEGMRKPAFLSGEQKKAIVDLLFKTNRKVTVKQLKEDYFKKIECFDSVEISGVEDRFNASLGTYHDLLKIIKDKDFLDNEENEDILEDIVLTLTLFEDREMIEERLKTYAHLFDDKVMKQLKRRRYTGWGRLSRKLINGIRDKQSGKTILDFLKSDGFANRNFMQLIHDDSLTFKEDIQKAQVSGQGDSLHEHIANLAGSPAIKKGILQTVKVVDELVKVMGRHKPENIVIEMARENQTTQKGQKNSRERMKRIEEGIKELGSQILKEHPVENTQLQNEKLYLYYLQNGRDMYVDQELDINRLSDYDVDHIVPQSFLKDDSIDNKVLTRSDKARGKSDNVPSEEVVKKMKNYWRQLLNAKLITQRKFDNLTKAERGGLSELDKAGFIKRQLVETRQITKHVAQILDSRMNTKYDENDKLIREVKVITLKSKLVSDFRKDFQFYKVREINNYHHAHDAYLNAVVGTALIKKYPKLESEFVYGDYKVYDVRKMIAKSEQEIGKATAKYFFYSNIMNFFKTEITLANGEIRKRPLIETNGETGEIVWDKGRDFATVRKVLSMPQVNIVKKTEVQTGGFSKESILPKRNSDKLIARKKDWDPKKYGGFDSPTVAYSVLVVAKVEKGKSKKLKSVKELLGITIMERSSFEKNPIDFLEAKGYKEVKKDLIIKLPKYSLFELENGRKRMLASAGELQKGNELALPSKYVNFLYLASHYEKLKGSPEDNEQKQLFVEQHKHYLDEIIEQISEFSKRVILADANLDKVLSAYNKHRDKPIREQAENIIHLFTLTNLGAPAAFKYFDTTIDRKRYTSTKEVLDATLIHQSITGLYETRIDLSQLGGDGGGGGGSGGGGSGGGGSGGLGIEDEYRLHETSTEPDVSLGSTWLSDFPQAWAETGGMGLAVRQAPLIIPLKATSTPVSIQQYPMSHEARLGIKPHIQRLLDQGILVPCQSPWNTPLLPVKKPGTNDYRPVQDLREVNKRVEDIHPTVPNPYNLLSGLPPSHQWYTVLDLKDAFFCLRLHPTSQPLFAFEWRDPGMGISGQLTWTRLPQGFKNSPTLFNEALHRDLADFRIQHPDLILLQYVDDILLAATSELDCQQGTRALLQTLGDLGYRASAKKAQICQKQVKYLGYLLREGQRWLTEARKETVMGQPVPKTPRQLREFLGKAGFCRLFIPGFAEMAAPLYPLTKPGTLFSWGPDQQKAYQEIKQALLTAPALGLPDLTKPFELFVDEKQGYAKGVLTQKLGPWRRPVAYLSKKLDPVAAGWPPCLRMVAAIAVLTKDAGKLTMGQPLVILAPHAVEALVKQPPDRWLSNARMTHYQAMLLDTDRVQFGPVVALNPATLLPLPEEGAPHDCLEILAETHGTRPDLTDQPIPDADHTWYTDGSSFLQEGQRKAGAAVTTETEVIWAGALPAGTSAQRAELIALTQALKMAEGKRLNVYTDSRYAFATAHIHGEIYRRRGWLTSEGREIKNKSEILALLKALFLPKRLSIIHCLGHQKGDSAEARGNRLADQAAREAAIKTPPDTSTLLIAGKRTADGSEFEKRTADGSEFESPKKKAKVE

SEQ ID NO: 2117 - protein, 2096 aa, synthetic construct
MPAAKRVKLDGGDKKYSIGLDIGTNSVGWAVITDEYKVPSKKFKVLGNTDRHSIKKNLIGALLFDSGETAEATRLKRTARRRYTRRKNRICYLQEIFSNEMAKVDDSFFHRLEESFLVEEDKKHERHPIFGNIVDEVAYHEKYPTIYHLRKKLVDSTDKADLRLIYLALAHMIKFRGHFLIEGDLNPDNSDVDKLFIQLVQTYNQLFEENPINASGVDAKAILSARLSKSRRLENLIAQLPGEKKNGLFGNLIALSLGLTPNFKSNFDLAEDAKLQLSKDTYDDDLDNLLAQIGDQYADLFLAAKNLSDAILLSDILRVNTEITKAPLSASMIKRYDEHHQDLTLLKALVRQQLPEKYKEIFFDQSKNGYAGYIDGGASQEEFYKFIKPILEKMDGTEELLVKLNREDLLRKQRTFDNGSIPHQIHLGELHAILRRQEDFYPFLKDNREKIEKILTFRIPYYVGPLARGNSRFAWMTRKSEETITPWNFEEVVDKGASAQSFIERMTNFDKNLPNEKVLPKHSLLYEYFTVYNELTKVKYVTEGMRKPAFLSGEQKKAIVDLLFKTNRKVTVKQLKEDYFKKIECFDSVEISGVEDRFNASLGTYHDLLKIIKDKDFLDNEENEDILEDIVLTLTLFEDREMIEERLKTYAHLFDDKVMKQLKRRRYTGWGRLSRKLINGIRDKQSGKTILDFLKSDGFANRNFMQLIHDDSLTFKEDIQKAQVSGQGDSLHEHIANLAGSPAIKKGILQTVKVVDELVKVMGRHKPENIVIEMARENQTTQKGQKNSRERMKRIEEGIKELGSQILKEHPVENTQLQNEKLYLYYLQNGRDMYVDQELDINRLSDYDVDHIVPQSFLKDDSIDNKVLTRSDKARGKSDNVPSEEVVKKMKNYWRQLLNAKLITQRKFDNLTKAERGGLSELDKAGFIKRQLVETRQITKHVAQILDSRMNTKYDENDKLIREVKVITLKSKLVSDFRKDFQFYKVREINNYHHAHDAYLNAVVGTALIKKYPKLESEFVYGDYKVYDVRKMIAKSEQEIGKATAKYFFYSNIMNFFKTEITLANGEIRKRPLIETNGETGEIVWDKGRDFATVRKVLSMPQVNIVKKTEVQTGGFSKESILPKRNSDKLIARKKDWDPKKYGGFDSPTVAYSVLVVAKVEKGKSKKLKSVKELLGITIMERSSFEKNPIDFLEAKGYKEVKKDLIIKLPKYSLFELENGRKRMLASAGELQKGNELALPSKYVNFLYLASHYEKLKGSPEDNEQKQLFVEQHKHYLDEIIEQISEFSKRVILADANLDKVLSAYNKHRDKPIREQAENIIHLFTLTNLGAPAAFKYFDTTIDRKRYTSTKEVLDATLIHQSITGLYETRIDLSQLGGDGGGSSGGSEAAAKGGLGIEDEYRLHETSTEPDVSLGSTWLSDFPQAWAETGGMGLAVRQAPLIIPLKATSTPVSIQQYPMSHEARLGIKPHIQRLLDQGILVPCQSPWNTPLLPVKKPGTNDYRPVQDLREVNKRVEDIHPTVPNPYNLLSGLPPSHQWYTVLDLKDAFFCLRLHPTSQPLFAFEWRDPGMGISGQLTWTRLPQGFKNSPTLFNEALHRDLADFRIQHPDLILLQYVDDILLAATSELDCQQGTRALLQTLGDLGYRASAKKAQICQKQVKYLGYLLREGQRWLTEARKETVMGQPVPKTPRQLREFLGKAGFCRLFIPGFAEMAAPLYPLTKPGTLFSWGPDQQKAYQEIKQALLTAPALGLPDLTKPFELFVDEKQGYAKGVLTQKLGPWRRPVAYLSKKLDPVAAGWPPCLRMVAAIAVLTKDAGKLTMGQPLVILAPHAVEALVKQPPDRWLSNARMTHYQAMLLDTDRVQFGPVVALNPATLLPLPEEGAPHDCLEILAETHGTRPDLTDQPIPDADHTWYTDGSSFLQEGQRKAGAAVTTETEVIWAGALPAGTSAQRAELIALTQALKMAEGKRLNVYTDSRYAFATAHIHGEIYRRRGWLTSEGREIKNKSEILALLKALFLPKRLSIIHCLGHQKGDSAEARGNRLADQAAREAAIKTPPDTSTLLIAGKRTADGSEFEKRTADGSEFESPKKKAKVE

SEQ ID NO: 2118 - protein, 2100 aa, synthetic construct
MPAAKRVKLDGGDKKYSIGLDIGTNSVGWAVITDEYKVPSKKFKVLGNTDRHSIKKNLIGALLFDSGETAEATRLKRTARRRYTRRKNRICYLQEIFSNEMAKVDDSFFHRLEESFLVEEDKKHERHPIFGNIVDEVAYHEKYPTIYHLRKKLVDSTDKADLRLIYLALAHMIKFRGHFLIEGDLNPDNSDVDKLFIQLVQTYNQLFEENPINASGVDAKAILSARLSKSRRLENLIAQLPGEKKNGLFGNLIALSLGLTPNFKSNFDLAEDAKLQLSKDTYDDDLDNLLAQIGDQYADLFLAAKNLSDAILLSDILRVNTEITKAPLSASMIKRYDEHHQDLTLLKALVRQQLPEKYKEIFFDQSKNGYAGYIDGGASQEEFYKFIKPILEKMDGTEELLVKLNREDLLRKQRTFDNGSIPHQIHLGELHAILRRQEDFYPFLKDNREKIEKILTFRIPYYVGPLARGNSRFAWMTRKSEETITPWNFEEVVDKGASAQSFIERMTNFDKNLPNEKVLPKHSLLYEYFTVYNELTKVKYVTEGMRKPAFLSGEQKKAIVDLLFKTNRKVTVKQLKEDYFKKIECFDSVEISGVEDRFNASLGTYHDLLKIIKDKDFLDNEENEDILEDIVLTLTLFEDREMIEERLKTYAHLFDDKVMKQLKRRRYTGWGRLSRKLINGIRDKQSGKTILDFLKSDGFANRNFMQLIHDDSLTFKEDIQKAQVSGQGDSLHEHIANLAGSPAIKKGILQTVKVVDELVKVMGRHKPENIVIEMARENQTTQKGQKNSRERMKRIEEGIKELGSQILKEHPVENTQLQNEKLYLYYLQNGRDMYVDQELDINRLSDYDVDHIVPQSFLKDDSIDNKVLTRSDKARGKSDNVPSEEVVKKMKNYWRQLLNAKLITQRKFDNLTKAERGGLSELDKAGFIKRQLVETRQITKHVAQILDSRMNTKYDENDKLIREVKVITLKSKLVSDFRKDFQFYKVREINNYHHAHDAYLNAVVGTALIKKYPKLESEFVYGDYKVYDVRKMIAKSEQEIGKATAKYFFYSNIMNFFKTEITLANGEIRKRPLIETNGETGEIVWDKGRDFATVRKVLSMPQVNIVKKTEVQTGGFSKESILPKRNSDKLIARKKDWDPKKYGGFDSPTVAYSVLVVAKVEKGKSKKLKSVKELLGITIMERSSFEKNPIDFLEAKGYKEVKKDLIIKLPKYSLFELENGRKRMLASAGELQKGNELALPSKYVNFLYLASHYEKLKGSPEDNEQKQLFVEQHKHYLDEIIEQISEFSKRVILADANLDKVLSAYNKHRDKPIREQAENIIHLFTLTNLGAPAAFKYFDTTIDRKRYTSTKEVLDATLIHQSITGLYETRIDLSQLGGDGGGGSGGSGGSGGSGGSGGLGIEDEYRLHETSTEPDVSLGSTWLSDFPQAWAETGGMGLAVRQAPLIIPLKATSTPVSIQQYPMSHEARLGIKPHIQRLLDQGILVPCQSPWNTPLLPVKKPGTNDYRPVQDLREVNKRVEDIHPTVPNPYNLLSGLPPSHQWYTVLDLKDAFFCLRLHPTSQPLFAFEWRDPGMGISGQLTWTRLPQGFKNSPTLFNEALHRDLADFRIQHPDLILLQYVDDILLAATSELDCQQGTRALLQTLGDLGYRASAKKAQICQKQVKYLGYLLREGQRWLTEARKETVMGQPVPKTPRQLREFLGKAGFCRLFIPGFAEMAAPLYPLTKPGTLFSWGPDQQKAYQEIKQALLTAPALGLPDLTKPFELFVDEKQGYAKGVLTQKLGPWRRPVAYLSKKLDPVAAGWPPCLRMVAAIAVLTKDAGKLTMGQPLVILAPHAVEALVKQPPDRWLSNARMTHYQAMLLDTDRVQFGPVVALNPATLLPLPEEGAPHDCLEILAETHGTRPDLTDQPIPDADHTWYTDGSSFLQEGQRKAGAAVTTETEVIWAGALPAGTSAQRAELIALTQALKMAEGKRLNVYTDSRYAFATAHIHGEIYRRRGWLTSEGREIKNKSEILALLKALFLPKRLSIIHCLGHQKGDSAEARGNRLADQAAREAAIKTPPDTSTLLIAGKRTADGSEFEKRTADGSEFESPKKKAKVE

SEQ ID NO: 2119 - protein, 2096 aa, synthetic construct
MPAAKRVKLDGGDKKYSIGLDIGTNSVGWAVITDEYKVPSKKFKVLGNTDRHSIKKNLIGALLFDSGETAEATRLKRTARRRYTRRKNRICYLQEIFSNEMAKVDDSFFHRLEESFLVEEDKKHERHPIFGNIVDEVAYHEKYPTIYHLRKKLVDSTDKADLRLIYLALAHMIKFRGHFLIEGDLNPDNSDVDKLFIQLVQTYNQLFEENPINASGVDAKAILSARLSKSRRLENLIAQLPGEKKNGLFGNLIALSLGLTPNFKSNFDLAEDAKLQLSKDTYDDDLDNLLAQIGDQYADLFLAAKNLSDAILLSDILRVNTEITKAPLSASMIKRYDEHHQDLTLLKALVRQQLPEKYKEIFFDQSKNGYAGYIDGGASQEEFYKFIKPILEKMDGTEELLVKLNREDLLRKQRTFDNGSIPHQIHLGELHAILRRQEDFYPFLKDNREKIEKILTFRIPYYVGPLARGNSRFAWMTRKSEETITPWNFEEVVDKGASAQSFIERMTNFDKNLPNEKVLPKHSLLYEYFTVYNELTKVKYVTEGMRKPAFLSGEQKKAIVDLLFKTNRKVTVKQLKEDYFKKIECFDSVEISGVEDRFNASLGTYHDLLKIIKDKDFLDNEENEDILEDIVLTLTLFEDREMIEERLKTYAHLFDDKVMKQLKRRRYTGWGRLSRKLINGIRDKQSGKTILDFLKSDGFANRNFMQLIHDDSLTFKEDIQKAQVSGQGDSLHEHIANLAGSPAIKKGILQTVKVVDELVKVMGRHKPENIVIEMARENQTTQKGQKNSRERMKRIEEGIKELGSQILKEHPVENTQLQNEKLYLYYLQNGRDMYVDQELDINRLSDYDVDHIVPQSFLKDDSIDNKVLTRSDKARGKSDNVPSEEVVKKMKNYWRQLLNAKLITQRKFDNLTKAERGGLSELDKAGFIKRQLVETRQITKHVAQILDSRMNTKYDENDKLIREVKVITLKSKLVSDFRKDFQFYKVREINNYHHAHDAYLNAVVGTALIKKYPKLESEFVYGDYKVYDVRKMIAKSEQEIGKATAKYFFYSNIMNFFKTEITLANGEIRKRPLIETNGETGEIVWDKGRDFATVRKVLSMPQVNIVKKTEVQTGGFSKESILPKRNSDKLIARKKDWDPKKYGGFDSPTVAYSVLVVAKVEKGKSKKLKSVKELLGITIMERSSFEKNPIDFLEAKGYKEVKKDLIIKLPKYSLFELENGRKRMLASAGELQKGNELALPSKYVNFLYLASHYEKLKGSPEDNEQKQLFVEQHKHYLDEIIEQISEFSKRVILADANLDKVLSAYNKHRDKPIREQAENIIHLFTLTNLGAPAAFKYFDTTIDRKRYTSTKEVLDATLIHQSITGLYETRIDLSQLGGDGGEAAAKGSSGGSGGLGIEDEYRLHETSTEPDVSLGSTWLSDFPQAWAETGGMGLAVRQAPLIIPLKATSTPVSIQQYPMSHEARLGIKPHIQRLLDQGILVPCQSPWNTPLLPVKKPGTNDYRPVQDLREVNKRVEDIHPTVPNPYNLLSGLPPSHQWYTVLDLKDAFFCLRLHPTSQPLFAFEWRDPGMGISGQLTWTRLPQGFKNSPTLFNEALHRDLADFRIQHPDLILLQYVDDILLAATSELDCQQGTRALLQTLGDLGYRASAKKAQICQKQVKYLGYLLREGQRWLTEARKETVMGQPVPKTPRQLREFLGKAGFCRLFIPGFAEMAAPLYPLTKPGTLFSWGPDQQKAYQEIKQALLTAPALGLPDLTKPFELFVDEKQGYAKGVLTQKLGPWRRPVAYLSKKLDPVAAGWPPCLRMVAAIAVLTKDAGKLTMGQPLVILAPHAVEALVKQPPDRWLSNARMTHYQAMLLDTDRVQFGPVVALNPATLLPLPEEGAPHDCLEILAETHGTRPDLTDQPIPDADHTWYTDGSSFLQEGQRKAGAAVTTETEVIWAGALPAGTSAQRAELIALTQALKMAEGKRLNVYTDSRYAFATAHIHGEIYRRRGWLTSEGREIKNKSEILALLKALFLPKRLSIIHCLGHQKGDSAEARGNRLADQAAREAAIKTPPDTSTLLIAGKRTADGSEFEKRTADGSEFESPKKKAKVE

SEQ ID NO: 2120 - protein, 2096 aa, synthetic construct
MPAAKRVKLDGGDKKYSIGLDIGTNSVGWAVITDEYKVPSKKFKVLGNTDRHSIKKNLIGALLFDSGETAEATRLKRTARRRYTRRKNRICYLQEIFSNEMAKVDDSFFHRLEESFLVEEDKKHERHPIFGNIVDEVAYHEKYPTIYHLRKKLVDSTDKADLRLIYLALAHMIKFRGHFLIEGDLNPDNSDVDKLFIQLVQTYNQLFEENPINASGVDAKAILSARLSKSRRLENLIAQLPGEKKNGLFGNLIALSLGLTPNFKSNFDLAEDAKLQLSKDTYDDDLDNLLAQIGDQYADLFLAAKNLSDAILLSDILRVNTEITKAPLSASMIKRYDEHHQDLTLLKALVRQQLPEKYKEIFFDQSKNGYAGYIDGGASQEEFYKFIKPILEKMDGTEELLVKLNREDLLRKQRTFDNGSIPHQIHLGELHAILRRQEDFYPFLKDNREKIEKILTFRIPYYVGPLARGNSRFAWMTRKSEETITPWNFEEVVDKGASAQSFIERMTNFDKNLPNEKVLPKHSLLYEYFTVYNELTKVKYVTEGMRKPAFLSGEQKKAIVDLLFKTNRKVTVKQLKEDYFKKIECFDSVEISGVEDRFNASLGTYHDLLKIIKDKDFLDNEENEDILEDIVLTLTLFEDREMIEERLKTYAHLFDDKVMKQLKRRRYTGWGRLSRKLINGIRDKQSGKTILDFLKSDGFANRNFMQLIHDDSLTFKEDIQKAQVSGQGDSLHEHIANLAGSPAIKKGILQTVKVVDELVKVMGRHKPENIVIEMARENQTTQKGQKNSRERMKRIEEGIKELGSQILKEHPVENTQLQNEKLYLYYLQNGRDMYVDQELDINRLSDYDVDHIVPQSFLKDDSIDNKVLTRSDKARGKSDNVPSEEVVKKMKNYWRQLLNAKLITQRKFDNLTKAERGGLSELDKAGFIKRQLVETRQITKHVAQILDSRMNTKYDENDKLIREVKVITLKSKLVSDFRKDFQFYKVREINNYHHAHDAYLNAVVGTALIKKYPKLESEFVYGDYKVYDVRKMIAKSEQEIGKATAKYFFYSNIMNFFKTEITLANGEIRKRPLIETNGETGEIVWDKGRDFATVRKVLSMPQVNIVKKTEVQTGGFSKESILPKRNSDKLIARKKDWDPKKYGGFDSPTVAYSVLVVAKVEKGKSKKLKSVKELLGITIMERSSFEKNPIDFLEAKGYKEVKKDLIIKLPKYSLFELENGRKRMLASAGELQKGNELALPSKYVNFLYLASHYEKLKGSPEDNEQKQLFVEQHKHYLDEIIEQISEFSKRVILADANLDKVLSAYNKHRDKPIREQAENIIHLFTLTNLGAPAAFKYFDTTIDRKRYTSTKEVLDATLIHQSITGLYETRIDLSQLGGDGGPAPEAAAKGGGGGLGIEDEYRLHETSTEPDVSLGSTWLSDFPQAWAETGGMGLAVRQAPLIIPLKATSTPVSIQQYPMSHEARLGIKPHIQRLLDQGILVPCQSPWNTPLLPVKKPGTNDYRPVQDLREVNKRVEDIHPTVPNPYNLLSGLPPSHQWYTVLDLKDAFFCLRLHPTSQPLFAFEWRDPGMGISGQLTWTRLPQGFKNSPTLFNEALHRDLADFRIQHPDLILLQYVDDILLAATSELDCQQGTRALLQTLGDLGYRASAKKAQICQKQVKYLGYLLREGQRWLTEARKETVMGQPVPKTPRQLREFLGKAGFCRLFIPGFAEMAAPLYPLTKPGTLFSWGPDQQKAYQEIKQALLTAPALGLPDLTKPFELFVDEKQGYAKGVLTQKLGPWRRPVAYLSKKLDPVAAGWPPCLRMVAAIAVLTKDAGKLTMGQPLVILAPHAVEALVKQPPDRWLSNARMTHYQAMLLDTDRVQFGPVVALNPATLLPLPEEGAPHDCLEILAETHGTRPDLTDQPIPDADHTWYTDGSSFLQEGQRKAGAAVTTETEVIWAGALPAGTSAQRAELIALTQALKMAEGKRLNVYTDSRYAFATAHIHGEIYRRRGWLTSEGREIKNKSEILALLKALFLPKRLSIIHCLGHQKGDSAEARGNRLADQAAREAAIKTPPDTSTLLIAGKRTADGSEFEKRTADGSEFESPKKKAKVE

SEQ ID NO: 2121 - protein, 2101 aa, synthetic construct
MPAAKRVKLDGGDKKYSIGLDIGTNSVGWAVITDEYKVPSKKFKVLGNTDRHSIKKNLIGALLFDSGETAEATRLKRTARRRYTRRKNRICYLQEIFSNEMAKVDDSFFHRLEESFLVEEDKKHERHPIFGNIVDEVAYHEKYPTIYHLRKKLVDSTDKADLRLIYLALAHMIKFRGHFLIEGDLNPDNSDVDKLFIQLVQTYNQLFEENPINASGVDAKAILSARLSKSRRLENLIAQLPGEKKNGLFGNLIALSLGLTPNFKSNFDLAEDAKLQLSKDTYDDDLDNLLAQIGDQYADLFLAAKNLSDAILLSDILRVNTEITKAPLSASMIKRYDEHHQDLTLLKALVRQQLPEKYKEIFFDQSKNGYAGYIDGGASQEEFYKFIKPILEKMDGTEELLVKLNREDLLRKQRTFDNGSIPHQIHLGELHAILRRQEDFYPFLKDNREKIEKILTFRIPYYVGPLARGNSRFAWMTRKSEETITPWNFEEVVDKGASAQSFIERMTNFDKNLPNEKVLPKHSLLYEYFTVYNELTKVKYVTEGMRKPAFLSGEQKKAIVDLLFKTNRKVTVKQLKEDYFKKIECFDSVEISGVEDRFNASLGTYHDLLKIIKDKDFLDNEENEDILEDIVLTLTLFEDREMIEERLKTYAHLFDDKVMKQLKRRRYTGWGRLSRKLINGIRDKQSGKTILDFLKSDGFANRNFMQLIHDDSLTFKEDIQKAQVSGQGDSLHEHIANLAGSPAIKKGILQTVKVVDELVKVMGRHKPENIVIEMARENQTTQKGQKNSRERMKRIEEGIKELGSQILKEHPVENTQLQNEKLYLYYLQNGRDMYVDQELDINRLSDYDVDHIVPQSFLKDDSIDNKVLTRSDKARGKSDNVPSEEVVKKMKNYWRQLLNAKLITQRKFDNLTKAERGGLSELDKAGFIKRQLVETRQITKHVAQILDSRMNTKYDENDKLIREVKVITLKSKLVSDFRKDFQFYKVREINNYHHAHDAYLNAVVGTALIKKYPKLESEFVYGDYKVYDVRKMIAKSEQEIGKATAKYFFYSNIMNFFKTEITLANGEIRKRPLIETNGETGEIVWDKGRDFATVRKVLSMPQVNIVKKTEVQTGGFSKESILPKRNSDKLIARKKDWDPKKYGGFDSPTVAYSVLVVAKVEKGKSKKLKSVKELLGITIMERSSFEKNPIDFLEAKGYKEVKKDLIIKLPKYSLFELENGRKRMLASAGELQKGNELALPSKYVNFLYLASHYEKLKGSPEDNEQKQLFVEQHKHYLDEIIEQISEFSKRVILADANLDKVLSAYNKHRDKPIREQAENIIHLFTLTNLGAPAAFKYFDTTIDRKRYTSTKEVLDATLIHQSITGLYETRIDLSQLGGDGGSGSETPGTSESATPESGGLGIEDEYRLHETSTEPDVSLGSTWLSDFPQAWAETGGMGLAVRQAPLIIPLKATSTPVSIQQYPMSHEARLGIKPHIQRLLDQGILVPCQSPWNTPLLPVKKPGTNDYRPVQDLREVNKRVEDIHPTVPNPYNLLSGLPPSHQWYTVLDLKDAFFCLRLHPTSQPLFAFEWRDPGMGISGQLTWTRLPQGFKNSPTLFNEALHRDLADFRIQHPDLILLQYVDDILLAATSELDCQQGTRALLQTLGDLGYRASAKKAQICQKQVKYLGYLLREGQRWLTEARKETVMGQPVPKTPRQLREFLGKAGFCRLFIPGFAEMAAPLYPLTKPGTLFSWGPDQQKAYQEIKQALLTAPALGLPDLTKPFELFVDEKQGYAKGVLTQKLGPWRRPVAYLSKKLDPVAAGWPPCLRMVAAIAVLTKDAGKLTMGQPLVILAPHAVEALVKQPPDRWLSNARMTHYQAMLLDTDRVQFGPVVALNPATLLPLPEEGAPHDCLEILAETHGTRPDLTDQPIPDADHTWYTDGSSFLQEGQRKAGAAVTTETEVIWAGALPAGTSAQRAELIALTQALKMAEGKRLNVYTDSRYAFATAHIHGEIYRRRGWLTSEGREIKNKSEILALLKALFLPKRLSIIHCLGHQKGDSAEARGNRLADQAAREAAIKTPPDTSTLLIAGKRTADGSEFEKRTADGSEFESPKKKAKVE

SEQ ID NO: 2122 - protein, 2094 aa, synthetic construct; identical to SEQ ID NO: 2058

SEQ ID NO: 2123 - protein, 2096 aa, synthetic construct; identical to SEQ ID NO: 2054

SEQ ID NO: 2124 - protein, 2091 aa, synthetic construct
MPAAKRVKLDGGDKKYSIGLDIGTNSVGWAVITDEYKVPSKKFKVLGNTDRHSIKKNLIGALLFDSGETAEATRLKRTARRRYTRRKNRICYLQEIFSNEMAKVDDSFFHRLEESFLVEEDKKHERHPIFGNIVDEVAYHEKYPTIYHLRKKLVDSTDKADLRLIYLALAHMIKFRGHFLIEGDLNPDNSDVDKLFIQLVQTYNQLFEENPINASGVDAKAILSARLSKSRRLENLIAQLPGEKKNGLFGNLIALSLGLTPNFKSNFDLAEDAKLQLSKDTYDDDLDNLLAQIGDQYADLFLAAKNLSDAILLSDILRVNTEITKAPLSASMIKRYDEHHQDLTLLKALVRQQLPEKYKEIFFDQSKNGYAGYIDGGASQEEFYKFIKPILEKMDGTEELLVKLNREDLLRKQRTFDNGSIPHQIHLGELHAILRRQEDFYPFLKDNREKIEKILTFRIPYYVGPLARGNSRFAWMTRKSEETITPWNFEEVVDKGASAQSFIERMTNFDKNLPNEKVLPKHSLLYEYFTVYNELTKVKYVTEGMRKPAFLSGEQKKAIVDLLFKTNRKVTVKQLKEDYFKKIECFDSVEISGVEDRFNASLGTYHDLLKIIKDKDFLDNEENEDILEDIVLTLTLFEDREMIEERLKTYAHLFDDKVMKQLKRRRYTGWGRLSRKLINGIRDKQSGKTILDFLKSDGFANRNFMQLIHDDSLTFKEDIQKAQVSGQGDSLHEHIANLAGSPAIKKGILQTVKVVDELVKVMGRHKPENIVIEMARENQTTQKGQKNSRERMKRIEEGIKELGSQILKEHPVENTQLQNEKLYLYYLQNGRDMYVDQELDINRLSDYDVDHIVPQSFLKDDSIDNKVLTRSDKARGKSDNVPSEEVVKKMKNYWRQLLNAKLITQRKFDNLTKAERGGLSELDKAGFIKRQLVETRQITKHVAQILDSRMNTKYDENDKLIREVKVITLKSKLVSDFRKDFQFYKVREINNYHHAHDAYLNAVVGTALIKKYPKLESEFVYGDYKVYDVRKMIAKSEQEIGKATAKYFFYSNIMNFFKTEITLANGEIRKRPLIETNGETGEIVWDKGRDFATVRKVLSMPQVNIVKKTEVQTGGFSKESILPKRNSDKLIARKKDWDPKKYGGFDSPTVAYSVLVVAKVEKGKSKKLKSVKELLGITIMERSSFEKNPIDFLEAKGYKEVKKDLIIKLPKYSLFELENGRKRMLASAGELQKGNELALPSKYVNFLYLASHYEKLKGSPEDNEQKQLFVEQHKHYLDEIIEQISEFSKRVILADANLDKVLSAYNKHRDKPIREQAENIIHLFTLTNLGAPAAFKYFDTTIDRKRYTSTKEVLDATLIHQSITGLYETRIDLSQLGGDGGGSSPAPGGLGIEDEYRLHETSTEPDVSLGSTWLSDFPQAWAETGGMGLAVRQAPLIIPLKATSTPVSIQQYPMSHEARLGIKPHIQRLLDQGILVPCQSPWNTPLLPVKKPGTNDYRPVQDLREVNKRVEDIHPTVPNPYNLLSGLPPSHQWYTVLDLKDAFFCLRLHPTSQPLFAFEWRDPGMGISGQLTWTRLPQGFKNSPTLFNEALHRDLADFRIQHPDLILLQYVDDILLAATSELDCQQGTRALLQTLGDLGYRASAKKAQICQKQVKYLGYLLREGQRWLTEARKETVMGQPVPKTPRQLREFLGKAGFCRLFIPGFAEMAAPLYPLTKPGTLFSWGPDQQKAYQEIKQALLTAPALGLPDLTKPFELFVDEKQGYAKGVLTQKLGPWRRPVAYLSKKLDPVAAGWPPCLRMVAAIAVLTKDAGKLTMGQPLVILAPHAVEALVKQPPDRWLSNARMTHYQAMLLDTDRVQFGPVVALNPATLLPLPEEGAPHDCLEILAETHGTRPDLTDQPIPDADHTWYTDGSSFLQEGQRKAGAAVTTETEVIWAGALPAGTSAQRAELIALTQALKMAEGKRLNVYTDSRYAFATAHIHGEIYRRRGWLTSEGREIKNKSEILALLKALFLPKRLSIIHCLGHQKGDSAEARGNRLADQAAREAAIKTPPDTSTLLIAGKRTADGSEFEKRTADGSEFESPKKKAKVE

SEQ ID NO: 2125 - protein, 2090 aa, synthetic construct
MPAAKRVKLDGGDKKYSIGLDIGTNSVGWAVITDEYKVPSKKFKVLGNTDRHSIKKNLIGALLFDSGETAEATRLKRTARRRYTRRKNRICYLQEIFSNEMAKVDDSFFHRLEESFLVEEDKKHERHPIFGNIVDEVAYHEKYPTIYHLRKKLVDSTDKADLRLIYLALAHMIKFRGHFLIEGDLNPDNSDVDKLFIQLVQTYNQLFEENPINASGVDAKAILSARLSKSRRLENLIAQLPGEKKNGLFGNLIALSLGLTPNFKSNFDLAEDAKLQLSKDTYDDDLDNLLAQIGDQYADLFLAAKNLSDAILLSDILRVNTEITKAPLSASMIKRYDEHHQDLTLLKALVRQQLPEKYKEIFFDQSKNGYAGYIDGGASQEEFYKFIKPILEKMDGTEELLVKLNREDLLRKQRTFDNGSIPHQIHLGELHAILRRQEDFYPFLKDNREKIEKILTFRIPYYVGPLARGNSRFAWMTRKSEETITPWNFEEVVDKGASAQSFIERMTNFDKNLPNEKVLPKHSLLYEYFTVYNELTKVKYVTEGMRKPAFLSGEQKKAIVDLLFKTNRKVTVKQLKEDYFKKIECFDSVEISGVEDRFNASLGTYHDLLKIIKDKDFLDNEENEDILEDIVLTLTLFEDREMIEERLKTYAHLFDDKVMKQLKRRRYTGWGRLSRKLINGIRDKQSGKTILDFLKSDGFANRNFMQLIHDDSLTFKEDIQKAQVSGQGDSLHEHIANLAGSPAIKKGILQTVKVVDELVKVMGRHKPENIVIEMARENQTTQKGQKNSRERMKRIEEGIKELGSQILKEHPVENTQLQNEKLYLYYLQNGRDMYVDQELDINRLSDYDVDHIVPQSFLKDDSIDNKVLTRSDKARGKSDNVPSEEVVKKMKNYWRQLLNAKLITQRKFDNLTKAERGGLSELDKAGFIKRQLVETRQITKHVAQILDSRMNTKYDENDKLIREVKVITLKSKLVSDFRKDFQFYKVREINNYHHAHDAYLNAVVGTALIKKYPKLESEFVYGDYKVYDVRKMIAKSEQEIGKATAKYFFYSNIMNFFKTEITLANGEIRKRPLIETNGETGEIVWDKGRDFATVRKVLSMPQVNIVKKTEVQTGGFSKESILPKRNSDKLIARKKDWDPKKYGGFDSPTVAYSVLVVAKVEKGKSKKLKSVKELLGITIMERSSFEKNPIDFLEAKGYKEVKKDLIIKLPKYSLFELENGRKRMLASAGELQKGNELALPSKYVNFLYLASHYEKLKGSPEDNEQKQLFVEQHKHYLDEIIEQISEFSKRVILADANLDKVLSAYNKHRDKPIREQAENIIHLFTLTNLGAPAAFKYFDTTIDRKRYTSTKEVLDATLIHQSITGLYETRIDLSQLGGDGGGGGGSGGLGIEDEYRLHETSTEPDVSLGSTWLSDFPQAWAETGGMGLAVRQAPLIIPLKATSTPVSIQQYPMSHEARLGIKPHIQRLLDQGILVPCQSPWNTPLLPVKKPGTNDYRPVQDLREVNKRVEDIHPTVPNPYNLLSGLPPSHQWYTVLDLKDAFFCLRLHPTSQPLFAFEWRDPGMGISGQLTWTRLPQGFKNSPTLFNEALHRDLADFRIQHPDLILLQYVDDILLAATSELDCQQGTRALLQTLGDLGYRASAKKAQICQKQVKYLGYLLREGQRWLTEARKETVMGQPVPKTPRQLREFLGKAGFCRLFIPGFAEMAAPLYPLTKPGTLFSWGPDQQKAYQEIKQALLTAPALGLPDLTKPFELFVDEKQGYAKGVLTQKLGPWRRPVAYLSKKLDPVAAGWPPCLRMVAAIAVLTKDAGKLTMGQPLVILAPHAVEALVKQPPDRWLSNARMTHYQAMLLDTDRVQFGPVVALNPATLLPLPEEGAPHDCLEILAETHGTRPDLTDQPIPDADHTWYTDGSSFLQEGQRKAGAAVTTETEVIWAGALPAGTSAQRAELIALTQALKMAEGKRLNVYTDSRYAFATAHIHGEIYRRRGWLTSEGREIKNKSEILALLKALFLPKRLSIIHCLGHQKGDSAEARGNRLADQAAREAAIKTPPDTSTLLIAGKRTADGSEFEKRTADGSEFESPKKKAKVE

SEQ ID NO: 2126 - protein, 2096 aa, synthetic construct; identical to SEQ ID NO: 2052

SEQ ID NO: 2127 - protein, 2091 aa, synthetic construct
MPAAKRVKLDGGDKKYSIGLDIGTNSVGWAVITDEYKVPSKKFKVLGNTDRHSIKKNLIGALLFDSGETAEATRLKRTARRRYTRRKNRICYLQEIFSNEMAKVDDSFFHRLEESFLVEEDKKHERHPIFGNIVDEVAYHEKYPTIYHLRKKLVDSTDKADLRLIYLALAHMIKFRGHFLIEGDLNPDNSDVDKLFIQLVQTYNQLFEENPINASGVDAKAILSARLSKSRRLENLIAQLPGEKKNGLFGNLIALSLGLTPNFKSNFDLAEDAKLQLSKDTYDDDLDNLLAQIGDQYADLFLAAKNLSDAILLSDILRVNTEITKAPLSASMIKRYDEHHQDLTLLKALVRQQLPEKYKEIFFDQSKNGYAGYIDGGASQEEFYKFIKPILEKMDGTEELLVKLNREDLLRKQRTFDNGSIPHQIHLGELHAILRRQEDFYPFLKDNREKIEKILTFRIPYYVGPLARGNSRFAWMTRKSEETITPWNFEEVVDKGASAQSFIERMTNFDKNLPNEKVLPKHSLLYEYFTVYNELTKVKYVTEGMRKPAFLSGEQKKAIVDLLFKTNRKVTVKQLKEDYFKKIECFDSVEISGVEDRFNASLGTYHDLLKIIKDKDFLDNEENEDILEDIVLTLTLFEDREMIEERLKTYAHLFDDKVMKQLKRRRYTGWGRLSRKLINGIRDKQSGKTILDFLKSDGFANRNFMQLIHDDSLTFKEDIQKAQVSGQGDSLHEHIANLAGSPAIKKGILQTVKVVDELVKVMGRHKPENIVIEMARENQTTQKGQKNSRERMKRIEEGIKELGSQILKEHPVENTQLQNEKLYLYYLQNGRDMYVDQELDINRLSDYDVDHIVPQSFLKDDSIDNKVLTRSDKARGKSDNVPSEEVVKKMKNYWRQLLNAKLITQRKFDNLTKAERGGLSELDKAGFIKRQLVETRQITKHVAQILDSRMNTKYDENDKLIREVKVITLKSKLVSDFRKDFQFYKVREINNYHHAHDAYLNAVVGTALIKKYPKLESEFVYGDYKVYDVRKMIAKSEQEIGKATAKYFFYSNIMNFFKTEITLANGEIRKRPLIETNGETGEIVWDKGRDFATVRKVLSMPQVNIVKKTEVQTGGFSKESILPKRNSDKLIARKKDWDPKKYGGFDSPTVAYSVLVVAKVEKGKSKKLKSVKELLGITIMERSSFEKNPIDFLEAKGYKEVKKDLIIKLPKYSLFELENGRKRMLASAGELQKGNELALPSKYVNFLYLASHYEKLKGSPEDNEQKQLFVEQHKHYLDEIIEQISEFSKRVILADANLDKVLSAYNKHRDKPIREQAENIIHLFTLTNLGAPAAFKYFDTTIDRKRYTSTKEVLDATLIHQSITGLYETRIDLSQLGGDGGGGGPAPGGLGIEDEYRLHETSTEPDVSLGSTWLSDFPQAWAETGGMGLAVRQAPLIIPLKATSTPVSIQQYPMSHEARLGIKPHIQRLLDQGILVPCQSPWNTPLLPVKKPGTNDYRPVQDLREVNKRVEDIHPTVPNPYNLLSGLPPSHQWYTVLDLKDAFFCLRLHPTSQPLFAFEWRDPGMGISGQLTWTRLPQGFKNSPTLFNEALHRDLADFRIQHPDLILLQYVDDILLAATSELDCQQGTRALLQTLGDLGYRASAKKAQICQKQVKYLGYLLREGQRWLTEARKETVMGQPVPKTPRQLREFLGKAGFCRLFIPGFAEMAAPLYPLTKPGTLFSWGPDQQKAYQEIKQALLTAPALGLPDLTKPFELFVDEKQGYAKGVLTQKLGPWRRPVAYLSKKLDPVAAGWPPCLRMVAAIAVLTKDAGKLTMGQPLVILAPHAVEALVKQPPDRWLSNARMTHYQAMLLDTDRVQFGPVVALNPATLLPLPEEGAPHDCLEILAETHGTRPDLTDQPIPDADHTWYTDGSSFLQEGQRKAGAAVTTETEVIWAGALPAGTSAQRAELIALTQALKMAEGKRLNVYTDSRYAFATAHIHGEIYRRRGWLTSEGREIKNKSEILALLKALFLPKRLSIIHCLGHQKGDSAEARGNRLADQAAREAAIKTPPDTSTLLIAGKRTADGSEFEKRTADGSEFESPKKKAKVE

SEQ ID NO: 2128 - protein, 2095 aa, synthetic construct
MPAAKRVKLDGGDKKYSIGLDIGTNSVGWAVITDEYKVPSKKFKVLGNTDRHSIKKNLIGALLFDSGETAEATRLKRTARRRYTRRKNRICYLQEIFSNEMAKVDDSFFHRLEESFLVEEDKKHERHPIFGNIVDEVAYHEKYPTIYHLRKKLVDSTDKADLRLIYLALAHMIKFRGHFLIEGDLNPDNSDVDKLFIQLVQTYNQLFEENPINASGVDAKAILSARLSKSRRLENLIAQLPGEKKNGLFGNLIALSLGLTPNFKSNFDLAEDAKLQLSKDTYDDDLDNLLAQIGDQYADLFLAAKNLSDAILLSDILRVNTEITKAPLSASMIKRYDEHHQDLTLLKALVRQQLPEKYKEIFFDQSKNGYAGYIDGGASQEEFYKFIKPILEKMDGTEELLVKLNREDLLRKQRTFDNGSIPHQIHLGELHAILRRQEDFYPFLKDNREKIEKILTFRIPYYVGPLARGNSRFAWMTRKSEETITPWNFEEVVDKGASAQSFIERMTNFDKNLPNEKVLPKHSLLYEYFTVYNELTKVKYVTEGMRKPAFLSGEQKKAIVDLLFKTNRKVTVKQLKEDYFKKIECFDSVEISGVEDRFNASLGTYHDLLKIIKDKDFLDNEENEDILEDIVLTLTLFEDREMIEERLKTYAHLFDDKVMKQLKRRRYTGWGRLSRKLINGIRDKQSGKTILDFLKSDGFANRNFMQLIHDDSLTFKEDIQKAQVSGQGDSLHEHIANLAGSPAIKKGILQTVKVVDELVKVMGRHKPENIVIEMARENQTTQKGQKNSRERMKRIEEGIKELGSQILKEHPVENTQLQNEKLYLYYLQNGRDMYVDQELDINRLSDYDVDHIVPQSFLKDDSIDNKVLTRSDKARGKSDNVPSEEVVKKMKNYWRQLLNAKLITQRKFDNLTKAERGGLSELDKAGFIKRQLVETRQITKHVAQILDSRMNTKYDENDKLIREVKVITLKSKLVSDFRKDFQFYKVREINNYHHAHDAYLNAVVGTALIKKYPKLESEFVYGDYKVYDVRKMIAKSEQEIGKATAKYFFYSNIMNFFKTEITLANGEIRKRPLIETNGETGEIVWDKGRDFATVRKVLSMPQVNIVKKTEVQTGGFSKESILPKRNSDKLIARKKDWDPKKYGGFDSPTVAYSVLVVAKVEKGKSKKLKSVKELLGITIMERSSFEKNPIDFLEAKGYKEVKKDLIIKLPKYSLFELENGRKRMLASAGELQKGNELALPSKYVNFLYLASHYEKLKGSPEDNEQKQLFVEQHKHYLDEIIEQISEFSKRVILADANLDKVLSAYNKHRDKPIREQAENIIHLFTLTNLGAPAAFKYFDTTIDRKRYTSTKEVLDATLIHQSITGLYETRIDLSQLGGDGGEAAAKEAAAKGGLGIEDEYRLHETSTEPDVSLGSTWLSDFPQAWAETGGMGLAVRQAPLIIPLKATSTPVSIQQYPMSHEARLGIKPHIQRLLDQGILVPCQSPWNTPLLPVKKPGTNDYRPVQDLREVNKRVEDIHPTVPNPYNLLSGLPPSHQWYTVLDLKDAFFCLRLHPTSQPLFAFEWRDPGMGISGQLTWTRLPQGFKNSPTLFNEALHRDLADFRIQHPDLILLQYVDDILLAATSELDCQQGTRALLQTLGDLGYRASAKKAQICQKQVKYLGYLLREGQRWLTEARKETVMGQPVPKTPRQLREFLGKAGFCRLFIPGFAEMAAPLYPLTKPGTLFSWGPDQQKAYQEIKQALLTAPALGLPDLTKPFELFVDEKQGYAKGVLTQKLGPWRRPVAYLSKKLDPVAAGWPPCLRMVAAIAVLTKDAGKLTMGQPLVILAPHAVEALVKQPPDRWLSNARMTHYQAMLLDTDRVQFGPVVALNPATLLPLPEEGAPHDCLEILAETHGTRPDLTDQPIPDADHTWYTDGSSFLQEGQRKAGAAVTTETEVIWAGALPAGTSAQRAELIALTQALKMAEGKRLNVYTDSRYAFATAHIHGEIYRRRGWLTSEGREIKNKSEILALLKALFLPKRLSIIHCLGHQKGDSAEARGNRLADQAAREAAIKTPPDTSTLLIAGKRTADGSEFEKRTADGSEFESPKKKAKVE

SEQ ID NO: 2129 - protein, 2096 aa, synthetic construct; identical to SEQ ID NO: 2059

SEQ ID NO: 2130 - protein, 2096 aa, synthetic construct
MPAAKRVKLDGGDKKYSIGLDIGTNSVGWAVITDEYKVPSKKFKVLGNTDRHSIKKNLIGALLFDSGETAEATRLKRTARRRYTRRKNRICYLQEIFSNEMAKVDDSFFHRLEESFLVEEDKKHERHPIFGNIVDEVAYHEKYPTIYHLRKKLVDSTDKADLRLIYLALAHMIKFRGHFLIEGDLNPDNSDVDKLFIQLVQTYNQLFEENPINASGVDAKAILSARLSKSRRLENLIAQLPGEKKNGLFGNLIALSLGLTPNFKSNFDLAEDAKLQLSKDTYDDDLDNLLAQIGDQYADLFLAAKNLSDAILLSDILRVNTEITKAPLSASMIKRYDEHHQDLTLLKALVRQQLPEKYKEIFFDQSKNGYAGYIDGGASQEEFYKFIKPILEKMDGTEELLVKLNREDLLRKQRTFDNGSIPHQIHLGELHAILRRQEDFYPFLKDNREKIEKILTFRIPYYVGPLARGNSRFAWMTRKSEETITPWNFEEVVDKGASAQSFIERMTNFDKNLPNEKVLPKHSLLYEYFTVYNELTKVKYVTEGMRKPAFLSGEQKKAIVDLLFKTNRKVTVKQLKEDYFKKIECFDSVEISGVEDRFNASLGTYHDLLKIIKDKDFLDNEENEDILEDIVLTLTLFEDREMIEERLKTYAHLFDDKVMKQLKRRRYTGWGRLSRKLINGIRDKQSGKTILDFLKSDGFANRNFMQLIHDDSLTFKEDIQKAQVSGQGDSLHEHIANLAGSPAIKKGILQTVKVVDELVKVMGRHKPENIVIEMARENQTTQKGQKNSRERMKRIEEGIKELGSQILKEHPVENTQLQNEKLYLYYLQNGRDMYVDQELDINRLSDYDVDHIVPQSFLKDDSIDNKVLTRSDKARGKSDNVPSEEVVKKMKNYWRQLLNAKLITQRKFDNLTKAERGGLSELDKAGFIKRQLVETRQITKHVAQILDSRMNTKYDENDKLIREVKVITLKSKLVSDFRKDFQFYKVREINNYHHAHDAYLNAVVGTALIKKYPKLESEFVYGDYKVYDVRKMIAKSEQEIGKATAKYFFYSNIMNFFKTEITLANGEIRKRPLIETNGETGEIVWDKGRDFATVRKVLSMPQVNIVKKTEVQTGGFSKESILPKRNSDKLIARKKDWDPKKYGGFDSPTVAYSVLVVAKVEKGKSKKLKSVKELLGITIMERSSFEKNPIDFLEAKGYKEVKKDLIIKLPKYSLFELENGRKRMLASAGELQKGNELALPSKYVNFLYLASHYEKLKGSPEDNEQKQLFVEQHKHYLDEIIEQISEFSKRVILADANLDKVLSAYNKHRDKPIREQAENIIHLFTLTNLGAPAAFKYFDTTIDRKRYTSTKEVLDATLIHQSITGLYETRIDLSQLGGDGGEAAAKPAPGGGGGLGIEDEYRLHETSTEPDVSLGSTWLSDFPQAWAETGGMGLAVRQAPLIIPLKATSTPVSIQQYPMSHEARLGIKPHIQRLLDQGILVPCQSPWNTPLLPVKKPGTNDYRPVQDLREVNKRVEDIHPTVPNPYNLLSGLPPSHQWYTVLDLKDAFFCLRLHPTSQPLFAFEWRDPGMGISGQLTWTRLPQGFKNSPTLFNEALHRDLADFRIQHPDLILLQYVDDILLAATSELDCQQGTRALLQTLGDLGYRASAKKAQICQKQVKYLGYLLREGQRWLTEARKETVMGQPVPKTPRQLREFLGKAGFCRLFIPGFAEMAAPLYPLTKPGTLFSWGPDQQKAYQEIKQALLTAPALGLPDLTKPFELFVDEKQGYAKGVLTQKLGPWRRPVAYLSKKLDPVAAGWPPCLRMVAAIAVLTKDAGKLTMGQPLVILAPHAVEALVKQPPDRWLSNARMTHYQAMLLDTDRVQFGPVVALNPATLLPLPEEGAPHDCLEILAETHGTRPDLTDQPIPDADHTWYTDGSSFLQEGQRKAGAAVTTETEVIWAGALPAGTSAQRAELIALTQALKMAEGKRLNVYTDSRYAFATAHIHGEIYRRRGWLTSEGREIKNKSEILALLKALFLPKRLSIIHCLGHQKGDSAEARGNRLADQAAREAAIKTPPDTSTLLIAGKRTADGSEFEKRTADGSEFESPKKKAKVE

SEQ ID NO: 2131 - protein, 2088 aa, synthetic construct
MPAAKRVKLDGGDKKYSIGLDIGTNSVGWAVITDEYKVPSKKFKVLGNTDRHSIKKNLIGALLFDSGETAEATRLKRTARRRYTRRKNRICYLQEIFSNEMAKVDDSFFHRLEESFLVEEDKKHERHPIFGNIVDEVAYHEKYPTIYHLRKKLVDSTDKADLRLIYLALAHMIKFRGHFLIEGDLNPDNSDVDKLFIQLVQTYNQLFEENPINASGVDAKAILSARLSKSRRLENLIAQLPGEKKNGLFGNLIALSLGLTPNFKSNFDLAEDAKLQLSKDTYDDDLDNLLAQIGDQYADLFLAAKNLSDAILLSDILRVNTEITKAPLSASMIKRYDEHHQDLTLLKALVRQQLPEKYKEIFFDQSKNGYAGYIDGGASQEEFYKFIKPILEKMDGTEELLVKLNREDLLRKQRTFDNGSIPHQIHLGELHAILRRQEDFYPFLKDNREKIEKILTFRIPYYVGPLARGNSRFAWMTRKSEETITPWNFEEVVDKGASAQSFIERMTNFDKNLPNEKVLPKHSLLYEYFTVYNELTKVKYVTEGMRKPAFLSGEQKKAIVDLLFKTNRKVTVKQLKEDYFKKIECFDSVEISGVEDRFNASLGTYHDLLKIIKDKDFLDNEENEDILEDIVLTLTLFEDREMIEERLKTYAHLFDDKVMKQLKRRRYTGWGRLSRKLINGIRDKQSGKTILDFLKSDGFANRNFMQLIHDDSLTFKEDIQKAQVSGQGDSLHEHIANLAGSPAIKKGILQTVKVVDELVKVMGRHKPENIVIEMARENQTTQKGQKNSRERMKRIEEGIKELGSQILKEHPVENTQLQNEKLYLYYLQNGRDMYVDQELDINRLSDYDVDHIVPQSFLKDDSIDNKVLTRSDKARGKSDNVPSEEVVKKMKNYWRQLLNAKLITQRKFDNLTKAERGGLSELDKAGFIKRQLVETRQITKHVAQILDSRMNTKYDENDKLIREVKVITLKSKLVSDFRKDFQFYKVREINNYHHAHDAYLNAVVGTALIKKYPKLESEFVYGDYKVYDVRKMIAKSEQEIGKATAKYFFYSNIMNFFKTEITLANGEIRKRPLIETNGETGEIVWDKGRDFATVRKVLSMPQVNIVKKTEVQTGGFSKESILPKRNSDKLIARKKDWDPKKYGGFDSPTVAYSVLVVAKVEKGKSKKLKSVKELLGITIMERSSFEKNPIDFLEAKGYKEVKKDLIIKLPKYSLFELENGRKRMLASAGELQKGNELALPSKYVNFLYLASHYEKLKGSPEDNEQKQLFVEQHKHYLDEIIEQISEFSKRVILADANLDKVLSAYNKHRDKPIREQAENIIHLFTLTNLGAPAAFKYFDTTIDRKRYTSTKEVLDATLIHQSITGLYETRIDLSQLGGDGGGGSGGLGIEDEYRLHETSTEPDVSLGSTWLSDFPQAWAETGGMGLAVRQAPLIIPLKATSTPVSIQQYPMSHEARLGIKPHIQRLLDQGILVPCQSPWNTPLLPVKKPGTNDYRPVQDLREVNKRVEDIHPTVPNPYNLLSGLPPSHQWYTVLDLKDAFFCLRLHPTSQPLFAFEWRDPGMGISGQLTWTRLPQGFKNSPTLFNEALHRDLADFRIQHPDLILLQYVDDILLAATSELDCQQGTRALLQTLGDLGYRASAKKAQICQKQVKYLGYLLREGQRWLTEARKETVMGQPVPKTPRQLREFLGKAGFCRLFIPGFAEMAAPLYPLTKPGTLFSWGPDQQKAYQEIKQALLTAPALGLPDLTKPFELFVDEKQGYAKGVLTQKLGPWRRPVAYLSKKLDPVAAGWPPCLRMVAAIAVLTKDAGKLTMGQPLVILAPHAVEALVKQPPDRWLSNARMTHYQAMLLDTDRVQFGPVVALNPATLLPLPEEGAPHDCLEILAETHGTRPDLTDQPIPDADHTWYTDGSSFLQEGQRKAGAAVTTETEVIWAGALPAGTSAQRAELIALTQALKMAEGKRLNVYTDSRYAFATAHIHGEIYRRRGWLTSEGREIKNKSEILALLKALFLPKRLSIIHCLGHQKGDSAEARGNRLADQAAREAAIKTPPDTSTLLIAGKRTADGSEFEKRTADGSEFESPKKKAKVE

SEQ ID NO: 2132 - protein, 2096 aa, synthetic construct
MPAAKRVKLDGGDKKYSIGLDIGTNSVGWAVITDEYKVPSKKFKVLGNTDRHSIKKNLIGALLFDSGETAEATRLKRTARRRYTRRKNRICYLQEIFSNEMAKVDDSFFHRLEESFLVEEDKKHERHPIFGNIVDEVAYHEKYPTIYHLRKKLVDSTDKADLRLIYLALAHMIKFRGHFLIEGDLNPDNSDVDKLFIQLVQTYNQLFEENPINASGVDAKAILSARLSKSRRLENLIAQLPGEKKNGLFGNLIALSLGLTPNFKSNFDLAEDAKLQLSKDTYDDDLDNLLAQIGDQYADLFLAAKNLSDAILLSDILRVNTEITKAPLSASMIKRYDEHHQDLTLLKALVRQQLPEKYKEIFFDQSKNGYAGYIDGGASQEEFYKFIKPILEKMDGTEELLVKLNREDLLRKQRTFDNGSIPHQIHLGELHAILRRQEDFYPFLKDNREKIEKILTFRIPYYVGPLARGNSRFAWMTRKSEETITPWNFEEVVDKGASAQSFIERMTNFDKNLPNEKVLPKHSLLYEYFTVYNELTKVKYVTEGMRKPAFLSGEQKKAIVDLLFKTNRKVTVKQLKEDYFKKIECFDSVEISGVEDRFNASLGTYHDLLKIIKDKDFLDNEENEDILEDIVLTLTLFEDREMIEERLKTYAHLFDDKVMKQLKRRRYTGWGRLSRKLINGIRDKQSGKTILDFLKSDGFANRNFMQLIHDDSLTFKEDIQKAQVSGQGDSLHEHIANLAGSPAIKKGILQTVKVVDELVKVMGRHKPENIVIEMARENQTTQKGQKNSRERMKRIEEGIKELGSQILKEHPVENTQLQNEKLYLYYLQNGRDMYVDQELDINRLSDYDVDHIVPQSFLKDDSIDNKVLTRSDKARGKSDNVPSEEVVKKMKNYWRQLLNAKLITQRKFDNLTKAERGGLSELDKAGFIKRQLVETRQITKHVAQILDSRMNTKYDENDKLIREVKVITLKSKLVSDFRKDFQFYKVREINNYHHAHDAYLNAVVGTALIKKYPKLESEFVYGDYKVYDVRKMIAKSEQEIGKATAKYFFYSNIMNFFKTEITLANGEIRKRPLIETNGETGEIVWDKGRDFATVRKVLSMPQVNIVKKTEVQTGGFSKESILPKRNSDKLIARKKDWDPKKYGGFDSPTVAYSVLVVAKVEKGKSKKLKSVKELLGITIMERSSFEKNPIDFLEAKGYKEVKKDLIIKLPKYSLFELENGRKRMLASAGELQKGNELALPSKYVNFLYLASHYEKLKGSPEDNEQKQLFVEQHKHYLDEIIEQISEFSKRVILADANLDKVLSAYNKHRDKPIREQAENIIHLFTLTNLGAPAAFKYFDTTIDRKRYTSTKEVLDATLIHQSITGLYETRIDLSQLGGDGGGGGEAAAKGGSGGLGIEDEYRLHETSTEPDVSLGSTWLSDFPQAWAETGGMGLAVRQAPLIIPLKATSTPVSIQQYPMSHEARLGIKPHIQRLLDQGILVPCQSPWNTPLLPVKKPGTNDYRPVQDLREVNKRVEDIHPTVPNPYNLLSGLPPSHQWYTVLDLKDAFFCLRLHPTSQPLFAFEWRDPGMGISGQLTWTRLPQGFKNSPTLFNEALHRDLADFRIQHPDLILLQYVDDILLAATSELDCQQGTRALLQTLGDLGYRASAKKAQICQKQVKYLGYLLREGQRWLTEARKETVMGQPVPKTPRQLREFLGKAGFCRLFIPGFAEMAAPLYPLTKPGTLFSWGPDQQKAYQEIKQALLTAPALGLPDLTKPFELFVDEKQGYAKGVLTQKLGPWRRPVAYLSKKLDPVAAGWPPCLRMVAAIAVLTKDAGKLTMGQPLVILAPHAVEALVKQPPDRWLSNARMTHYQAMLLDTDRVQFGPVVALNPATLLPLPEEGAPHDCLEILAETHGTRPDLTDQPIPDADHTWYTDGSSFLQEGQRKAGAAVTTETEVIWAGALPAGTSAQRAELIALTQALKMAEGKRLNVYTDSRYAFATAHIHGEIYRRRGWLTSEGREIKNKSEILALLKALFLPKRLSIIHCLGHQKGDSAEARGNRLADQAAREAAIKTPPDTSTLLIAGKRTADGSEFEKRTADGSEFESPKKKAKVE

SEQ ID NO: 2133 - protein, 2094 aa, synthetic construct
MPAAKRVKLDGGDKKYSIGLDIGTNSVGWAVITDEYKVPSKKFKVLGNTDRHSIKKNLIGALLFDSGETAEATRLKRTARRRYTRRKNRICYLQEIFSNEMAKVDDSFFHRLEESFLVEEDKKHERHPIFGNIVDEVAYHEKYPTIYHLRKKLVDSTDKADLRLIYLALAHMIKFRGHFLIEGDLNPDNSDVDKLFIQLVQTYNQLFEENPINASGVDAKAILSARLSKSRRLENLIAQLPGEKKNGLFGNLIALSLGLTPNFKSNFDLAEDAKLQLSKDTYDDDLDNLLAQIGDQYADLFLAAKNLSDAILLSDILRVNTEITKAPLSASMIKRYDEHHQDLTLLKALVRQQLPEKYKEIFFDQSKNGYAGYIDGGASQEEFYKFIKPILEKMDGTEELLVKLNREDLLRKQRTFDNGSIPHQIHLGELHAILRRQEDFYPFLKDNREKIEKILTFRIPYYVGPLARGNSRFAWMTRKSEETITPWNFEEVVDKGASAQSFIERMTNFDKNLPNEKVLPKHSLLYEYFTVYNELTKVKYVTEGMRKPAFLSGEQKKAIVDLLFKTNRKVTVKQLKEDYFKKIECFDSVEISGVEDRFNASLGTYHDLLKIIKDKDFLDNEENEDILEDIVLTLTLFEDREMIEERLKTYAHLFDDKVMKQLKRRRYTGWGRLSRKLINGIRDKQSGKTILDFLKSDGFANRNFMQLIHDDSLTFKEDIQKAQVSGQGDSLHEHIANLAGSPAIKKGILQTVKVVDELVKVMGRHKPENIVIEMARENQTTQKGQKNSRERMKRIEEGIKELGSQILKEHPVENTQLQNEKLYLYYLQNGRDMYVDQELDINRLSDYDVDHIVPQSFLKDDSIDNKVLTRSDKARGKSDNVPSEEVVKKMKNYWRQLLNAKLITQRKFDNLTKAERGGLSELDKAGFIKRQLVETRQITKHVAQILDSRMNTKYDENDKLIREVKVITLKSKLVSDFRKDFQFYKVREINNYHHAHDAYLNAVVGTALIKKYPKLESEFVYGDYKVYDVRKMIAKSEQEIGKATAKYFFYSNIMNFFKTEITLANGEIRKRPLIETNGETGEIVWDKGRDFATVRKVLSMPQVNIVKKTEVQTGGFSKESILPKRNSDKLIARKKDWDPKKYGGFDSPTVAYSVLVVAKVEKGKSKKLKSVKELLGITIMERSSFEKNPIDFLEAKGYKEVKKDLIIKLPKYSLFELENGRKRMLASAGELQKGNELALPSKYVNFLYLASHYEKLKGSPEDNEQKQLFVEQHKHYLDEIIEQISEFSKRVILADANLDKVLSAYNKHRDKPIREQAENIIHLFTLTNLGAPAAFKYFDTTIDRKRYTSTKEVLDATLIHQSITGLYETRIDLSQLGGDGGGGGGGSPAPGGLGIEDEYRLHETSTEPDVSLGSTWLSDFPQAWAETGGMGLAVRQAPLIIPLKATSTPVSIQQYPMSHEARLGIKPHIQRLLDQGILVPCQSPWNTPLLPVKKPGTNDYRPVQDLREVNKRVEDIHPTVPNPYNLLSGLPPSHQWYTVLDLKDAFFCLRLHPTSQPLFAFEWRDPGMGISGQLTWTRLPQGFKNSPTLFNEALHRDLADFRIQHPDLILLQYVDDILLAATSELDCQQGTRALLQTLGDLGYRASAKKAQICQKQVKYLGYLLREGQRWLTEARKETVMGQPVPKTPRQLREFLGKAGFCRLFIPGFAEMAAPLYPLTKPGTLFSWGPDQQKAYQEIKQALLTAPALGLPDLTKPFELFVDEKQGYAKGVLTQKLGPWRRPVAYLSKKLDPVAAGWPPCLRMVAAIAVLTKDAGKLTMGQPLVILAPHAVEALVKQPPDRWLSNARMTHYQAMLLDTDRVQFGPVVALNPATLLPLPEEGAPHDCLEILAETHGTRPDLTDQPIPDADHTWYTDGSSFLQEGQRKAGAAVTTETEVIWAGALPAGTSAQRAELIALTQALKMAEGKRLNVYTDSRYAFATAHIHGEIYRRRGWLTSEGREIKNKSEILALLKALFLPKRLSIIHCLGHQKGDSAEARGNRLADQAAREAAIKTPPDTSTLLIAGKRTADGSEFEKRTADGSEFESPKKKAKVE

SEQ ID NO: 2134 - protein, 2091 aa, synthetic construct
MPAAKRVKLDGGDKKYSIGLDIGTNSVGWAVITDEYKVPSKKFKVLGNTDRHSIKKNLIGALLFDSGETAEATRLKRTARRRYTRRKNRICYLQEIFSNEMAKVDDSFFHRLEESFLVEEDKKHERHPIFGNIVDEVAYHEKYPTIYHLRKKLVDSTDKADLRLIYLALAHMIKFRGHFLIEGDLNPDNSDVDKLFIQLVQTYNQLFEENPINASGVDAKAILSARLSKSRRLENLIAQLPGEKKNGLFGNLIALSLGLTPNFKSNFDLAEDAKLQLSKDTYDDDLDNLLAQIGDQYADLFLAAKNLSDAILLSDILRVNTEITKAPLSASMIKRYDEHHQDLTLLKALVRQQLPEKYKEIFFDQSKNGYAGYIDGGASQEEFYKFIKPILEKMDGTEELLVKLNREDLLRKQRTFDNGSIPHQIHLGELHAILRRQEDFYPFLKDNREKIEKILTFRIPYYVGPLARGNSRFAWMTRKSEETITPWNFEEVVDKGASAQSFIERMTNFDKNLPNEKVLPKHSLLYEYFTVYNELTKVKYVTEGMRKPAFLSGEQKKAIVDLLFKTNRKVTVKQLKEDYFKKIECFDSVEISGVEDRFNASLGTYHDLLKIIKDKDFLDNEENEDILEDIVLTLTLFEDREMIEERLKTYAHLFDDKVMKQLKRRRYTGWGRLSRKLINGIRDKQSGKTILDFLKSDGFANRNFMQLIHDDSLTFKEDIQKAQVSGQGDSLHEHIANLAGSPAIKKGILQTVKVVDELVKVMGRHKPENIVIEMARENQTTQKGQKNSRERMKRIEEGIKELGSQILKEHPVENTQLQNEKLYLYYLQNGRDMYVDQELDINRLSDYDVDHIVPQSFLKDDSIDNKVLTRSDKARGKSDNVPSEEVVKKMKNYWRQLLNAKLITQRKFDNLTKAERGGLSELDKAGFIKRQLVETRQITKHVAQILDSRMNTKYDENDKLIREVKVITLKSKLVSDFRKDFQFYKVREINNYHHAHDAYLNAVVGTALIKKYPKLESEFVYGDYKVYDVRKMIAKSEQEIGKATAKYFFYSNIMNFFKTEITLANGEIRKRPLIETNGETGEIVWDKGRDFATVRKVLSMPQVNIVKKTEVQTGGFSKESILPKRNSDKLIARKKDWDPKKYGGFDSPTVAYSVLVVAKVEKGKSKKLKSVKELLGITIMERSSFEKNPIDFLEAKGYKEVKKDLIIKLPKYSLFELENGRKRMLASAGELQKGNELALPSKYVNFLYLASHYEKLKGSPEDNEQKQLFVEQHKHYLDEIIEQISEFSKRVILADANLDKVLSAYNKHRDKPIREQAENIIHLFTLTNLGAPAAFKYFDTTIDRKRYTSTKEVLDATLIHQSITGLYETRIDLSQLGGDGGPAPGGGGGLGIEDEYRLHETSTEPDVSLGSTWLSDFPQAWAETGGMGLAVRQAPLIIPLKATSTPVSIQQYPMSHEARLGIKPHIQRLLDQGILVPCQSPWNTPLLPVKKPGTNDYRPVQDLREVNKRVEDIHPTVPNPYNLLSGLPPSHQWYTVLDLKDAFFCLRLHPTSQPLFAFEWRDPGMGISGQLTWTRLPQGFKNSPTLFNEALHRDLADFRIQHPDLILLQYVDDILLAATSELDCQQGTRALLQTLGDLGYRASAKKAQICQKQVKYLGYLLREGQRWLTEARKETVMGQPVPKTPRQLREFLGKAGFCRLFIPGFAEMAAPLYPLTKPGTLFSWGPDQQKAYQEIKQALLTAPALGLPDLTKPFELFVDEKQGYAKGVLTQKLGPWRRPVAYLSKKLDPVAAGWPPCLRMVAAIAVLTKDAGKLTMGQPLVILAPHAVEALVKQPPDRWLSNARMTHYQAMLLDTDRVQFGPVVALNPATLLPLPEEGAPHDCLEILAETHGTRPDLTDQPIPDADHTWYTDGSSFLQEGQRKAGAAVTTETEVIWAGALPAGTSAQRAELIALTQALKMAEGKRLNVYTDSRYAFATAHIHGEIYRRRGWLTSEGREIKNKSEILALLKALFLPKRLSIIHCLGHQKGDSAEARGNRLADQAAREAAIKTPPDTSTLLIAGKRTADGSEFEKRTADGSEFESPKKKAKVE

SEQ ID NO: 2135 - protein, 2096 aa, synthetic construct
MPAAKRVKLDGGDKKYSIGLDIGTNSVGWAVITDEYKVPSKKFKVLGNTDRHSIKKNLIGALLFDSGETAEATRLKRTARRRYTRRKNRICYLQEIFSNEMAKVDDSFFHRLEESFLVEEDKKHERHPIFGNIVDEVAYHEKYPTIYHLRKKLVDSTDKADLRLIYLALAHMIKFRGHFLIEGDLNPDNSDVDKLFIQLVQTYNQLFEENPINASGVDAKAILSARLSKSRRLENLIAQLPGEKKNGLFGNLIALSLGLTPNFKSNFDLAEDAKLQLSKDTYDDDLDNLLAQIGDQYADLFLAAKNLSDAILLSDILRVNTEITKAPLSASMIKRYDEHHQDLTLLKALVRQQLPEKYKEIFFDQSKNGYAGYIDGGASQEEFYKFIKPILEKMDGTEELLVKLNREDLLRKQRTFDNGSIPHQIHLGELHAILRRQEDFYPFLKDNREKIEKILTFRIPYYVGPLARGNSRFAWMTRKSEETITPWNFEEVVDKGASAQSFIERMTNFDKNLPNEKVLPKHSLLYEYFTVYNELTKVKYVTEGMRKPAFLSGEQKKAIVDLLFKTNRKVTVKQLKEDYFKKIECFDSVEISGVEDRFNASLGTYHDLLKIIKDKDFLDNEENEDILEDIVLTLTLFEDREMIEERLKTYAHLFDDKVMKQLKRRRYTGWGRLSRKLINGIRDKQSGKTILDFLKSDGFANRNFMQLIHDDSLTFKEDIQKAQVSGQGDSLHEHIANLAGSPAIKKGILQTVKVVDELVKVMGRHKPENIVIEMARENQTTQKGQKNSRERMKRIEEGIKELGSQILKEHPVENTQLQNEKLYLYYLQNGRDMYVDQELDINRLSDYDVDHIVPQSFLKDDSIDNKVLTRSDKARGKSDNVPSEEVVKKMKNYWRQLLNAKLITQRKFDNLTKAERGGLSELDKAGFIKRQLVETRQITKHVAQILDSRMNTKYDENDKLIREVKVITLKSKLVSDFRKDFQFYKVREINNYHHAHDAYLNAVVGTALIKKYPKLESEFVYGDYKVYDVRKMIAKSEQEIGKATAKYFFYSNIMNFFKTEITLANGEIRKRPLIETNGETGEIVWDKGRDFATVRKVLSMPQVNIVKKTEVQTGGFSKESILPKRNSDKLIARKKDWDPKKYGGFDSPTVAYSVLVVAKVEKGKSKKLKSVKELLGITIMERSSFEKNPIDFLEAKGYKEVKKDLIIKLPKYSLFELENGRKRMLASAGELQKGNELALPSKYVNFLYLASHYEKLKGSPEDNEQKQLFVEQHKHYLDEIIEQISEFSKRVILADANLDKVLSAYNKHRDKPIREQAENIIHLFTLTNLGAPAAFKYFDTTIDRKRYTSTKEVLDATLIHQSITGLYETRIDLSQLGGDGGGGGEAAAKPAPGGLGIEDEYRLHETSTEPDVSLGSTWLSDFPQAWAETGGMGLAVRQAPLIIPLKATSTPVSIQQYPMSHEARLGIKPHIQRLLDQGILVPCQSPWNTPLLPVKKPGTNDYRPVQDLREVNKRVEDIHPTVPNPYNLLSGLPPSHQWYTVLDLKDAFFCLRLHPTSQPLFAFEWRDPGMGISGQLTWTRLPQGFKNSPTLFNEALHRDLADFRIQHPDLILLQYVDDILLAATSELDCQQGTRALLQTLGDLGYRASAKKAQICQKQVKYLGYLLREGQRWLTEARKETVMGQPVPKTPRQLREFLGKAGFCRLFIPGFAEMAAPLYPLTKPGTLFSWGPDQQKAYQEIKQALLTAPALGLPDLTKPFELFVDEKQGYAKGVLTQKLGPWRRPVAYLSKKLDPVAAGWPPCLRMVAAIAVLTKDAGKLTMGQPLVILAPHAVEALVKQPPDRWLSNARMTHYQAMLLDTDRVQFGPVVALNPATLLPLPEEGAPHDCLEILAETHGTRPDLTDQPIPDADHTWYTDGSSFLQEGQRKAGAAVTTETEVIWAGALPAGTSAQRAELIALTQALKMAEGKRLNVYTDSRYAFATAHIHGEIYRRRGWLTSEGREIKNKSEILALLKALFLPKRLSIIHCLGHQKGDSAEARGNRLADQAAREAAIKTPPDTSTLLIAGKRTADGSEFEKRTADGSEFESPKKKAKVE

SEQ ID NO: 2136 - protein, 2091 aa, synthetic construct
MPAAKRVKLDGGDKKYSIGLDIGTNSVGWAVITDEYKVPSKKFKVLGNTDRHSIKKNLIGALLFDSGETAEATRLKRTARRRYTRRKNRICYLQEIFSNEMAKVDDSFFHRLEESFLVEEDKKHERHPIFGNIVDEVAYHEKYPTIYHLRKKLVDSTDKADLRLIYLALAHMIKFRGHFLIEGDLNPDNSDVDKLFIQLVQTYNQLFEENPINASGVDAKAILSARLSKSRRLENLIAQLPGEKKNGLFGNLIALSLGLTPNFKSNFDLAEDAKLQLSKDTYDDDLDNLLAQIGDQYADLFLAAKNLSDAILLSDILRVNTEITKAPLSASMIKRYDEHHQDLTLLKALVRQQLPEKYKEIFFDQSKNGYAGYIDGGASQEEFYKFIKPILEKMDGTEELLVKLNREDLLRKQRTFDNGSIPHQIHLGELHAILRRQEDFYPFLKDNREKIEKILTFRIPYYVGPLARGNSRFAWMTRKSEETITPWNFEEVVDKGASAQSFIERMTNFDKNLPNEKVLPKHSLLYEYFTVYNELTKVKYVTEGMRKPAFLSGEQKKAIVDLLFKTNRKVTVKQLKEDYFKKIECFDSVEISGVEDRFNASLGTYHDLLKIIKDKDFLDNEENEDILEDIVLTLTLFEDREMIEERLKTYAHLFDDKVMKQLKRRRYTGWGRLSRKLINGIRDKQSGKTILDFLKSDGFANRNFMQLIHDDSLTFKEDIQKAQVSGQGDSLHEHIANLAGSPAIKKGILQTVKVVDELVKVMGRHKPENIVIEMARENQTTQKGQKNSRERMKRIEEGIKELGSQILKEHPVENTQLQNEKLYLYYLQNGRDMYVDQELDINRLSDYDVDHIVPQSFLKDDSIDNKVLTRSDKARGKSDNVPSEEVVKKMKNYWRQLLNAKLITQRKFDNLTKAERGGLSELDKAGFIKRQLVETRQITKHVAQILDSRMNTKYDENDKLIREVKVITLKSKLVSDFRKDFQFYKVREINNYHHAHDAYLNAVVGTALIKKYPKLESEFVYGDYKVYDVRKMIAKSEQEIGKATAKYFFYSNIMNFFKTEITLANGEIRKRPLIETNGETGEIVWDKGRDFATVRKVLSMPQVNIVKKTEVQTGGFSKESILPKRNSDKLIARKKDWDPKKYGGFDSPTVAYSVLVVAKVEKGKSKKLKSVKELLGITIMERSSFEKNPIDFLEAKGYKEVKKDLIIKLPKYSLFELENGRKRMLASAGELQKGNELALPSKYVNFLYLASHYEKLKGSPEDNEQKQLFVEQHKHYLDEIIEQISEFSKRVILADANLDKVLSAYNKHRDKPIREQAENIIHLFTLTNLGAPAAFKYFDTTIDRKRYTSTKEVLDATLIHQSITGLYETRIDLSQLGGDGGGGSPAPGGLGIEDEYRLHETSTEPDVSLGSTWLSDFPQAWAETGGMGLAVRQAPLIIPLKATSTPVSIQQYPMSHEARLGIKPHIQRLLDQGILVPCQSPWNTPLLPVKKPGTNDYRPVQDLREVNKRVEDIHPTVPNPYNLLSGLPPSHQWYTVLDLKDAFFCLRLHPTSQPLFAFEWRDPGMGISGQLTWTRLPQGFKNSPTLFNEALHRDLADFRIQHPDLILLQYVDDILLAATSELDCQQGTRALLQTLGDLGYRASAKKAQICQKQVKYLGYLLREGQRWLTEARKETVMGQPVPKTPRQLREFLGKAGFCRLFIPGFAEMAAPLYPLTKPGTLFSWGPDQQKAYQEIKQALLTAPALGLPDLTKPFELFVDEKQGYAKGVLTQKLGPWRRPVAYLSKKLDPVAAGWPPCLRMVAAIAVLTKDAGKLTMGQPLVILAPHAVEALVKQPPDRWLSNARMTHYQAMLLDTDRVQFGPVVALNPATLLPLPEEGAPHDCLEILAETHGTRPDLTDQPIPDADHTWYTDGSSFLQEGQRKAGAAVTTETEVIWAGALPAGTSAQRAELIALTQALKMAEGKRLNVYTDSRYAFATAHIHGEIYRRRGWLTSEGREIKNKSEILALLKALFLPKRLSIIHCLGHQKGDSAEARGNRLADQAAREAAIKTPPDTSTLLIAGKRTADGSEFEKRTADGSEFESPKKKAKVE

SEQ ID NO: 2137 - protein, 2097 aa, synthetic construct
MPAAKRVKLDGGDKKYSIGLDIGTNSVGWAVITDEYKVPSKKFKVLGNTDRHSIKKNLIGALLFDSGETAEATRLKRTARRRYTRRKNRICYLQEIFSNEMAKVDDSFFHRLEESFLVEEDKKHERHPIFGNIVDEVAYHEKYPTIYHLRKKLVDSTDKADLRLIYLALAHMIKFRGHFLIEGDLNPDNSDVDKLFIQLVQTYNQLFEENPINASGVDAKAILSARLSKSRRLENLIAQLPGEKKNGLFGNLIALSLGLTPNFKSNFDLAEDAKLQLSKDTYDDDLDNLLAQIGDQYADLFLAAKNLSDAILLSDILRVNTEITKAPLSASMIKRYDEHHQDLTLLKALVRQQLPEKYKEIFFDQSKNGYAGYIDGGASQEEFYKFIKPILEKMDGTEELLVKLNREDLLRKQRTFDNGSIPHQIHLGELHAILRRQEDFYPFLKDNREKIEKILTFRIPYYVGPLARGNSRFAWMTRKSEETITPWNFEEVVDKGASAQSFIERMTNFDKNLPNEKVLPKHSLLYEYFTVYNELTKVKYVTEGMRKPAFLSGEQKKAIVDLLFKTNRKVTVKQLKEDYFKKIECFDSVEISGVEDRFNASLGTYHDLLKIIKDKDFLDNEENEDILEDIVLTLTLFEDREMIEERLKTYAHLFDDKVMKQLKRRRYTGWGRLSRKLINGIRDKQSGKTILDFLKSDGFANRNFMQLIHDDSLTFKEDIQKAQVSGQGDSLHEHIANLAGSPAIKKGILQTVKVVDELVKVMGRHKPENIVIEMARENQTTQKGQKNSRERMKRIEEGIKELGSQILKEHPVENTQLQNEKLYLYYLQNGRDMYVDQELDINRLSDYDVDHIVPQSFLKDDSIDNKVLTRSDKARGKSDNVPSEEVVKKMKNYWRQLLNAKLITQRKFDNLTKAERGGLSELDKAGFIKRQLVETRQITKHVAQILDSRMNTKYDENDKLIREVKVITLKSKLVSDFRKDFQFYKVREINNYHHAHDAYLNAVVGTALIKKYPKLESEFVYGDYKVYDVRKMIAKSEQEIGKATAKYFFYSNIMNFFKTEITLANGEIRKRPLIETNGETGEIVWDKGRDFATVRKVLSMPQVNIVKKTEVQTGGFSKESILPKRNSDKLIARKKDWDPKKYGGFDSPTVAYSVLVVAKVEKGKSKKLKSVKELLGITIMERSSFEKNPIDFLEAKGYKEVKKDLIIKLPKYSLFELENGRKRMLASAGELQKGNELALPSKYVNFLYLASHYEKLKGSPEDNEQKQLFVEQHKHYLDEIIEQISEFSKRVILADANLDKVLSAYNKHRDKPIREQAENIIHLFTLTNLGAPAAFKYFDTTIDRKRYTSTKEVLDATLIHQSITGLYETRIDLSQLGGDGGGGSGGSGGSGGSGGLGIEDEYRLHETSTEPDVSLGSTWLSDFPQAWAETGGMGLAVRQAPLIIPLKATSTPVSIQQYPMSHEARLGIKPHIQRLLDQGILVPCQSPWNTPLLPVKKPGTNDYRPVQDLREVNKRVEDIHPTVPNPYNLLSGLPPSHQWYTVLDLKDAFFCLRLHPTSQPLFAFEWRDPGMGISGQLTWTRLPQGFKNSPTLFNEALHRDLADFRIQHPDLILLQYVDDILLAATSELDCQQGTRALLQTLGDLGYRASAKKAQICQKQVKYLGYLLREGQRWLTEARKETVMGQPVPKTPRQLREFLGKAGFCRLFIPGFAEMAAPLYPLTKPGTLFSWGPDQQKAYQEIKQALLTAPALGLPDLTKPFELFVDEKQGYAKGVLTQKLGPWRRPVAYLSKKLDPVAAGWPPCLRMVAAIAVLTKDAGKLTMGQPLVILAPHAVEALVKQPPDRWLSNARMTHYQAMLLDTDRVQFGPVVALNPATLLPLPEEGAPHDCLEILAETHGTRPDLTDQPIPDADHTWYTDGSSFLQEGQRKAGAAVTTETEVIWAGALPAGTSAQRAELIALTQALKMAEGKRLNVYTDSRYAFATAHIHGEIYRRRGWLTSEGREIKNKSEILALLKALFLPKRLSIIHCLGHQKGDSAEARGNRLADQAAREAAIKTPPDTSTLLIAGKRTADGSEFEKRTADGSEFESPKKKAKVE

SEQ ID NO: 2138 - protein, 2094 aa, synthetic construct; identical to SEQ ID NO: 2061

SEQ ID NO: 2139 - protein, 2096 aa, synthetic construct
MPAAKRVKLDGGDKKYSIGLDIGTNSVGWAVITDEYKVPSKKFKVLGNTDRHSIKKNLIGALLFDSGETAEATRLKRTARRRYTRRKNRICYLQEIFSNEMAKVDDSFFHRLEESFLVEEDKKHERHPIFGNIVDEVAYHEKYPTIYHLRKKLVDSTDKADLRLIYLALAHMIKFRGHFLIEGDLNPDNSDVDKLFIQLVQTYNQLFEENPINASGVDAKAILSARLSKSRRLENLIAQLPGEKKNGLFGNLIALSLGLTPNFKSNFDLAEDAKLQLSKDTYDDDLDNLLAQIGDQYADLFLAAKNLSDAILLSDILRVNTEITKAPLSASMIKRYDEHHQDLTLLKALVRQQLPEKYKEIFFDQSKNGYAGYIDGGASQEEFYKFIKPILEKMDGTEELLVKLNREDLLRKQRTFDNGSIPHQIHLGELHAILRRQEDFYPFLKDNREKIEKILTFRIPYYVGPLARGNSRFAWMTRKSEETITPWNFEEVVDKGASAQSFIERMTNFDKNLPNEKVLPKHSLLYEYFTVYNELTKVKYVTEGMRKPAFLSGEQKKAIVDLLFKTNRKVTVKQLKEDYFKKIECFDSVEISGVEDRFNASLGTYHDLLKIIKDKDFLDNEENEDILEDIVLTLTLFEDREMIEERLKTYAHLFDDKVMKQLKRRRYTGWGRLSRKLINGIRDKQSGKTILDFLKSDGFANRNFMQLIHDDSLTFKEDIQKAQVSGQGDSLHEHIANLAGSPAIKKGILQTVKVVDELVKVMGRHKPENIVIEMARENQTTQKGQKNSRERMKRIEEGIKELGSQILKEHPVENTQLQNEKLYLYYLQNGRDMYVDQELDINRLSDYDVDHIVPQSFLKDDSIDNKVLTRSDKARGKSDNVPSEEVVKKMKNYWRQLLNAKLITQRKFDNLTKAERGGLSELDKAGFIKRQLVETRQITKHVAQILDSRMNTKYDENDKLIREVKVITLKSKLVSDFRKDFQFYKVREINNYHHAHDAYLNAVVGTALIKKYPKLESEFVYGDYKVYDVRKMIAKSEQEIGKATAKYFFYSNIMNFFKTEITLANGEIRKRPLIETNGETGEIVWDKGRDFATVRKVLSMPQVNIVKKTEVQTGGFSKESILPKRNSDKLIARKKDWDPKKYGGFDSPTVAYSVLVVAKVEKGKSKKLKSVKELLGITIMERSSFEKNPIDFLEAKGYKEVKKDLIIKLPKYSLFELENGRKRMLASAGELQKGNELALPSKYVNFLYLASHYEKLKGSPEDNEQKQLFVEQHKHYLDEIIEQISEFSKRVILADANLDKVLSAYNKHRDKPIREQAENIIHLFTLTNLGAPAAFKYFDTTIDRKRYTSTKEVLDATLIHQSITGLYETRIDLSQLGGDGGGGSPAPEAAAKGGLGIEDEYRLHETSTEPDVSLGSTWLSDFPQAWAETGGMGLAVRQAPLIIPLKATSTPVSIQQYPMSHEARLGIKPHIQRLLDQGILVPCQSPWNTPLLPVKKPGTNDYRPVQDLREVNKRVEDIHPTVPNPYNLLSGLPPSHQWYTVLDLKDAFFCLRLHPTSQPLFAFEWRDPGMGISGQLTWTRLPQGFKNSPTLFNEALHRDLADFRIQHPDLILLQYVDDILLAATSELDCQQGTRALLQTLGDLGYRASAKKAQICQKQVKYLGYLLREGQRWLTEARKETVMGQPVPKTPRQLREFLGKAGFCRLFIPGFAEMAAPLYPLTKPGTLFSWGPDQQKAYQEIKQALLTAPALGLPDLTKPFELFVDEKQGYAKGVLTQKLGPWRRPVAYLSKKLDPVAAGWPPCLRMVAAIAVLTKDAGKLTMGQPLVILAPHAVEALVKQPPDRWLSNARMTHYQAMLLDTDRVQFGPVVALNPATLLPLPEEGAPHDCLEILAETHGTRPDLTDQPIPDADHTWYTDGSSFLQEGQRKAGAAVTTETEVIWAGALPAGTSAQRAELIALTQALKMAEGKRLNVYTDSRYAFATAHIHGEIYRRRGWLTSEGREIKNKSEILALLKALFLPKRLSIIHCLGHQKGDSAEARGNRLADQAAREAAIKTPPDTSTLLIAGKRTADGSEFEKRTADGSEFESPKKKAKVE

SEQ ID NO: 2140 - protein, 2103 aa, synthetic construct
MPAAKRVKLDGGDKKYSIGLDIGTNSVGWAVITDEYKVPSKKFKVLGNTDRHSIKKNLIGALLFDSGETAEATRLKRTARRRYTRRKNRICYLQEIFSNEMAKVDDSFFHRLEESFLVEEDKKHERHPIFGNIVDEVAYHEKYPTIYHLRKKLVDSTDKADLRLIYLALAHMIKFRGHFLIEGDLNPDNSDVDKLFIQLVQTYNQLFEENPINASGVDAKAILSARLSKSRRLENLIAQLPGEKKNGLFGNLIALSLGLTPNFKSNFDLAEDAKLQLSKDTYDDDLDNLLAQIGDQYADLFLAAKNLSDAILLSDILRVNTEITKAPLSASMIKRYDEHHQDLTLLKALVRQQLPEKYKEIFFDQSKNGYAGYIDGGASQEEFYKFIKPILEKMDGTEELLVKLNREDLLRKQRTFDNGSIPHQIHLGELHAILRRQEDFYPFLKDNREKIEKILTFRIPYYVGPLARGNSRFAWMTRKSEETITPWNFEEVVDKGASAQSFIERMTNFDKNLPNEKVLPKHSLLYEYFTVYNELTKVKYVTEGMRKPAFLSGEQKKAIVDLLFKTNRKVTVKQLKEDYFKKIECFDSVEISGVEDRFNASLGTYHDLLKIIKDKDFLDNEENEDILEDIVLTLTLFEDREMIEERLKTYAHLFDDKVMKQLKRRRYTGWGRLSRKLINGIRDKQSGKTILDFLKSDGFANRNFMQLIHDDSLTFKEDIQKAQVSGQGDSLHEHIANLAGSPAIKKGILQTVKVVDELVKVMGRHKPENIVIEMARENQTTQKGQKNSRERMKRIEEGIKELGSQILKEHPVENTQLQNEKLYLYYLQNGRDMYVDQELDINRLSDYDVDHIVPQSFLKDDSIDNKVLTRSDKARGKSDNVPSEEVVKKMKNYWRQLLNAKLITQRKFDNLTKAERGGLSELDKAGFIKRQLVETRQITKHVAQILDSRMNTKYDENDKLIREVKVITLKSKLVSDFRKDFQFYKVREINNYHHAHDAYLNAVVGTALIKKYPKLESEFVYGDYKVYDVRKMIAKSEQEIGKATAKYFFYSNIMNFFKTEITLANGEIRKRPLIETNGETGEIVWDKGRDFATVRKVLSMPQVNIVKKTEVQTGGFSKESILPKRNSDKLIARKKDWDPKKYGGFDSPTVAYSVLVVAKVEKGKSKKLKSVKELLGITIMERSSFEKNPIDFLEAKGYKEVKKDLIIKLPKYSLFELENGRKRMLASAGELQKGNELALPSKYVNFLYLASHYEKLKGSPEDNEQKQLFVEQHKHYLDEIIEQISEFSKRVILADANLDKVLSAYNKHRDKPIREQAENIIHLFTLTNLGAPAAFKYFDTTIDRKRYTSTKEVLDATLIHQSITGLYETRIDLSQLGGDGGGSSGSSGSSGSSGSSGSSGGLGIEDEYRLHETSTEPDVSLGSTWLSDFPQAWAETGGMGLAVRQAPLIIPLKATSTPVSIQQYPMSHEARLGIKPHIQRLLDQGILVPCQSPWNTPLLPVKKPGTNDYRPVQDLREVNKRVEDIHPTVPNPYNLLSGLPPSHQWYTVLDLKDAFFCLRLHPTSQPLFAFEWRDPGMGISGQLTWTRLPQGFKNSPTLFNEALHRDLADFRIQHPDLILLQYVDDILLAATSELDCQQGTRALLQTLGDLGYRASAKKAQICQKQVKYLGYLLREGQRWLTEARKETVMGQPVPKTPRQLREFLGKAGFCRLFIPGFAEMAAPLYPLTKPGTLFSWGPDQQKAYQEIKQALLTAPALGLPDLTKPFELFVDEKQGYAKGVLTQKLGPWRRPVAYLSKKLDPVAAGWPPCLRMVAAIAVLTKDAGKLTMGQPLVILAPHAVEALVKQPPDRWLSNARMTHYQAMLLDTDRVQFGPVVALNPATLLPLPEEGAPHDCLEILAETHGTRPDLTDQPIPDADHTWYTDGSSFLQEGQRKAGAAVTTETEVIWAGALPAGTSAQRAELIALTQALKMAEGKRLNVYTDSRYAFATAHIHGEIYRRRGWLTSEGREIKNKSEILALLKALFLPKRLSIIHCLGHQKGDSAEARGNRLADQAAREAAIKTPPDTSTLLIAGKRTADGSEFEKRTADGSEFESPKKKAKVE

SEQ ID NO: 2141 - protein, 2096 aa, synthetic construct
MPAAKRVKLDGGDKKYSIGLDIGTNSVGWAVITDEYKVPSKKFKVLGNTDRHSIKKNLIGALLFDSGETAEATRLKRTARRRYTRRKNRICYLQEIFSNEMAKVDDSFFHRLEESFLVEEDKKHERHPIFGNIVDEVAYHEKYPTIYHLRKKLVDSTDKADLRLIYLALAHMIKFRGHFLIEGDLNPDNSDVDKLFIQLVQTYNQLFEENPINASGVDAKAILSARLSKSRRLENLIAQLPGEKKNGLFGNLIALSLGLTPNFKSNFDLAEDAKLQLSKDTYDDDLDNLLAQIGDQYADLFLAAKNLSDAILLSDILRVNTEITKAPLSASMIKRYDEHHQDLTLLKALVRQQLPEKYKEIFFDQSKNGYAGYIDGGASQEEFYKFIKPILEKMDGTEELLVKLNREDLLRKQRTFDNGSIPHQIHLGELHAILRRQEDFYPFLKDNREKIEKILTFRIPYYVGPLARGNSRFAWMTRKSEETITPWNFEEVVDKGASAQSFIERMTNFDKNLPNEKVLPKHSLLYEYFTVYNELTKVKYVTEGMRKPAFLSGEQKKAIVDLLFKTNRKVTVKQLKEDYFKKIECFDSVEISGVEDRFNASLGTYHDLLKIIKDKDFLDNEENEDILEDIVLTLTLFEDREMIEERLKTYAHLFDDKVMKQLKRRRYTGWGRLSRKLINGIRDKQSGKTILDFLKSDGFANRNFMQLIHDDSLTFKEDIQKAQVSGQGDSLHEHIANLAGSPAIKKGILQTVKVVDELVKVMGRHKPENIVIEMARENQTTQKGQKNSRERMKRIEEGIKELGSQILKEHPVENTQLQNEKLYLYYLQNGRDMYVDQELDINRLSDYDVDHIVPQSFLKDDSIDNKVLTRSDKARGKSDNVPSEEVVKKMKNYWRQLLNAKLITQRKFDNLTKAERGGLSELDKAGFIKRQLVETRQITKHVAQILDSRMNTKYDENDKLIREVKVITLKSKLVSDFRKDFQFYKVREINNYHHAHDAYLNAVVGTALIKKYPKLESEFVYGDYKVYDVRKMIAKSEQEIGKATAKYFFYSNIMNFFKTEITLANGEIRKRPLIETNGETGEIVWDKGRDFATVRKVLSMPQVNIVKKTEVQTGGFSKESILPKRNSDKLIARKKDWDPKKYGGFDSPTVAYSVLVVAKVEKGKSKKLKSVKELLGITIMERSSFEKNPIDFLEAKGYKEVKKDLIIKLPKYSLFELENGRKRMLASAGELQKGNELALPSKYVNFLYLASHYEKLKGSPEDNEQKQLFVEQHKHYLDEIIEQISEFSKRVILADANLDKVLSAYNKHRDKPIREQAENIIHLFTLTNLGAPAAFKYFDTTIDRKRYTSTKEVLDATLIHQSITGLYETRIDLSQLGGDGGEAAAKGSSGGGGGLGIEDEYRLHETSTEPDVSLGSTWLSDFPQAWAETGGMGLAVRQAPLIIPLKATSTPVSIQQYPMSHEARLGIKPHIQRLLDQGILVPCQSPWNTPLLPVKKPGTNDYRPVQDLREVNKRVEDIHPTVPNPYNLLSGLPPSHQWYTVLDLKDAFFCLRLHPTSQPLFAFEWRDPGMGISGQLTWTRLPQGFKNSPTLFNEALHRDLADFRIQHPDLILLQYVDDILLAATSELDCQQGTRALLQTLGDLGYRASAKKAQICQKQVKYLGYLLREGQRWLTEARKETVMGQPVPKTPRQLREFLGKAGFCRLFIPGFAEMAAPLYPLTKPGTLFSWGPDQQKAYQEIKQALLTAPALGLPDLTKPFELFVDEKQGYAKGVLTQKLGPWRRPVAYLSKKLDPVAAGWPPCLRMVAAIAVLTKDAGKLTMGQPLVILAPHAVEALVKQPPDRWLSNARMTHYQAMLLDTDRVQFGPVVALNPATLLPLPEEGAPHDCLEILAETHGTRPDLTDQPIPDADHTWYTDGSSFLQEGQRKAGAAVTTETEVIWAGALPAGTSAQRAELIALTQALKMAEGKRLNVYTDSRYAFATAHIHGEIYRRRGWLTSEGREIKNKSEILALLKALFLPKRLSIIHCLGHQKGDSAEARGNRLADQAAREAAIKTPPDTSTLLIAGKRTADGSEFEKRTADGSEFESPKKKAKVE

SEQ ID NO: 2142 - protein, 2094 aa, synthetic construct
MPAAKRVKLDGGDKKYSIGLDIGTNSVGWAVITDEYKVPSKKFKVLGNTDRHSIKKNLIGALLFDSGETAEATRLKRTARRRYTRRKNRICYLQEIFSNEMAKVDDSFFHRLEESFLVEEDKKHERHPIFGNIVDEVAYHEKYPTIYHLRKKLVDSTDKADLRLIYLALAHMIKFRGHFLIEGDLNPDNSDVDKLFIQLVQTYNQLFEENPINASGVDAKAILSARLSKSRRLENLIAQLPGEKKNGLFGNLIALSLGLTPNFKSNFDLAEDAKLQLSKDTYDDDLDNLLAQIGDQYADLFLAAKNLSDAILLSDILRVNTEITKAPLSASMIKRYDEHHQDLTLLKALVRQQLPEKYKEIFFDQSKNGYAGYIDGGASQEEFYKFIKPILEKMDGTEELLVKLNREDLLRKQRTFDNGSIPHQIHLGELHAILRRQEDFYPFLKDNREKIEKILTFRIPYYVGPLARGNSRFAWMTRKSEETITPWNFEEVVDKGASAQSFIERMTNFDKNLPNEKVLPKHSLLYEYFTVYNELTKVKYVTEGMRKPAFLSGEQKKAIVDLLFKTNRKVTVKQLKEDYFKKIECFDSVEISGVEDRFNASLGTYHDLLKIIKDKDFLDNEENEDILEDIVLTLTLFEDREMIEERLKTYAHLFDDKVMKQLKRRRYTGWGRLSRKLINGIRDKQSGKTILDFLKSDGFANRNFMQLIHDDSLTFKEDIQKAQVSGQGDSLHEHIANLAGSPAIKKGILQTVKVVDELVKVMGRHKPENIVIEMARENQTTQKGQKNSRERMKRIEEGIKELGSQILKEHPVENTQLQNEKLYLYYLQNGRDMYVDQELDINRLSDYDVDHIVPQSFLKDDSIDNKVLTRSDKARGKSDNVPSEEVVKKMKNYWRQLLNAKLITQRKFDNLTKAERGGLSELDKAGFIKRQLVETRQITKHVAQILDSRMNTKYDENDKLIREVKVITLKSKLVSDFRKDFQFYKVREINNYHHAHDAYLNAVVGTALIKKYPKLESEFVYGDYKVYDVRKMIAKSEQEIGKATAKYFFYSNIMNFFKTEITLANGEIRKRPLIETNGETGEIVWDKGRDFATVRKVLSMPQVNIVKKTEVQTGGFSKESILPKRNSDKLIARKKDWDPKKYGGFDSPTVAYSVLVVAKVEKGKSKKLKSVKELLGITIMERSSFEKNPIDFLEAKGYKEVKKDLIIKLPKYSLFELENGRKRMLASAGELQKGNELALPSKYVNFLYLASHYEKLKGSPEDNEQKQLFVEQHKHYLDEIIEQISEFSKRVILADANLDKVLSAYNKHRDKPIREQAENIIHLFTLTNLGAPAAFKYFDTTIDRKRYTSTKEVLDATLIHQSITGLYETRIDLSQLGGDGGGSSGSSGSSGGLGIEDEYRLHETSTEPDVSLGSTWLSDFPQAWAETGGMGLAVRQAPLIIPLKATSTPVSIQQYPMSHEARLGIKPHIQRLLDQGILVPCQSPWNTPLLPVKKPGTNDYRPVQDLREVNKRVEDIHPTVPNPYNLLSGLPPSHQWYTVLDLKDAFFCLRLHPTSQPLFAFEWRDPGMGISGQLTWTRLPQGFKNSPTLFNEALHRDLADFRIQHPDLILLQYVDDILLAATSELDCQQGTRALLQTLGDLGYRASAKKAQICQKQVKYLGYLLREGQRWLTEARKETVMGQPVPKTPRQLREFLGKAGFCRLFIPGFAEMAAPLYPLTKPGTLFSWGPDQQKAYQEIKQALLTAPALGLPDLTKPFELFVDEKQGYAKGVLTQKLGPWRRPVAYLSKKLDPVAAGWPPCLRMVAAIAVLTKDAGKLTMGQPLVILAPHAVEALVKQPPDRWLSNARMTHYQAMLLDTDRVQFGPVVALNPATLLPLPEEGAPHDCLEILAETHGTRPDLTDQPIPDADHTWYTDGSSFLQEGQRKAGAAVTTETEVIWAGALPAGTSAQRAELIALTQALKMAEGKRLNVYTDSRYAFATAHIHGEIYRRRGWLTSEGREIKNKSEILALLKALFLPKRLSIIHCLGHQKGDSAEARGNRLADQAAREAAIKTPPDTSTLLIAGKRTADGSEFEKRTADGSEFESPKKKAKVE

SEQ ID NO: 2143 - protein, 2094 aa, synthetic construct
MPAAKRVKLDGGDKKYSIGLDIGTNSVGWAVITDEYKVPSKKFKVLGNTDRHSIKKNLIGALLFDSGETAEATRLKRTARRRYTRRKNRICYLQEIFSNEMAKVDDSFFHRLEESFLVEEDKKHERHPIFGNIVDEVAYHEKYPTIYHLRKKLVDSTDKADLRLIYLALAHMIKFRGHFLIEGDLNPDNSDVDKLFIQLVQTYNQLFEENPINASGVDAKAILSARLSKSRRLENLIAQLPGEKKNGLFGNLIALSLGLTPNFKSNFDLAEDAKLQLSKDTYDDDLDNLLAQIGDQYADLFLAAKNLSDAILLSDILRVNTEITKAPLSASMIKRYDEHHQDLTLLKALVRQQLPEKYKEIFFDQSKNGYAGYIDGGASQEEFYKFIKPILEKMDGTEELLVKLNREDLLRKQRTFDNGSIPHQIHLGELHAILRRQEDFYPFLKDNREKIEKILTFRIPYYVGPLARGNSRFAWMTRKSEETITPWNFEEVVDKGASAQSFIERMTNFDKNLPNEKVLPKHSLLYEYFTVYNELTKVKYVTEGMRKPAFLSGEQKKAIVDLLFKTNRKVTVKQLKEDYFKKIECFDSVEISGVEDRFNASLGTYHDLLKIIKDKDFLDNEENEDILEDIVLTLTLFEDREMIEERLKTYAHLFDDKVMKQLKRRRYTGWGRLSRKLINGIRDKQSGKTILDFLKSDGFANRNFMQLIHDDSLTFKEDIQKAQVSGQGDSLHEHIANLAGSPAIKKGILQTVKVVDELVKVMGRHKPENIVIEMARENQTTQKGQKNSRERMKRIEEGIKELGSQILKEHPVENTQLQNEKLYLYYLQNGRDMYVDQELDINRLSDYDVDHIVPQSFLKDDSIDNKVLTRSDKARGKSDNVPSEEVVKKMKNYWRQLLNAKLITQRKFDNLTKAERGGLSELDKAGFIKRQLVETRQITKHVAQILDSRMNTKYDENDKLIREVKVITLKSKLVSDFRKDFQFYKVREINNYHHAHDAYLNAVVGTALIKKYPKLESEFVYGDYKVYDVRKMIAKSEQEIGKATAKYFFYSNIMNFFKTEITLANGEIRKRPLIETNGETGEIVWDKGRDFATVRKVLSMPQVNIVKKTEVQTGGFSKESILPKRNSDKLIARKKDWDPKKYGGFDSPTVAYSVLVVAKVEKGKSKKLKSVKELLGITIMERSSFEKNPIDFLEAKGYKEVKKDLIIKLPKYSLFELENGRKRMLASAGELQKGNELALPSKYVNFLYLASHYEKLKGSPEDNEQKQLFVEQHKHYLDEIIEQISEFSKRVILADANLDKVLSAYNKHRDKPIREQAENIIHLFTLTNLGAPAAFKYFDTTIDRKRYTSTKEVLDATLIHQSITGLYETRIDLSQLGGDGGGSSGGSPAPGGLGIEDEYRLHETSTEPDVSLGSTWLSDFPQAWAETGGMGLAVRQAPLIIPLKATSTPVSIQQYPMSHEARLGIKPHIQRLLDQGILVPCQSPWNTPLLPVKKPGTNDYRPVQDLREVNKRVEDIHPTVPNPYNLLSGLPPSHQWYTVLDLKDAFFCLRLHPTSQPLFAFEWRDPGMGISGQLTWTRLPQGFKNSPTLFNEALHRDLADFRIQHPDLILLQYVDDILLAATSELDCQQGTRALLQTLGDLGYRASAKKAQICQKQVKYLGYLLREGQRWLTEARKETVMGQPVPKTPRQLREFLGKAGFCRLFIPGFAEMAAPLYPLTKPGTLFSWGPDQQKAYQEIKQALLTAPALGLPDLTKPFELFVDEKQGYAKGVLTQKLGPWRRPVAYLSKKLDPVAAGWPPCLRMVAAIAVLTKDAGKLTMGQPLVILAPHAVEALVKQPPDRWLSNARMTHYQAMLLDTDRVQFGPVVALNPATLLPLPEEGAPHDCLEILAETHGTRPDLTDQPIPDADHTWYTDGSSFLQEGQRKAGAAVTTETEVIWAGALPAGTSAQRAELIALTQALKMAEGKRLNVYTDSRYAFATAHIHGEIYRRRGWLTSEGREIKNKSEILALLKALFLPKRLSIIHCLGHQKGDSAEARGNRLADQAAREAAIKTPPDTSTLLIAGKRTADGSEFEKRTADGSEFESPKKKAKVE

SEQ ID NO: 2144 - protein, 2090 aa, synthetic construct
MPAAKRVKLDGGDKKYSIGLDIGTNSVGWAVITDEYKVPSKKFKVLGNTDRHSIKKNLIGALLFDSGETAEATRLKRTARRRYTRRKNRICYLQEIFSNEMAKVDDSFFHRLEESFLVEEDKKHERHPIFGNIVDEVAYHEKYPTIYHLRKKLVDSTDKADLRLIYLALAHMIKFRGHFLIEGDLNPDNSDVDKLFIQLVQTYNQLFEENPINASGVDAKAILSARLSKSRRLENLIAQLPGEKKNGLFGNLIALSLGLTPNFKSNFDLAEDAKLQLSKDTYDDDLDNLLAQIGDQYADLFLAAKNLSDAILLSDILRVNTEITKAPLSASMIKRYDEHHQDLTLLKALVRQQLPEKYKEIFFDQSKNGYAGYIDGGASQEEFYKFIKPILEKMDGTEELLVKLNREDLLRKQRTFDNGSIPHQIHLGELHAILRRQEDFYPFLKDNREKIEKILTFRIPYYVGPLARGNSRFAWMTRKSEETITPWNFEEVVDKGASAQSFIERMTNFDKNLPNEKVLPKHSLLYEYFTVYNELTKVKYVTEGMRKPAFLSGEQKKAIVDLLFKTNRKVTVKQLKEDYFKKIECFDSVEISGVEDRFNASLGTYHDLLKIIKDKDFLDNEENEDILEDIVLTLTLFEDREMIEERLKTYAHLFDDKVMKQLKRRRYTGWGRLSRKLINGIRDKQSGKTILDFLKSDGFANRNFMQLIHDDSLTFKEDIQKAQVSGQGDSLHEHIANLAGSPAIKKGILQTVKVVDELVKVMGRHKPENIVIEMARENQTTQKGQKNSRERMKRIEEGIKELGSQILKEHPVENTQLQNEKLYLYYLQNGRDMYVDQELDINRLSDYDVDHIVPQSFLKDDSIDNKVLTRSDKARGKSDNVPSEEVVKKMKNYWRQLLNAKLITQRKFDNLTKAERGGLSELDKAGFIKRQLVETRQITKHVAQILDSRMNTKYDENDKLIREVKVITLKSKLVSDFRKDFQFYKVREINNYHHAHDAYLNAVVGTALIKKYPKLESEFVYGDYKVYDVRKMIAKSEQEIGKATAKYFFYSNIMNFFKTEITLANGEIRKRPLIETNGETGEIVWDKGRDFATVRKVLSMPQVNIVKKTEVQTGGFSKESILPKRNSDKLIARKKDWDPKKYGGFDSPTVAYSVLVVAKVEKGKSKKLKSVKELLGITIMERSSFEKNPIDFLEAKGYKEVKKDLIIKLPKYSLFELENGRKRMLASAGELQKGNELALPSKYVNFLYLASHYEKLKGSPEDNEQKQLFVEQHKHYLDEIIEQISEFSKRVILADANLDKVLSAYNKHRDKPIREQAENIIHLFTLTNLGAPAAFKYFDTTIDRKRYTSTKEVLDATLIHQSITGLYETRIDLSQLGGDGGPAPAPGGLGIEDEYRLHETSTEPDVSLGSTWLSDFPQAWAETGGMGLAVRQAPLIIPLKATSTPVSIQQYPMSHEARLGIKPHIQRLLDQGILVPCQSPWNTPLLPVKKPGTNDYRPVQDLREVNKRVEDIHPTVPNPYNLLSGLPPSHQWYTVLDLKDAFFCLRLHPTSQPLFAFEWRDPGMGISGQLTWTRLPQGFKNSPTLFNEALHRDLADFRIQHPDLILLQYVDDILLAATSELDCQQGTRALLQTLGDLGYRASAKKAQICQKQVKYLGYLLREGQRWLTEARKETVMGQPVPKTPRQLREFLGKAGFCRLFIPGFAEMAAPLYPLTKPGTLFSWGPDQQKAYQEIKQALLTAPALGLPDLTKPFELFVDEKQGYAKGVLTQKLGPWRRPVAYLSKKLDPVAAGWPPCLRMVAAIAVLTKDAGKLTMGQPLVILAPHAVEALVKQPPDRWLSNARMTHYQAMLLDTDRVQFGPVVALNPATLLPLPEEGAPHDCLEILAETHGTRPDLTDQPIPDADHTWYTDGSSFLQEGQRKAGAAVTTETEVIWAGALPAGTSAQRAELIALTQALKMAEGKRLNVYTDSRYAFATAHIHGEIYRRRGWLTSEGREIKNKSEILALLKALFLPKRLSIIHCLGHQKGDSAEARGNRLADQAAREAAIKTPPDTSTLLIAGKRTADGSEFEKRTADGSEFESPKKKAKVE

SEQ ID NO: 2145 - protein, 2096 aa, synthetic construct
MPAAKRVKLDGGDKKYSIGLDIGTNSVGWAVITDEYKVPSKKFKVLGNTDRHSIKKNLIGALLFDSGETAEATRLKRTARRRYTRRKNRICYLQEIFSNEMAKVDDSFFHRLEESFLVEEDKKHERHPIFGNIVDEVAYHEKYPTIYHLRKKLVDSTDKADLRLIYLALAHMIKFRGHFLIEGDLNPDNSDVDKLFIQLVQTYNQLFEENPINASGVDAKAILSARLSKSRRLENLIAQLPGEKKNGLFGNLIALSLGLTPNFKSNFDLAEDAKLQLSKDTYDDDLDNLLAQIGDQYADLFLAAKNLSDAILLSDILRVNTEITKAPLSASMIKRYDEHHQDLTLLKALVRQQLPEKYKEIFFDQSKNGYAGYIDGGASQEEFYKFIKPILEKMDGTEELLVKLNREDLLRKQRTFDNGSIPHQIHLGELHAILRRQEDFYPFLKDNREKIEKILTFRIPYYVGPLARGNSRFAWMTRKSEETITPWNFEEVVDKGASAQSFIERMTNFDKNLPNEKVLPKHSLLYEYFTVYNELTKVKYVTEGMRKPAFLSGEQKKAIVDLLFKTNRKVTVKQLKEDYFKKIECFDSVEISGVEDRFNASLGTYHDLLKIIKDKDFLDNEENEDILEDIVLTLTLFEDREMIEERLKTYAHLFDDKVMKQLKRRRYTGWGRLSRKLINGIRDKQSGKTILDFLKSDGFANRNFMQLIHDDSLTFKEDIQKAQVSGQGDSLHEHIANLAGSPAIKKGILQTVKVVDELVKVMGRHKPENIVIEMARENQTTQKGQKNSRERMKRIEEGIKELGSQILKEHPVENTQLQNEKLYLYYLQNGRDMYVDQELDINRLSDYDVDHIVPQSFLKDDSIDNKVLTRSDKARGKSDNVPSEEVVKKMKNYWRQLLNAKLITQRKFDNLTKAERGGLSELDKAGFIKRQLVETRQITKHVAQILDSRMNTKYDENDKLIREVKVITLKSKLVSDFRKDFQFYKVREINNYHHAHDAYLNAVVGTALIKKYPKLESEFVYGDYKVYDVRKMIAKSEQEIGKATAKYFFYSNIMNFFKTEITLANGEIRKRPLIETNGETGEIVWDKGRDFATVRKVLSMPQVNIVKKTEVQTGGFSKESILPKRNSDKLIARKKDWDPKKYGGFDSPTVAYSVLVVAKVEKGKSKKLKSVKELLGITIMERSSFEKNPIDFLEAKGYKEVKKDLIIKLPKYSLFELENGRKRMLASAGELQKGNELALPSKYVNFLYLASHYEKLKGSPEDNEQKQLFVEQHKHYLDEIIEQISEFSKRVILADANLDKVLSAYNKHRDKPIREQAENIIHLFTLTNLGAPAAFKYFDTTIDRKRYTSTKEVLDATLIHQSITGLYETRIDLSQLGGDGGGGGGSSEAAAKGGLGIEDEYRLHETSTEPDVSLGSTWLSDFPQAWAETGGMGLAVRQAPLIIPLKATSTPVSIQQYPMSHEARLGIKPHIQRLLDQGILVPCQSPWNTPLLPVKKPGTNDYRPVQDLREVNKRVEDIHPTVPNPYNLLSGLPPSHQWYTVLDLKDAFFCLRLHPTSQPLFAFEWRDPGMGISGQLTWTRLPQGFKNSPTLFNEALHRDLADFRIQHPDLILLQYVDDILLAATSELDCQQGTRALLQTLGDLGYRASAKKAQICQKQVKYLGYLLREGQRWLTEARKETVMGQPVPKTPRQLREFLGKAGFCRLFIPGFAEMAAPLYPLTKPGTLFSWGPDQQKAYQEIKQALLTAPALGLPDLTKPFELFVDEKQGYAKGVLTQKLGPWRRPVAYLSKKLDPVAAGWPPCLRMVAAIAVLTKDAGKLTMGQPLVILAPHAVEALVKQPPDRWLSNARMTHYQAMLLDTDRVQFGPVVALNPATLLPLPEEGAPHDCLEILAETHGTRPDLTDQPIPDADHTWYTDGSSFLQEGQRKAGAAVTTETEVIWAGALPAGTSAQRAELIALTQALKMAEGKRLNVYTDSRYAFATAHIHGEIYRRRGWLTSEGREIKNKSEILALLKALFLPKRLSIIHCLGHQKGDSAEARGNRLADQAAREAAIKTPPDTSTLLIAGKRTADGSEFEKRTADGSEFESPKKKAKVE

SEQ ID NO: 2146 - protein, 2096 aa, synthetic construct
MPAAKRVKLDGGDKKYSIGLDIGTNSVGWAVITDEYKVPSKKFKVLGNTDRHSIKKNLIGALLFDSGETAEATRLKRTARRRYTRRKNRICYLQEIFSNEMAKVDDSFFHRLEESFLVEEDKKHERHPIFGNIVDEVAYHEKYPTIYHLRKKLVDSTDKADLRLIYLALAHMIKFRGHFLIEGDLNPDNSDVDKLFIQLVQTYNQLFEENPINASGVDAKAILSARLSKSRRLENLIAQLPGEKKNGLFGNLIALSLGLTPNFKSNFDLAEDAKLQLSKDTYDDDLDNLLAQIGDQYADLFLAAKNLSDAILLSDILRVNTEITKAPLSASMIKRYDEHHQDLTLLKALVRQQLPEKYKEIFFDQSKNGYAGYIDGGASQEEFYKFIKPILEKMDGTEELLVKLNREDLLRKQRTFDNGSIPHQIHLGELHAILRRQEDFYPFLKDNREKIEKILTFRIPYYVGPLARGNSRFAWMTRKSEETITPWNFEEVVDKGASAQSFIERMTNFDKNLPNEKVLPKHSLLYEYFTVYNELTKVKYVTEGMRKPAFLSGEQKKAIVDLLFKTNRKVTVKQLKEDYFKKIECFDSVEISGVEDRFNASLGTYHDLLKIIKDKDFLDNEENEDILEDIVLTLTLFEDREMIEERLKTYAHLFDDKVMKQLKRRRYTGWGRLSRKLINGIRDKQSGKTILDFLKSDGFANRNFMQLIHDDSLTFKEDIQKAQVSGQGDSLHEHIANLAGSPAIKKGILQTVKVVDELVKVMGRHKPENIVIEMARENQTTQKGQKNSRERMKRIEEGIKELGSQILKEHPVENTQLQNEKLYLYYLQNGRDMYVDQELDINRLSDYDVDHIVPQSFLKDDSIDNKVLTRSDKARGKSDNVPSEEVVKKMKNYWRQLLNAKLITQRKFDNLTKAERGGLSELDKAGFIKRQLVETRQITKHVAQILDSRMNTKYDENDKLIREVKVITLKSKLVSDFRKDFQFYKVREINNYHHAHDAYLNAVVGTALIKKYPKLESEFVYGDYKVYDVRKMIAKSEQEIGKATAKYFFYSNIMNFFKTEITLANGEIRKRPLIETNGETGEIVWDKGRDFATVRKVLSMPQVNIVKKTEVQTGGFSKESILPKRNSDKLIARKKDWDPKKYGGFDSPTVAYSVLVVAKVEKGKSKKLKSVKELLGITIMERSSFEKNPIDFLEAKGYKEVKKDLIIKLPKYSLFELENGRKRMLASAGELQKGNELALPSKYVNFLYLASHYEKLKGSPEDNEQKQLFVEQHKHYLDEIIEQISEFSKRVILADANLDKVLSAYNKHRDKPIREQAENIIHLFTLTNLGAPAAFKYFDTTIDRKRYTSTKEVLDATLIHQSITGLYETRIDLSQLGGDGGGGSEAAAKPAPGGLGIEDEYRLHETSTEPDVSLGSTWLSDFPQAWAETGGMGLAVRQAPLIIPLKATSTPVSIQQYPMSHEARLGIKPHIQRLLDQGILVPCQSPWNTPLLPVKKPGTNDYRPVQDLREVNKRVEDIHPTVPNPYNLLSGLPPSHQWYTVLDLKDAFFCLRLHPTSQPLFAFEWRDPGMGISGQLTWTRLPQGFKNSPTLFNEALHRDLADFRIQHPDLILLQYVDDILLAATSELDCQQGTRALLQTLGDLGYRASAKKAQICQKQVKYLGYLLREGQRWLTEARKETVMGQPVPKTPRQLREFLGKAGFCRLFIPGFAEMAAPLYPLTKPGTLFSWGPDQQKAYQEIKQALLTAPALGLPDLTKPFELFVDEKQGYAKGVLTQKLGPWRRPVAYLSKKLDPVAAGWPPCLRMVAAIAVLTKDAGKLTMGQPLVILAPHAVEALVKQPPDRWLSNARMTHYQAMLLDTDRVQFGPVVALNPATLLPLPEEGAPHDCLEILAETHGTRPDLTDQPIPDADHTWYTDGSSFLQEGQRKAGAAVTTETEVIWAGALPAGTSAQRAELIALTQALKMAEGKRLNVYTDSRYAFATAHIHGEIYRRRGWLTSEGREIKNKSEILALLKALFLPKRLSIIHCLGHQKGDSAEARGNRLADQAAREAAIKTPPDTSTLLIAGKRTADGSEFEKRTADGSEFESPKKKAKVE

SEQ ID NO: 2147 - protein, 2093 aa, synthetic construct
MPAAKRVKLDGGDKKYSIGLDIGTNSVGWAVITDEYKVPSKKFKVLGNTDRHSIKKNLIGALLFDSGETAEATRLKRTARRRYTRRKNRICYLQEIFSNEMAKVDDSFFHRLEESFLVEEDKKHERHPIFGNIVDEVAYHEKYPTIYHLRKKLVDSTDKADLRLIYLALAHMIKFRGHFLIEGDLNPDNSDVDKLFIQLVQTYNQLFEENPINASGVDAKAILSARLSKSRRLENLIAQLPGEKKNGLFGNLIALSLGLTPNFKSNFDLAEDAKLQLSKDTYDDDLDNLLAQIGDQYADLFLAAKNLSDAILLSDILRVNTEITKAPLSASMIKRYDEHHQDLTLLKALVRQQLPEKYKEIFFDQSKNGYAGYIDGGASQEEFYKFIKPILEKMDGTEELLVKLNREDLLRKQRTFDNGSIPHQIHLGELHAILRRQEDFYPFLKDNREKIEKILTFRIPYYVGPLARGNSRFAWMTRKSEETITPWNFEEVVDKGASAQSFIERMTNFDKNLPNEKVLPKHSLLYEYFTVYNELTKVKYVTEGMRKPAFLSGEQKKAIVDLLFKTNRKVTVKQLKEDYFKKIECFDSVEISGVEDRFNASLGTYHDLLKIIKDKDFLDNEENEDILEDIVLTLTLFEDREMIEERLKTYAHLFDDKVMKQLKRRRYTGWGRLSRKLINGIRDKQSGKTILDFLKSDGFANRNFMQLIHDDSLTFKEDIQKAQVSGQGDSLHEHIANLAGSPAIKKGILQTVKVVDELVKVMGRHKPENIVIEMARENQTTQKGQKNSRERMKRIEEGIKELGSQILKEHPVENTQLQNEKLYLYYLQNGRDMYVDQELDINRLSDYDVDHIVPQSFLKDDSIDNKVLTRSDKARGKSDNVPSEEVVKKMKNYWRQLLNAKLITQRKFDNLTKAERGGLSELDKAGFIKRQLVETRQITKHVAQILDSRMNTKYDENDKLIREVKVITLKSKLVSDFRKDFQFYKVREINNYHHAHDAYLNAVVGTALIKKYPKLESEFVYGDYKVYDVRKMIAKSEQEIGKATAKYFFYSNIMNFFKTEITLANGEIRKRPLIETNGETGEIVWDKGRDFATVRKVLSMPQVNIVKKTEVQTGGFSKESILPKRNSDKLIARKKDWDPKKYGGFDSPTVAYSVLVVAKVEKGKSKKLKSVKELLGITIMERSSFEKNPIDFLEAKGYKEVKKDLIIKLPKYSLFELENGRKRMLASAGELQKGNELALPSKYVNFLYLASHYEKLKGSPEDNEQKQLFVEQHKHYLDEIIEQISEFSKRVILADANLDKVLSAYNKHRDKPIREQAENIIHLFTLTNLGAPAAFKYFDTTIDRKRYTSTKEVLDATLIHQSITGLYETRIDLSQLGGDGGEAAAKPAPGGLGIEDEYRLHETSTEPDVSLGSTWLSDFPQAWAETGGMGLAVRQAPLIIPLKATSTPVSIQQYPMSHEARLGIKPHIQRLLDQGILVPCQSPWNTPLLPVKKPGTNDYRPVQDLREVNKRVEDIHPTVPNPYNLLSGLPPSHQWYTVLDLKDAFFCLRLHPTSQPLFAFEWRDPGMGISGQLTWTRLPQGFKNSPTLFNEALHRDLADFRIQHPDLILLQYVDDILLAATSELDCQQGTRALLQTLGDLGYRASAKKAQICQKQVKYLGYLLREGQRWLTEARKETVMGQPVPKTPRQLREFLGKAGFCRLFIPGFAEMAAPLYPLTKPGTLFSWGPDQQKAYQEIKQALLTAPALGLPDLTKPFELFVDEKQGYAKGVLTQKLGPWRRPVAYLSKKLDPVAAGWPPCLRMVAAIAVLTKDAGKLTMGQPLVILAPHAVEALVKQPPDRWLSNARMTHYQAMLLDTDRVQFGPVVALNPATLLPLPEEGAPHDCLEILAETHGTRPDLTDQPIPDADHTWYTDGSSFLQEGQRKAGAAVTTETEVIWAGALPAGTSAQRAELIALTQALKMAEGKRLNVYTDSRYAFATAHIHGEIYRRRGWLTSEGREIKNKSEILALLKALFLPKRLSIIHCLGHQKGDSAEARGNRLADQAAREAAIKTPPDTSTLLIAGKRTADGSEFEKRTADGSEFESPKKKAKVE

SEQ ID NO: 2148 - protein, 2091 aa, synthetic construct
MPAAKRVKLDGGDKKYSIGLDIGTNSVGWAVITDEYKVPSKKFKVLGNTDRHSIKKNLIGALLFDSGETAEATRLKRTARRRYTRRKNRICYLQEIFSNEMAKVDDSFFHRLEESFLVEEDKKHERHPIFGNIVDEVAYHEKYPTIYHLRKKLVDSTDKADLRLIYLALAHMIKFRGHFLIEGDLNPDNSDVDKLFIQLVQTYNQLFEENPINASGVDAKAILSARLSKSRRLENLIAQLPGEKKNGLFGNLIALSLGLTPNFKSNFDLAEDAKLQLSKDTYDDDLDNLLAQIGDQYADLFLAAKNLSDAILLSDILRVNTEITKAPLSASMIKRYDEHHQDLTLLKALVRQQLPEKYKEIFFDQSKNGYAGYIDGGASQEEFYKFIKPILEKMDGTEELLVKLNREDLLRKQRTFDNGSIPHQIHLGELHAILRRQEDFYPFLKDNREKIEKILTFRIPYYVGPLARGNSRFAWMTRKSEETITPWNFEEVVDKGASAQSFIERMTNFDKNLPNEKVLPKHSLLYEYFTVYNELTKVKYVTEGMRKPAFLSGEQKKAIVDLLFKTNRKVTVKQLKEDYFKKIECFDSVEISGVEDRFNASLGTYHDLLKIIKDKDFLDNEENEDILEDIVLTLTLFEDREMIEERLKTYAHLFDDKVMKQLKRRRYTGWGRLSRKLINGIRDKQSGKTILDFLKSDGFANRNFMQLIHDDSLTFKEDIQKAQVSGQGDSLHEHIANLAGSPAIKKGILQTVKVVDELVKVMGRHKPENIVIEMARENQTTQKGQKNSRERMKRIEEGIKELGSQILKEHPVENTQLQNEKLYLYYLQNGRDMYVDQELDINRLSDYDVDHIVPQSFLKDDSIDNKVLTRSDKARGKSDNVPSEEVVKKMKNYWRQLLNAKLITQRKFDNLTKAERGGLSELDKAGFIKRQLVETRQITKHVAQILDSRMNTKYDENDKLIREVKVITLKSKLVSDFRKDFQFYKVREINNYHHAHDAYLNAVVGTALIKKYPKLESEFVYGDYKVYDVRKMIAKSEQEIGKATAKYFFYSNIMNFFKTEITLANGEIRKRPLIETNGETGEIVWDKGRDFATVRKVLSMPQVNIVKKTEVQTGGFSKESILPKRNSDKLIARKKDWDPKKYGGFDSPTVAYSVLVVAKVEKGKSKKLKSVKELLGITIMERSSFEKNPIDFLEAKGYKEVKKDLIIKLPKYSLFELENGRKRMLASAGELQKGNELALPSKYVNFLYLASHYEKLKGSPEDNEQKQLFVEQHKHYLDEIIEQISEFSKRVILADANLDKVLSAYNKHRDKPIREQAENIIHLFTLTNLGAPAAFKYFDTTIDRKRYTSTKEVLDATLIHQSITGLYETRIDLSQLGGDGGGGSGGGGGLGIEDEYRLHETSTEPDVSLGSTWLSDFPQAWAETGGMGLAVRQAPLIIPLKATSTPVSIQQYPMSHEARLGIKPHIQRLLDQGILVPCQSPWNTPLLPVKKPGTNDYRPVQDLREVNKRVEDIHPTVPNPYNLLSGLPPSHQWYTVLDLKDAFFCLRLHPTSQPLFAFEWRDPGMGISGQLTWTRLPQGFKNSPTLFNEALHRDLADFRIQHPDLILLQYVDDILLAATSELDCQQGTRALLQTLGDLGYRASAKKAQICQKQVKYLGYLLREGQRWLTEARKETVMGQPVPKTPRQLREFLGKAGFCRLFIPGFAEMAAPLYPLTKPGTLFSWGPDQQKAYQEIKQALLTAPALGLPDLTKPFELFVDEKQGYAKGVLTQKLGPWRRPVAYLSKKLDPVAAGWPPCLRMVAAIAVLTKDAGKLTMGQPLVILAPHAVEALVKQPPDRWLSNARMTHYQAMLLDTDRVQFGPVVALNPATLLPLPEEGAPHDCLEILAETHGTRPDLTDQPIPDADHTWYTDGSSFLQEGQRKAGAAVTTETEVIWAGALPAGTSAQRAELIALTQALKMAEGKRLNVYTDSRYAFATAHIHGEIYRRRGWLTSEGREIKNKSEILALLKALFLPKRLSIIHCLGHQKGDSAEARGNRLADQAAREAAIKTPPDTSTLLIAGKRTADGSEFEKRTADGSEFESPKKKAKVE

SEQ ID NO: 2149 - protein, 2096 aa, synthetic construct
MPAAKRVKLDGGDKKYSIGLDIGTNSVGWAVITDEYKVPSKKFKVLGNTDRHSIKKNLIGALLFDSGETAEATRLKRTARRRYTRRKNRICYLQEIFSNEMAKVDDSFFHRLEESFLVEEDKKHERHPIFGNIVDEVAYHEKYPTIYHLRKKLVDSTDKADLRLIYLALAHMIKFRGHFLIEGDLNPDNSDVDKLFIQLVQTYNQLFEENPINASGVDAKAILSARLSKSRRLENLIAQLPGEKKNGLFGNLIALSLGLTPNFKSNFDLAEDAKLQLSKDTYDDDLDNLLAQIGDQYADLFLAAKNLSDAILLSDILRVNTEITKAPLSASMIKRYDEHHQDLTLLKALVRQQLPEKYKEIFFDQSKNGYAGYIDGGASQEEFYKFIKPILEKMDGTEELLVKLNREDLLRKQRTFDNGSIPHQIHLGELHAILRRQEDFYPFLKDNREKIEKILTFRIPYYVGPLARGNSRFAWMTRKSEETITPWNFEEVVDKGASAQSFIERMTNFDKNLPNEKVLPKHSLLYEYFTVYNELTKVKYVTEGMRKPAFLSGEQKKAIVDLLFKTNRKVTVKQLKEDYFKKIECFDSVEISGVEDRFNASLGTYHDLLKIIKDKDFLDNEENEDILEDIVLTLTLFEDREMIEERLKTYAHLFDDKVMKQLKRRRYTGWGRLSRKLINGIRDKQSGKTILDFLKSDGFANRNFMQLIHDDSLTFKEDIQKAQVSGQGDSLHEHIANLAGSPAIKKGILQTVKVVDELVKVMGRHKPENIVIEMARENQTTQKGQKNSRERMKRIEEGIKELGSQILKEHPVENTQLQNEKLYLYYLQNGRDMYVDQELDINRLSDYDVDHIVPQSFLKDDSIDNKVLTRSDKARGKSDNVPSEEVVKKMKNYWRQLLNAKLITQRKFDNLTKAERGGLSELDKAGFIKRQLVETRQITKHVAQILDSRMNTKYDENDKLIREVKVITLKSKLVSDFRKDFQFYKVREINNYHHAHDAYLNAVVGTALIKKYPKLESEFVYGDYKVYDVRKMIAKSEQEIGKATAKYFFYSNIMNFFKTEITLANGEIRKRPLIETNGETGEIVWDKGRDFATVRKVLSMPQVNIVKKTEVQTGGFSKESILPKRNSDKLIARKKDWDPKKYGGFDSPTVAYSVLVVAKVEKGKSKKLKSVKELLGITIMERSSFEKNPIDFLEAKGYKEVKKDLIIKLPKYSLFELENGRKRMLASAGELQKGNELALPSKYVNFLYLASHYEKLKGSPEDNEQKQLFVEQHKHYLDEIIEQISEFSKRVILADANLDKVLSAYNKHRDKPIREQAENIIHLFTLTNLGAPAAFKYFDTTIDRKRYTSTKEVLDATLIHQSITGLYETRIDLSQLGGDGGGSSPAPEAAAKGGLGIEDEYRLHETSTEPDVSLGSTWLSDFPQAWAETGGMGLAVRQAPLIIPLKATSTPVSIQQYPMSHEARLGIKPHIQRLLDQGILVPCQSPWNTPLLPVKKPGTNDYRPVQDLREVNKRVEDIHPTVPNPYNLLSGLPPSHQWYTVLDLKDAFFCLRLHPTSQPLFAFEWRDPGMGISGQLTWTRLPQGFKNSPTLFNEALHRDLADFRIQHPDLILLQYVDDILLAATSELDCQQGTRALLQTLGDLGYRASAKKAQICQKQVKYLGYLLREGQRWLTEARKETVMGQPVPKTPRQLREFLGKAGFCRLFIPGFAEMAAPLYPLTKPGTLFSWGPDQQKAYQEIKQALLTAPALGLPDLTKPFELFVDEKQGYAKGVLTQKLGPWRRPVAYLSKKLDPVAAGWPPCLRMVAAIAVLTKDAGKLTMGQPLVILAPHAVEALVKQPPDRWLSNARMTHYQAMLLDTDRVQFGPVVALNPATLLPLPEEGAPHDCLEILAETHGTRPDLTDQPIPDADHTWYTDGSSFLQEGQRKAGAAVTTETEVIWAGALPAGTSAQRAELIALTQALKMAEGKRLNVYTDSRYAFATAHIHGEIYRRRGWLTSEGREIKNKSEILALLKALFLPKRLSIIHCLGHQKGDSAEARGNRLADQAAREAAIKTPPDTSTLLIAGKRTADGSEFEKRTADGSEFESPKKKAKVE

SEQ ID NO: 2150 - protein, 2091 aa, synthetic construct; identical to SEQ ID NO: 2057

SEQ ID NO: 2151 - protein, 2094 aa, synthetic construct
MPAAKRVKLDGGDKKYSIGLDIGTNSVGWAVITDEYKVPSKKFKVLGNTDRHSIKKNLIGALLFDSGETAEATRLKRTARRRYTRRKNRICYLQEIFSNEMAKVDDSFFHRLEESFLVEEDKKHERHPIFGNIVDEVAYHEKYPTIYHLRKKLVDSTDKADLRLIYLALAHMIKFRGHFLIEGDLNPDNSDVDKLFIQLVQTYNQLFEENPINASGVDAKAILSARLSKSRRLENLIAQLPGEKKNGLFGNLIALSLGLTPNFKSNFDLAEDAKLQLSKDTYDDDLDNLLAQIGDQYADLFLAAKNLSDAILLSDILRVNTEITKAPLSASMIKRYDEHHQDLTLLKALVRQQLPEKYKEIFFDQSKNGYAGYIDGGASQEEFYKFIKPILEKMDGTEELLVKLNREDLLRKQRTFDNGSIPHQIHLGELHAILRRQEDFYPFLKDNREKIEKILTFRIPYYVGPLARGNSRFAWMTRKSEETITPWNFEEVVDKGASAQSFIERMTNFDKNLPNEKVLPKHSLLYEYFTVYNELTKVKYVTEGMRKPAFLSGEQKKAIVDLLFKTNRKVTVKQLKEDYFKKIECFDSVEISGVEDRFNASLGTYHDLLKIIKDKDFLDNEENEDILEDIVLTLTLFEDREMIEERLKTYAHLFDDKVMKQLKRRRYTGWGRLSRKLINGIRDKQSGKTILDFLKSDGFANRNFMQLIHDDSLTFKEDIQKAQVSGQGDSLHEHIANLAGSPAIKKGILQTVKVVDELVKVMGRHKPENIVIEMARENQTTQKGQKNSRERMKRIEEGIKELGSQILKEHPVENTQLQNEKLYLYYLQNGRDMYVDQELDINRLSDYDVDHIVPQSFLKDDSIDNKVLTRSDKARGKSDNVPSEEVVKKMKNYWRQLLNAKLITQRKFDNLTKAERGGLSELDKAGFIKRQLVETRQITKHVAQILDSRMNTKYDENDKLIREVKVITLKSKLVSDFRKDFQFYKVREINNYHHAHDAYLNAVVGTALIKKYPKLESEFVYGDYKVYDVRKMIAKSEQEIGKATAKYFFYSNIMNFFKTEITLANGEIRKRPLIETNGETGEIVWDKGRDFATVRKVLSMPQVNIVKKTEVQTGGFSKESILPKRNSDKLIARKKDWDPKKYGGFDSPTVAYSVLVVAKVEKGKSKKLKSVKELLGITIMERSSFEKNPIDFLEAKGYKEVKKDLIIKLPKYSLFELENGRKRMLASAGELQKGNELALPSKYVNFLYLASHYEKLKGSPEDNEQKQLFVEQHKHYLDEIIEQISEFSKRVILADANLDKVLSAYNKHRDKPIREQAENIIHLFTLTNLGAPAAFKYFDTTIDRKRYTSTKEVLDATLIHQSITGLYETRIDLSQLGGDGGPAPGGGGGSGGLGIEDEYRLHETSTEPDVSLGSTWLSDFPQAWAETGGMGLAVRQAPLIIPLKATSTPVSIQQYPMSHEARLGIKPHIQRLLDQGILVPCQSPWNTPLLPVKKPGTNDYRPVQDLREVNKRVEDIHPTVPNPYNLLSGLPPSHQWYTVLDLKDAFFCLRLHPTSQPLFAFEWRDPGMGISGQLTWTRLPQGFKNSPTLFNEALHRDLADFRIQHPDLILLQYVDDILLAATSELDCQQGTRALLQTLGDLGYRASAKKAQICQKQVKYLGYLLREGQRWLTEARKETVMGQPVPKTPRQLREFLGKAGFCRLFIPGFAEMAAPLYPLTKPGTLFSWGPDQQKAYQEIKQALLTAPALGLPDLTKPFELFVDEKQGYAKGVLTQKLGPWRRPVAYLSKKLDPVAAGWPPCLRMVAAIAVLTKDAGKLTMGQPLVILAPHAVEALVKQPPDRWLSNARMTHYQAMLLDTDRVQFGPVVALNPATLLPLPEEGAPHDCLEILAETHGTRPDLTDQPIPDADHTWYTDGSSFLQEGQRKAGAAVTTETEVIWAGALPAGTSAQRAELIALTQALKMAEGKRLNVYTDSRYAFATAHIHGEIYRRRGWLTSEGREIKNKSEILALLKALFLPKRLSIIHCLGHQKGDSAEARGNRLADQAAREAAIKTPPDTSTLLIAGKRTADGSEFEKRTADGSEFESPKKKAKVE

SEQ ID NO: 2152 - protein, 2093 aa, synthetic construct
MPAAKRVKLDGGDKKYSIGLDIGTNSVGWAVITDEYKVPSKKFKVLGNTDRHSIKKNLIGALLFDSGETAEATRLKRTARRRYTRRKNRICYLQEIFSNEMAKVDDSFFHRLEESFLVEEDKKHERHPIFGNIVDEVAYHEKYPTIYHLRKKLVDSTDKADLRLIYLALAHMIKFRGHFLIEGDLNPDNSDVDKLFIQLVQTYNQLFEENPINASGVDAKAILSARLSKSRRLENLIAQLPGEKKNGLFGNLIALSLGLTPNFKSNFDLAEDAKLQLSKDTYDDDLDNLLAQIGDQYADLFLAAKNLSDAILLSDILRVNTEITKAPLSASMIKRYDEHHQDLTLLKALVRQQLPEKYKEIFFDQSKNGYAGYIDGGASQEEFYKFIKPILEKMDGTEELLVKLNREDLLRKQRTFDNGSIPHQIHLGELHAILRRQEDFYPFLKDNREKIEKILTFRIPYYVGPLARGNSRFAWMTRKSEETITPWNFEEVVDKGASAQSFIERMTNFDKNLPNEKVLPKHSLLYEYFTVYNELTKVKYVTEGMRKPAFLSGEQKKAIVDLLFKTNRKVTVKQLKEDYFKKIECFDSVEISGVEDRFNASLGTYHDLLKIIKDKDFLDNEENEDILEDIVLTLTLFEDREMIEERLKTYAHLFDDKVMKQLKRRRYTGWGRLSRKLINGIRDKQSGKTILDFLKSDGFANRNFMQLIHDDSLTFKEDIQKAQVSGQGDSLHEHIANLAGSPAIKKGILQTVKVVDELVKVMGRHKPENIVIEMARENQTTQKGQKNSRERMKRIEEGIKELGSQILKEHPVENTQLQNEKLYLYYLQNGRDMYVDQELDINRLSDYDVDHIVPQSFLKDDSIDNKVLTRSDKARGKSDNVPSEEVVKKMKNYWRQLLNAKLITQRKFDNLTKAERGGLSELDKAGFIKRQLVETRQITKHVAQILDSRMNTKYDENDKLIREVKVITLKSKLVSDFRKDFQFYKVREINNYHHAHDAYLNAVVGTALIKKYPKLESEFVYGDYKVYDVRKMIAKSEQEIGKATAKYFFYSNIMNFFKTEITLANGEIRKRPLIETNGETGEIVWDKGRDFATVRKVLSMPQVNIVKKTEVQTGGFSKESILPKRNSDKLIARKKDWDPKKYGGFDSPTVAYSVLVVAKVEKGKSKKLKSVKELLGITIMERSSFEKNPIDFLEAKGYKEVKKDLIIKLPKYSLFELENGRKRMLASAGELQKGNELALPSKYVNFLYLASHYEKLKGSPEDNEQKQLFVEQHKHYLDEIIEQISEFSKRVILADANLDKVLSAYNKHRDKPIREQAENIIHLFTLTNLGAPAAFKYFDTTIDRKRYTSTKEVLDATLIHQSITGLYETRIDLSQLGGDGGEAAAKGGGGGLGIEDEYRLHETSTEPDVSLGSTWLSDFPQAWAETGGMGLAVRQAPLIIPLKATSTPVSIQQYPMSHEARLGIKPHIQRLLDQGILVPCQSPWNTPLLPVKKPGTNDYRPVQDLREVNKRVEDIHPTVPNPYNLLSGLPPSHQWYTVLDLKDAFFCLRLHPTSQPLFAFEWRDPGMGISGQLTWTRLPQGFKNSPTLFNEALHRDLADFRIQHPDLILLQYVDDILLAATSELDCQQGTRALLQTLGDLGYRASAKKAQICQKQVKYLGYLLREGQRWLTEARKETVMGQPVPKTPRQLREFLGKAGFCRLFIPGFAEMAAPLYPLTKPGTLFSWGPDQQKAYQEIKQALLTAPALGLPDLTKPFELFVDEKQGYAKGVLTQKLGPWRRPVAYLSKKLDPVAAGWPPCLRMVAAIAVLTKDAGKLTMGQPLVILAPHAVEALVKQPPDRWLSNARMTHYQAMLLDTDRVQFGPVVALNPATLLPLPEEGAPHDCLEILAETHGTRPDLTDQPIPDADHTWYTDGSSFLQEGQRKAGAAVTTETEVIWAGALPAGTSAQRAELIALTQALKMAEGKRLNVYTDSRYAFATAHIHGEIYRRRGWLTSEGREIKNKSEILALLKALFLPKRLSIIHCLGHQKGDSAEARGNRLADQAAREAAIKTPPDTSTLLIAGKRTADGSEFEKRTADGSEFESPKKKAKVE

SEQ ID NO: 2153 - protein, 2094 aa, synthetic construct
MPAAKRVKLDGGDKKYSIGLDIGTNSVGWAVITDEYKVPSKKFKVLGNTDRHSIKKNLIGALLFDSGETAEATRLKRTARRRYTRRKNRICYLQEIFSNEMAKVDDSFFHRLEESFLVEEDKKHERHPIFGNIVDEVAYHEKYPTIYHLRKKLVDSTDKADLRLIYLALAHMIKFRGHFLIEGDLNPDNSDVDKLFIQLVQTYNQLFEENPINASGVDAKAILSARLSKSRRLENLIAQLPGEKKNGLFGNLIALSLGLTPNFKSNFDLAEDAKLQLSKDTYDDDLDNLLAQIGDQYADLFLAAKNLSDAILLSDILRVNTEITKAPLSASMIKRYDEHHQDLTLLKALVRQQLPEKYKEIFFDQSKNGYAGYIDGGASQEEFYKFIKPILEKMDGTEELLVKLNREDLLRKQRTFDNGSIPHQIHLGELHAILRRQEDFYPFLKDNREKIEKILTFRIPYYVGPLARGNSRFAWMTRKSEETITPWNFEEVVDKGASAQSFIERMTNFDKNLPNEKVLPKHSLLYEYFTVYNELTKVKYVTEGMRKPAFLSGEQKKAIVDLLFKTNRKVTVKQLKEDYFKKIECFDSVEISGVEDRFNASLGTYHDLLKIIKDKDFLDNEENEDILEDIVLTLTLFEDREMIEERLKTYAHLFDDKVMKQLKRRRYTGWGRLSRKLINGIRDKQSGKTILDFLKSDGFANRNFMQLIHDDSLTFKEDIQKAQVSGQGDSLHEHIANLAGSPAIKKGILQTVKVVDELVKVMGRHKPENIVIEMARENQTTQKGQKNSRERMKRIEEGIKELGSQILKEHPVENTQLQNEKLYLYYLQNGRDMYVDQELDINRLSDYDVDHIVPQSFLKDDSIDNKVLTRSDKARGKSDNVPSEEVVKKMKNYWRQLLNAKLITQRKFDNLTKAERGGLSELDKAGFIKRQLVETRQITKHVAQILDSRMNTKYDENDKLIREVKVITLKSKLVSDFRKDFQFYKVREINNYHHAHDAYLNAVVGTALIKKYPKLESEFVYGDYKVYDVRKMIAKSEQEIGKATAKYFFYSNIMNFFKTEITLANGEIRKRPLIETNGETGEIVWDKGRDFATVRKVLSMPQVNIVKKTEVQTGGFSKESILPKRNSDKLIARKKDWDPKKYGGFDSPTVAYSVLVVAKVEKGKSKKLKSVKELLGITIMERSSFEKNPIDFLEAKGYKEVKKDLIIKLPKYSLFELENGRKRMLASAGELQKGNELALPSKYVNFLYLASHYEKLKGSPEDNEQKQLFVEQHKHYLDEIIEQISEFSKRVILADANLDKVLSAYNKHRDKPIREQAENIIHLFTLTNLGAPAAFKYFDTTIDRKRYTSTKEVLDATLIHQSITGLYETRIDLSQLGGDGGPAPGGSGGGGGLGIEDEYRLHETSTEPDVSLGSTWLSDFPQAWAETGGMGLAVRQAPLIIPLKATSTPVSIQQYPMSHEARLGIKPHIQRLLDQGILVPCQSPWNTPLLPVKKPGTNDYRPVQDLREVNKRVEDIHPTVPNPYNLLSGLPPSHQWYTVLDLKDAFFCLRLHPTSQPLFAFEWRDPGMGISGQLTWTRLPQGFKNSPTLFNEALHRDLADFRIQHPDLILLQYVDDILLAATSELDCQQGTRALLQTLGDLGYRASAKKAQICQKQVKYLGYLLREGQRWLTEARKETVMGQPVPKTPRQLREFLGKAGFCRLFIPGFAEMAAPLYPLTKPGTLFSWGPDQQKAYQEIKQALLTAPALGLPDLTKPFELFVDEKQGYAKGVLTQKLGPWRRPVAYLSKKLDPVAAGWPPCLRMVAAIAVLTKDAGKLTMGQPLVILAPHAVEALVKQPPDRWLSNARMTHYQAMLLDTDRVQFGPVVALNPATLLPLPEEGAPHDCLEILAETHGTRPDLTDQPIPDADHTWYTDGSSFLQEGQRKAGAAVTTETEVIWAGALPAGTSAQRAELIALTQALKMAEGKRLNVYTDSRYAFATAHIHGEIYRRRGWLTSEGREIKNKSEILALLKALFLPKRLSIIHCLGHQKGDSAEARGNRLADQAAREAAIKTPPDTSTLLIAGKRTADGSEFEKRTADGSEFESPKKKAKVE

SEQ ID NO: 2154 - protein, 2094 aa, synthetic construct
MPAAKRVKLDGGDKKYSIGLDIGTNSVGWAVITDEYKVPSKKFKVLGNTDRHSIKKNLIGALLFDSGETAEATRLKRTARRRYTRRKNRICYLQEIFSNEMAKVDDSFFHRLEESFLVEEDKKHERHPIFGNIVDEVAYHEKYPTIYHLRKKLVDSTDKADLRLIYLALAHMIKFRGHFLIEGDLNPDNSDVDKLFIQLVQTYNQLFEENPINASGVDAKAILSARLSKSRRLENLIAQLPGEKKNGLFGNLIALSLGLTPNFKSNFDLAEDAKLQLSKDTYDDDLDNLLAQIGDQYADLFLAAKNLSDAILLSDILRVNTEITKAPLSASMIKRYDEHHQDLTLLKALVRQQLPEKYKEIFFDQSKNGYAGYIDGGASQEEFYKFIKPILEKMDGTEELLVKLNREDLLRKQRTFDNGSIPHQIHLGELHAILRRQEDFYPFLKDNREKIEKILTFRIPYYVGPLARGNSRFAWMTRKSEETITPWNFEEVVDKGASAQSFIERMTNFDKNLPNEKVLPKHSLLYEYFTVYNELTKVKYVTEGMRKPAFLSGEQKKAIVDLLFKTNRKVTVKQLKEDYFKKIECFDSVEISGVEDRFNASLGTYHDLLKIIKDKDFLDNEENEDILEDIVLTLTLFEDREMIEERLKTYAHLFDDKVMKQLKRRRYTGWGRLSRKLINGIRDKQSGKTILDFLKSDGFANRNFMQLIHDDSLTFKEDIQKAQVSGQGDSLHEHIANLAGSPAIKKGILQTVKVVDELVKVMGRHKPENIVIEMARENQTTQKGQKNSRERMKRIEEGIKELGSQILKEHPVENTQLQNEKLYLYYLQNGRDMYVDQELDINRLSDYDVDHIVPQSFLKDDSIDNKVLTRSDKARGKSDNVPSEEVVKKMKNYWRQLLNAKLITQRKFDNLTKAERGGLSELDKAGFIKRQLVETRQITKHVAQILDSRMNTKYDENDKLIREVKVITLKSKLVSDFRKDFQFYKVREINNYHHAHDAYLNAVVGTALIKKYPKLESEFVYGDYKVYDVRKMIAKSEQEIGKATAKYFFYSNIMNFFKTEITLANGEIRKRPLIETNGETGEIVWDKGRDFATVRKVLSMPQVNIVKKTEVQTGGFSKESILPKRNSDKLIARKKDWDPKKYGGFDSPTVAYSVLVVAKVEKGKSKKLKSVKELLGITIMERSSFEKNPIDFLEAKGYKEVKKDLIIKLPKYSLFELENGRKRMLASAGELQKGNELALPSKYVNFLYLASHYEKLKGSPEDNEQKQLFVEQHKHYLDEIIEQISEFSKRVILADANLDKVLSAYNKHRDKPIREQAENIIHLFTLTNLGAPAAFKYFDTTIDRKRYTSTKEVLDATLIHQSITGLYETRIDLSQLGGDGGGGGPAPGGSGGLGIEDEYRLHETSTEPDVSLGSTWLSDFPQAWAETGGMGLAVRQAPLIIPLKATSTPVSIQQYPMSHEARLGIKPHIQRLLDQGILVPCQSPWNTPLLPVKKPGTNDYRPVQDLREVNKRVEDIHPTVPNPYNLLSGLPPSHQWYTVLDLKDAFFCLRLHPTSQPLFAFEWRDPGMGISGQLTWTRLPQGFKNSPTLFNEALHRDLADFRIQHPDLILLQYVDDILLAATSELDCQQGTRALLQTLGDLGYRASAKKAQICQKQVKYLGYLLREGQRWLTEARKETVMGQPVPKTPRQLREFLGKAGFCRLFIPGFAEMAAPLYPLTKPGTLFSWGPDQQKAYQEIKQALLTAPALGLPDLTKPFELFVDEKQGYAKGVLTQKLGPWRRPVAYLSKKLDPVAAGWPPCLRMVAAIAVLTKDAGKLTMGQPLVILAPHAVEALVKQPPDRWLSNARMTHYQAMLLDTDRVQFGPVVALNPATLLPLPEEGAPHDCLEILAETHGTRPDLTDQPIPDADHTWYTDGSSFLQEGQRKAGAAVTTETEVIWAGALPAGTSAQRAELIALTQALKMAEGKRLNVYTDSRYAFATAHIHGEIYRRRGWLTSEGREIKNKSEILALLKALFLPKRLSIIHCLGHQKGDSAEARGNRLADQAAREAAIKTPPDTSTLLIAGKRTADGSEFEKRTADGSEFESPKKKAKVE

SEQ ID NO: 2155 - protein, 2097 aa, synthetic construct; identical to SEQ ID NO: 2056

SEQ ID NO: 2156 - protein, 2094 aa, synthetic construct
MPAAKRVKLDGGDKKYSIGLDIGTNSVGWAVITDEYKVPSKKFKVLGNTDRHSIKKNLIGALLFDSGETAEATRLKRTARRRYTRRKNRICYLQEIFSNEMAKVDDSFFHRLEESFLVEEDKKHERHPIFGNIVDEVAYHEKYPTIYHLRKKLVDSTDKADLRLIYLALAHMIKFRGHFLIEGDLNPDNSDVDKLFIQLVQTYNQLFEENPINASGVDAKAILSARLSKSRRLENLIAQLPGEKKNGLFGNLIALSLGLTPNFKSNFDLAEDAKLQLSKDTYDDDLDNLLAQIGDQYADLFLAAKNLSDAILLSDILRVNTEITKAPLSASMIKRYDEHHQDLTLLKALVRQQLPEKYKEIFFDQSKNGYAGYIDGGASQEEFYKFIKPILEKMDGTEELLVKLNREDLLRKQRTFDNGSIPHQIHLGELHAILRRQEDFYPFLKDNREKIEKILTFRIPYYVGPLARGNSRFAWMTRKSEETITPWNFEEVVDKGASAQSFIERMTNFDKNLPNEKVLPKHSLLYEYFTVYNELTKVKYVTEGMRKPAFLSGEQKKAIVDLLFKTNRKVTVKQLKEDYFKKIECFDSVEISGVEDRFNASLGTYHDLLKIIKDKDFLDNEENEDILEDIVLTLTLFEDREMIEERLKTYAHLFDDKVMKQLKRRRYTGWGRLSRKLINGIRDKQSGKTILDFLKSDGFANRNFMQLIHDDSLTFKEDIQKAQVSGQGDSLHEHIANLAGSPAIKKGILQTVKVVDELVKVMGRHKPENIVIEMARENQTTQKGQKNSRERMKRIEEGIKELGSQILKEHPVENTQLQNEKLYLYYLQNGRDMYVDQELDINRLSDYDVDHIVPQSFLKDDSIDNKVLTRSDKARGKSDNVPSEEVVKKMKNYWRQLLNAKLITQRKFDNLTKAERGGLSELDKAGFIKRQLVETRQITKHVAQILDSRMNTKYDENDKLIREVKVITLKSKLVSDFRKDFQFYKVREINNYHHAHDAYLNAVVGTALIKKYPKLESEFVYGDYKVYDVRKMIAKSEQEIGKATAKYFFYSNIMNFFKTEITLANGEIRKRPLIETNGETGEIVWDKGRDFATVRKVLSMPQVNIVKKTEVQTGGFSKESILPKRNSDKLIARKKDWDPKKYGGFDSPTVAYSVLVVAKVEKGKSKKLKSVKELLGITIMERSSFEKNPIDFLEAKGYKEVKKDLIIKLPKYSLFELENGRKRMLASAGELQKGNELALPSKYVNFLYLASHYEKLKGSPEDNEQKQLFVEQHKHYLDEIIEQISEFSKRVILADANLDKVLSAYNKHRDKPIREQAENIIHLFTLTNLGAPAAFKYFDTTIDRKRYTSTKEVLDATLIHQSITGLYETRIDLSQLGGDGGGSSPAPGGSGGLGIEDEYRLHETSTEPDVSLGSTWLSDFPQAWAETGGMGLAVRQAPLIIPLKATSTPVSIQQYPMSHEARLGIKPHIQRLLDQGILVPCQSPWNTPLLPVKKPGTNDYRPVQDLREVNKRVEDIHPTVPNPYNLLSGLPPSHQWYTVLDLKDAFFCLRLHPTSQPLFAFEWRDPGMGISGQLTWTRLPQGFKNSPTLFNEALHRDLADFRIQHPDLILLQYVDDILLAATSELDCQQGTRALLQTLGDLGYRASAKKAQICQKQVKYLGYLLREGQRWLTEARKETVMGQPVPKTPRQLREFLGKAGFCRLFIPGFAEMAAPLYPLTKPGTLFSWGPDQQKAYQEIKQALLTAPALGLPDLTKPFELFVDEKQGYAKGVLTQKLGPWRRPVAYLSKKLDPVAAGWPPCLRMVAAIAVLTKDAGKLTMGQPLVILAPHAVEALVKQPPDRWLSNARMTHYQAMLLDTDRVQFGPVVALNPATLLPLPEEGAPHDCLEILAETHGTRPDLTDQPIPDADHTWYTDGSSFLQEGQRKAGAAVTTETEVIWAGALPAGTSAQRAELIALTQALKMAEGKRLNVYTDSRYAFATAHIHGEIYRRRGWLTSEGREIKNKSEILALLKALFLPKRLSIIHCLGHQKGDSAEARGNRLADQAAREAAIKTPPDTSTLLIAGKRTADGSEFEKRTADGSEFESPKKKAKVE

SEQ ID NO: 2157 - protein, 2095 aa, synthetic construct
MPAAKRVKLDGGDKKYSIGLDIGTNSVGWAVITDEYKVPSKKFKVLGNTDRHSIKKNLIGALLFDSGETAEATRLKRTARRRYTRRKNRICYLQEIFSNEMAKVDDSFFHRLEESFLVEEDKKHERHPIFGNIVDEVAYHEKYPTIYHLRKKLVDSTDKADLRLIYLALAHMIKFRGHFLIEGDLNPDNSDVDKLFIQLVQTYNQLFEENPINASGVDAKAILSARLSKSRRLENLIAQLPGEKKNGLFGNLIALSLGLTPNFKSNFDLAEDAKLQLSKDTYDDDLDNLLAQIGDQYADLFLAAKNLSDAILLSDILRVNTEITKAPLSASMIKRYDEHHQDLTLLKALVRQQLPEKYKEIFFDQSKNGYAGYIDGGASQEEFYKFIKPILEKMDGTEELLVKLNREDLLRKQRTFDNGSIPHQIHLGELHAILRRQEDFYPFLKDNREKIEKILTFRIPYYVGPLARGNSRFAWMTRKSEETITPWNFEEVVDKGASAQSFIERMTNFDKNLPNEKVLPKHSLLYEYFTVYNELTKVKYVTEGMRKPAFLSGEQKKAIVDLLFKTNRKVTVKQLKEDYFKKIECFDSVEISGVEDRFNASLGTYHDLLKIIKDKDFLDNEENEDILEDIVLTLTLFEDREMIEERLKTYAHLFDDKVMKQLKRRRYTGWGRLSRKLINGIRDKQSGKTILDFLKSDGFANRNFMQLIHDDSLTFKEDIQKAQVSGQGDSLHEHIANLAGSPAIKKGILQTVKVVDELVKVMGRHKPENIVIEMARENQTTQKGQKNSRERMKRIEEGIKELGSQILKEHPVENTQLQNEKLYLYYLQNGRDMYVDQELDINRLSDYDVDHIVPQSFLKDDSIDNKVLTRSDKARGKSDNVPSEEVVKKMKNYWRQLLNAKLITQRKFDNLTKAERGGLSELDKAGFIKRQLVETRQITKHVAQILDSRMNTKYDENDKLIREVKVITLKSKLVSDFRKDFQFYKVREINNYHHAHDAYLNAVVGTALIKKYPKLESEFVYGDYKVYDVRKMIAKSEQEIGKATAKYFFYSNIMNFFKTEITLANGEIRKRPLIETNGETGEIVWDKGRDFATVRKVLSMPQVNIVKKTEVQTGGFSKESILPKRNSDKLIARKKDWDPKKYGGFDSPTVAYSVLVVAKVEKGKSKKLKSVKELLGITIMERSSFEKNPIDFLEAKGYKEVKKDLIIKLPKYSLFELENGRKRMLASAGELQKGNELALPSKYVNFLYLASHYEKLKGSPEDNEQKQLFVEQHKHYLDEIIEQISEFSKRVILADANLDKVLSAYNKHRDKPIREQAENIIHLFTLTNLGAPAAFKYFDTTIDRKRYTSTKEVLDATLIHQSITGLYETRIDLSQLGGDGGGGGGSGGGGSGGLGIEDEYRLHETSTEPDVSLGSTWLSDFPQAWAETGGMGLAVRQAPLIIPLKATSTPVSIQQYPMSHEARLGIKPHIQRLLDQGILVPCQSPWNTPLLPVKKPGTNDYRPVQDLREVNKRVEDIHPTVPNPYNLLSGLPPSHQWYTVLDLKDAFFCLRLHPTSQPLFAFEWRDPGMGISGQLTWTRLPQGFKNSPTLFNEALHRDLADFRIQHPDLILLQYVDDILLAATSELDCQQGTRALLQTLGDLGYRASAKKAQICQKQVKYLGYLLREGQRWLTEARKETVMGQPVPKTPRQLREFLGKAGFCRLFIPGFAEMAAPLYPLTKPGTLFSWGPDQQKAYQEIKQALLTAPALGLPDLTKPFELFVDEKQGYAKGVLTQKLGPWRRPVAYLSKKLDPVAAGWPPCLRMVAAIAVLTKDAGKLTMGQPLVILAPHAVEALVKQPPDRWLSNARMTHYQAMLLDTDRVQFGPVVALNPATLLPLPEEGAPHDCLEILAETHGTRPDLTDQPIPDADHTWYTDGSSFLQEGQRKAGAAVTTETEVIWAGALPAGTSAQRAELIALTQALKMAEGKRLNVYTDSRYAFATAHIHGEIYRRRGWLTSEGREIKNKSEILALLKALFLPKRLSIIHCLGHQKGDSAEARGNRLADQAAREAAIKTPPDTSTLLIAGKRTADGSEFEKRTADGSEFESPKKKAKVE

SEQ ID NO: 2158 - protein, 2091 aa, synthetic construct
MPAAKRVKLDGGDKKYSIGLDIGTNSVGWAVITDEYKVPSKKFKVLGNTDRHSIKKNLIGALLFDSGETAEATRLKRTARRRYTRRKNRICYLQEIFSNEMAKVDDSFFHRLEESFLVEEDKKHERHPIFGNIVDEVAYHEKYPTIYHLRKKLVDSTDKADLRLIYLALAHMIKFRGHFLIEGDLNPDNSDVDKLFIQLVQTYNQLFEENPINASGVDAKAILSARLSKSRRLENLIAQLPGEKKNGLFGNLIALSLGLTPNFKSNFDLAEDAKLQLSKDTYDDDLDNLLAQIGDQYADLFLAAKNLSDAILLSDILRVNTEITKAPLSASMIKRYDEHHQDLTLLKALVRQQLPEKYKEIFFDQSKNGYAGYIDGGASQEEFYKFIKPILEKMDGTEELLVKLNREDLLRKQRTFDNGSIPHQIHLGELHAILRRQEDFYPFLKDNREKIEKILTFRIPYYVGPLARGNSRFAWMTRKSEETITPWNFEEVVDKGASAQSFIERMTNFDKNLPNEKVLPKHSLLYEYFTVYNELTKVKYVTEGMRKPAFLSGEQKKAIVDLLFKTNRKVTVKQLKEDYFKKIECFDSVEISGVEDRFNASLGTYHDLLKIIKDKDFLDNEENEDILEDIVLTLTLFEDREMIEERLKTYAHLFDDKVMKQLKRRRYTGWGRLSRKLINGIRDKQSGKTILDFLKSDGFANRNFMQLIHDDSLTFKEDIQKAQVSGQGDSLHEHIANLAGSPAIKKGILQTVKVVDELVKVMGRHKPENIVIEMARENQTTQKGQKNSRERMKRIEEGIKELGSQILKEHPVENTQLQNEKLYLYYLQNGRDMYVDQELDINRLSDYDVDHIVPQSFLKDDSIDNKVLTRSDKARGKSDNVPSEEVVKKMKNYWRQLLNAKLITQRKFDNLTKAERGGLSELDKAGFIKRQLVETRQITKHVAQILDSRMNTKYDENDKLIREVKVITLKSKLVSDFRKDFQFYKVREINNYHHAHDAYLNAVVGTALIKKYPKLESEFVYGDYKVYDVRKMIAKSEQEIGKATAKYFFYSNIMNFFKTEITLANGEIRKRPLIETNGETGEIVWDKGRDFATVRKVLSMPQVNIVKKTEVQTGGFSKESILPKRNSDKLIARKKDWDPKKYGGFDSPTVAYSVLVVAKVEKGKSKKLKSVKELLGITIMERSSFEKNPIDFLEAKGYKEVKKDLIIKLPKYSLFELENGRKRMLASAGELQKGNELALPSKYVNFLYLASHYEKLKGSPEDNEQKQLFVEQHKHYLDEIIEQISEFSKRVILADANLDKVLSAYNKHRDKPIREQAENIIHLFTLTNLGAPAAFKYFDTTIDRKRYTSTKEVLDATLIHQSITGLYETRIDLSQLGGDGGGGSGSSGGLGIEDEYRLHETSTEPDVSLGSTWLSDFPQAWAETGGMGLAVRQAPLIIPLKATSTPVSIQQYPMSHEARLGIKPHIQRLLDQGILVPCQSPWNTPLLPVKKPGTNDYRPVQDLREVNKRVEDIHPTVPNPYNLLSGLPPSHQWYTVLDLKDAFFCLRLHPTSQPLFAFEWRDPGMGISGQLTWTRLPQGFKNSPTLFNEALHRDLADFRIQHPDLILLQYVDDILLAATSELDCQQGTRALLQTLGDLGYRASAKKAQICQKQVKYLGYLLREGQRWLTEARKETVMGQPVPKTPRQLREFLGKAGFCRLFIPGFAEMAAPLYPLTKPGTLFSWGPDQQKAYQEIKQALLTAPALGLPDLTKPFELFVDEKQGYAKGVLTQKLGPWRRPVAYLSKKLDPVAAGWPPCLRMVAAIAVLTKDAGKLTMGQPLVILAPHAVEALVKQPPDRWLSNARMTHYQAMLLDTDRVQFGPVVALNPATLLPLPEEGAPHDCLEILAETHGTRPDLTDQPIPDADHTWYTDGSSFLQEGQRKAGAAVTTETEVIWAGALPAGTSAQRAELIALTQALKMAEGKRLNVYTDSRYAFATAHIHGEIYRRRGWLTSEGREIKNKSEILALLKALFLPKRLSIIHCLGHQKGDSAEARGNRLADQAAREAAIKTPPDTSTLLIAGKRTADGSEFEKRTADGSEFESPKKKAKVE

SEQ ID NO: 2159 - protein, 2096 aa, synthetic construct; identical to SEQ ID NO: 2055

SEQ ID NO: 2160 - protein, 2094 aa, synthetic construct
MPAAKRVKLDGGDKKYSIGLDIGTNSVGWAVITDEYKVPSKKFKVLGNTDRHSIKKNLIGALLFDSGETAEATRLKRTARRRYTRRKNRICYLQEIFSNEMAKVDDSFFHRLEESFLVEEDKKHERHPIFGNIVDEVAYHEKYPTIYHLRKKLVDSTDKADLRLIYLALAHMIKFRGHFLIEGDLNPDNSDVDKLFIQLVQTYNQLFEENPINASGVDAKAILSARLSKSRRLENLIAQLPGEKKNGLFGNLIALSLGLTPNFKSNFDLAEDAKLQLSKDTYDDDLDNLLAQIGDQYADLFLAAKNLSDAILLSDILRVNTEITKAPLSASMIKRYDEHHQDLTLLKALVRQQLPEKYKEIFFDQSKNGYAGYIDGGASQEEFYKFIKPILEKMDGTEELLVKLNREDLLRKQRTFDNGSIPHQIHLGELHAILRRQEDFYPFLKDNREKIEKILTFRIPYYVGPLARGNSRFAWMTRKSEETITPWNFEEVVDKGASAQSFIERMTNFDKNLPNEKVLPKHSLLYEYFTVYNELTKVKYVTEGMRKPAFLSGEQKKAIVDLLFKTNRKVTVKQLKEDYFKKIECFDSVEISGVEDRFNASLGTYHDLLKIIKDKDFLDNEENEDILEDIVLTLTLFEDREMIEERLKTYAHLFDDKVMKQLKRRRYTGWGRLSRKLINGIRDKQSGKTILDFLKSDGFANRNFMQLIHDDSLTFKEDIQKAQVSGQGDSLHEHIANLAGSPAIKKGILQTVKVVDELVKVMGRHKPENIVIEMARENQTTQKGQKNSRERMKRIEEGIKELGSQILKEHPVENTQLQNEKLYLYYLQNGRDMYVDQELDINRLSDYDVDHIVPQSFLKDDSIDNKVLTRSDKARGKSDNVPSEEVVKKMKNYWRQLLNAKLITQRKFDNLTKAERGGLSELDKAGFIKRQLVETRQITKHVAQILDSRMNTKYDENDKLIREVKVITLKSKLVSDFRKDFQFYKVREINNYHHAHDAYLNAVVGTALIKKYPKLESEFVYGDYKVYDVRKMIAKSEQEIGKATAKYFFYSNIMNFFKTEITLANGEIRKRPLIETNGETGEIVWDKGRDFATVRKVLSMPQVNIVKKTEVQTGGFSKESILPKRNSDKLIARKKDWDPKKYGGFDSPTVAYSVLVVAKVEKGKSKKLKSVKELLGITIMERSSFEKNPIDFLEAKGYKEVKKDLIIKLPKYSLFELENGRKRMLASAGELQKGNELALPSKYVNFLYLASHYEKLKGSPEDNEQKQLFVEQHKHYLDEIIEQISEFSKRVILADANLDKVLSAYNKHRDKPIREQAENIIHLFTLTNLGAPAAFKYFDTTIDRKRYTSTKEVLDATLIHQSITGLYETRIDLSQLGGDGGGGGGGSGSSGGLGIEDEYRLHETSTEPDVSLGSTWLSDFPQAWAETGGMGLAVRQAPLIIPLKATSTPVSIQQYPMSHEARLGIKPHIQRLLDQGILVPCQSPWNTPLLPVKKPGTNDYRPVQDLREVNKRVEDIHPTVPNPYNLLSGLPPSHQWYTVLDLKDAFFCLRLHPTSQPLFAFEWRDPGMGISGQLTWTRLPQGFKNSPTLFNEALHRDLADFRIQHPDLILLQYVDDILLAATSELDCQQGTRALLQTLGDLGYRASAKKAQICQKQVKYLGYLLREGQRWLTEARKETVMGQPVPKTPRQLREFLGKAGFCRLFIPGFAEMAAPLYPLTKPGTLFSWGPDQQKAYQEIKQALLTAPALGLPDLTKPFELFVDEKQGYAKGVLTQKLGPWRRPVAYLSKKLDPVAAGWPPCLRMVAAIAVLTKDAGKLTMGQPLVILAPHAVEALVKQPPDRWLSNARMTHYQAMLLDTDRVQFGPVVALNPATLLPLPEEGAPHDCLEILAETHGTRPDLTDQPIPDADHTWYTDGSSFLQEGQRKAGAAVTTETEVIWAGALPAGTSAQRAELIALTQALKMAEGKRLNVYTDSRYAFATAHIHGEIYRRRGWLTSEGREIKNKSEILALLKALFLPKRLSIIHCLGHQKGDSAEARGNRLADQAAREAAIKTPPDTSTLLIAGKRTADGSEFEKRTADGSEFESPKKKAKVE

SEQ ID NO: 2161 - protein, 2096 aa, synthetic construct
MPAAKRVKLDGGDKKYSIGLDIGTNSVGWAVITDEYKVPSKKFKVLGNTDRHSIKKNLIGALLFDSGETAEATRLKRTARRRYTRRKNRICYLQEIFSNEMAKVDDSFFHRLEESFLVEEDKKHERHPIFGNIVDEVAYHEKYPTIYHLRKKLVDSTDKADLRLIYLALAHMIKFRGHFLIEGDLNPDNSDVDKLFIQLVQTYNQLFEENPINASGVDAKAILSARLSKSRRLENLIAQLPGEKKNGLFGNLIALSLGLTPNFKSNFDLAEDAKLQLSKDTYDDDLDNLLAQIGDQYADLFLAAKNLSDAILLSDILRVNTEITKAPLSASMIKRYDEHHQDLTLLKALVRQQLPEKYKEIFFDQSKNGYAGYIDGGASQEEFYKFIKPILEKMDGTEELLVKLNREDLLRKQRTFDNGSIPHQIHLGELHAILRRQEDFYPFLKDNREKIEKILTFRIPYYVGPLARGNSRFAWMTRKSEETITPWNFEEVVDKGASAQSFIERMTNFDKNLPNEKVLPKHSLLYEYFTVYNELTKVKYVTEGMRKPAFLSGEQKKAIVDLLFKTNRKVTVKQLKEDYFKKIECFDSVEISGVEDRFNASLGTYHDLLKIIKDKDFLDNEENEDILEDIVLTLTLFEDREMIEERLKTYAHLFDDKVMKQLKRRRYTGWGRLSRKLINGIRDKQSGKTILDFLKSDGFANRNFMQLIHDDSLTFKEDIQKAQVSGQGDSLHEHIANLAGSPAIKKGILQTVKVVDELVKVMGRHKPENIVIEMARENQTTQKGQKNSRERMKRIEEGIKELGSQILKEHPVENTQLQNEKLYLYYLQNGRDMYVDQELDINRLSDYDVDHIVPQSFLKDDSIDNKVLTRSDKARGKSDNVPSEEVVKKMKNYWRQLLNAKLITQRKFDNLTKAERGGLSELDKAGFIKRQLVETRQITKHVAQILDSRMNTKYDENDKLIREVKVITLKSKLVSDFRKDFQFYKVREINNYHHAHDAYLNAVVGTALIKKYPKLESEFVYGDYKVYDVRKMIAKSEQEIGKATAKYFFYSNIMNFFKTEITLANGEIRKRPLIETNGETGEIVWDKGRDFATVRKVLSMPQVNIVKKTEVQTGGFSKESILPKRNSDKLIARKKDWDPKKYGGFDSPTVAYSVLVVAKVEKGKSKKLKSVKELLGITIMERSSFEKNPIDFLEAKGYKEVKKDLIIKLPKYSLFELENGRKRMLASAGELQKGNELALPSKYVNFLYLASHYEKLKGSPEDNEQKQLFVEQHKHYLDEIIEQISEFSKRVILADANLDKVLSAYNKHRDKPIREQAENIIHLFTLTNLGAPAAFKYFDTTIDRKRYTSTKEVLDATLIHQSITGLYETRIDLSQLGGDGGEAAAKGGGGGSGGLGIEDEYRLHETSTEPDVSLGSTWLSDFPQAWAETGGMGLAVRQAPLIIPLKATSTPVSIQQYPMSHEARLGIKPHIQRLLDQGILVPCQSPWNTPLLPVKKPGTNDYRPVQDLREVNKRVEDIHPTVPNPYNLLSGLPPSHQWYTVLDLKDAFFCLRLHPTSQPLFAFEWRDPGMGISGQLTWTRLPQGFKNSPTLFNEALHRDLADFRIQHPDLILLQYVDDILLAATSELDCQQGTRALLQTLGDLGYRASAKKAQICQKQVKYLGYLLREGQRWLTEARKETVMGQPVPKTPRQLREFLGKAGFCRLFIPGFAEMAAPLYPLTKPGTLFSWGPDQQKAYQEIKQALLTAPALGLPDLTKPFELFVDEKQGYAKGVLTQKLGPWRRPVAYLSKKLDPVAAGWPPCLRMVAAIAVLTKDAGKLTMGQPLVILAPHAVEALVKQPPDRWLSNARMTHYQAMLLDTDRVQFGPVVALNPATLLPLPEEGAPHDCLEILAETHGTRPDLTDQPIPDADHTWYTDGSSFLQEGQRKAGAAVTTETEVIWAGALPAGTSAQRAELIALTQALKMAEGKRLNVYTDSRYAFATAHIHGEIYRRRGWLTSEGREIKNKSEILALLKALFLPKRLSIIHCLGHQKGDSAEARGNRLADQAAREAAIKTPPDTSTLLIAGKRTADGSEFEKRTADGSEFESPKKKAKVE

SEQ ID NO: 2162 - protein, 2091 aa, synthetic construct
MPAAKRVKLDGGDKKYSIGLDIGTNSVGWAVITDEYKVPSKKFKVLGNTDRHSIKKNLIGALLFDSGETAEATRLKRTARRRYTRRKNRICYLQEIFSNEMAKVDDSFFHRLEESFLVEEDKKHERHPIFGNIVDEVAYHEKYPTIYHLRKKLVDSTDKADLRLIYLALAHMIKFRGHFLIEGDLNPDNSDVDKLFIQLVQTYNQLFEENPINASGVDAKAILSARLSKSRRLENLIAQLPGEKKNGLFGNLIALSLGLTPNFKSNFDLAEDAKLQLSKDTYDDDLDNLLAQIGDQYADLFLAAKNLSDAILLSDILRVNTEITKAPLSASMIKRYDEHHQDLTLLKALVRQQLPEKYKEIFFDQSKNGYAGYIDGGASQEEFYKFIKPILEKMDGTEELLVKLNREDLLRKQRTFDNGSIPHQIHLGELHAILRRQEDFYPFLKDNREKIEKILTFRIPYYVGPLARGNSRFAWMTRKSEETITPWNFEEVVDKGASAQSFIERMTNFDKNLPNEKVLPKHSLLYEYFTVYNELTKVKYVTEGMRKPAFLSGEQKKAIVDLLFKTNRKVTVKQLKEDYFKKIECFDSVEISGVEDRFNASLGTYHDLLKIIKDKDFLDNEENEDILEDIVLTLTLFEDREMIEERLKTYAHLFDDKVMKQLKRRRYTGWGRLSRKLINGIRDKQSGKTILDFLKSDGFANRNFMQLIHDDSLTFKEDIQKAQVSGQGDSLHEHIANLAGSPAIKKGILQTVKVVDELVKVMGRHKPENIVIEMARENQTTQKGQKNSRERMKRIEEGIKELGSQILKEHPVENTQLQNEKLYLYYLQNGRDMYVDQELDINRLSDYDVDHIVPQSFLKDDSIDNKVLTRSDKARGKSDNVPSEEVVKKMKNYWRQLLNAKLITQRKFDNLTKAERGGLSELDKAGFIKRQLVETRQITKHVAQILDSRMNTKYDENDKLIREVKVITLKSKLVSDFRKDFQFYKVREINNYHHAHDAYLNAVVGTALIKKYPKLESEFVYGDYKVYDVRKMIAKSEQEIGKATAKYFFYSNIMNFFKTEITLANGEIRKRPLIETNGETGEIVWDKGRDFATVRKVLSMPQVNIVKKTEVQTGGFSKESILPKRNSDKLIARKKDWDPKKYGGFDSPTVAYSVLVVAKVEKGKSKKLKSVKELLGITIMERSSFEKNPIDFLEAKGYKEVKKDLIIKLPKYSLFELENGRKRMLASAGELQKGNELALPSKYVNFLYLASHYEKLKGSPEDNEQKQLFVEQHKHYLDEIIEQISEFSKRVILADANLDKVLSAYNKHRDKPIREQAENIIHLFTLTNLGAPAAFKYFDTTIDRKRYTSTKEVLDATLIHQSITGLYETRIDLSQLGGDGGPAPGGSGGLGIEDEYRLHETSTEPDVSLGSTWLSDFPQAWAETGGMGLAVRQAPLIIPLKATSTPVSIQQYPMSHEARLGIKPHIQRLLDQGILVPCQSPWNTPLLPVKKPGTNDYRPVQDLREVNKRVEDIHPTVPNPYNLLSGLPPSHQWYTVLDLKDAFFCLRLHPTSQPLFAFEWRDPGMGISGQLTWTRLPQGFKNSPTLFNEALHRDLADFRIQHPDLILLQYVDDILLAATSELDCQQGTRALLQTLGDLGYRASAKKAQICQKQVKYLGYLLREGQRWLTEARKETVMGQPVPKTPRQLREFLGKAGFCRLFIPGFAEMAAPLYPLTKPGTLFSWGPDQQKAYQEIKQALLTAPALGLPDLTKPFELFVDEKQGYAKGVLTQKLGPWRRPVAYLSKKLDPVAAGWPPCLRMVAAIAVLTKDAGKLTMGQPLVILAPHAVEALVKQPPDRWLSNARMTHYQAMLLDTDRVQFGPVVALNPATLLPLPEEGAPHDCLEILAETHGTRPDLTDQPIPDADHTWYTDGSSFLQEGQRKAGAAVTTETEVIWAGALPAGTSAQRAELIALTQALKMAEGKRLNVYTDSRYAFATAHIHGEIYRRRGWLTSEGREIKNKSEILALLKALFLPKRLSIIHCLGHQKGDSAEARGNRLADQAAREAAIKTPPDTSTLLIAGKRTADGSEFEKRTADGSEFESPKKKAKVE

SEQ ID NO: 2163 - protein, 2096 aa, synthetic construct
MPAAKRVKLDGGDKKYSIGLDIGTNSVGWAVITDEYKVPSKKFKVLGNTDRHSIKKNLIGALLFDSGETAEATRLKRTARRRYTRRKNRICYLQEIFSNEMAKVDDSFFHRLEESFLVEEDKKHERHPIFGNIVDEVAYHEKYPTIYHLRKKLVDSTDKADLRLIYLALAHMIKFRGHFLIEGDLNPDNSDVDKLFIQLVQTYNQLFEENPINASGVDAKAILSARLSKSRRLENLIAQLPGEKKNGLFGNLIALSLGLTPNFKSNFDLAEDAKLQLSKDTYDDDLDNLLAQIGDQYADLFLAAKNLSDAILLSDILRVNTEITKAPLSASMIKRYDEHHQDLTLLKALVRQQLPEKYKEIFFDQSKNGYAGYIDGGASQEEFYKFIKPILEKMDGTEELLVKLNREDLLRKQRTFDNGSIPHQIHLGELHAILRRQEDFYPFLKDNREKIEKILTFRIPYYVGPLARGNSRFAWMTRKSEETITPWNFEEVVDKGASAQSFIERMTNFDKNLPNEKVLPKHSLLYEYFTVYNELTKVKYVTEGMRKPAFLSGEQKKAIVDLLFKTNRKVTVKQLKEDYFKKIECFDSVEISGVEDRFNASLGTYHDLLKIIKDKDFLDNEENEDILEDIVLTLTLFEDREMIEERLKTYAHLFDDKVMKQLKRRRYTGWGRLSRKLINGIRDKQSGKTILDFLKSDGFANRNFMQLIHDDSLTFKEDIQKAQVSGQGDSLHEHIANLAGSPAIKKGILQTVKVVDELVKVMGRHKPENIVIEMARENQTTQKGQKNSRERMKRIEEGIKELGSQILKEHPVENTQLQNEKLYLYYLQNGRDMYVDQELDINRLSDYDVDHIVPQSFLKDDSIDNKVLTRSDKARGKSDNVPSEEVVKKMKNYWRQLLNAKLITQRKFDNLTKAERGGLSELDKAGFIKRQLVETRQITKHVAQILDSRMNTKYDENDKLIREVKVITLKSKLVSDFRKDFQFYKVREINNYHHAHDAYLNAVVGTALIKKYPKLESEFVYGDYKVYDVRKMIAKSEQEIGKATAKYFFYSNIMNFFKTEITLANGEIRKRPLIETNGETGEIVWDKGRDFATVRKVLSMPQVNIVKKTEVQTGGFSKESILPKRNSDKLIARKKDWDPKKYGGFDSPTVAYSVLVVAKVEKGKSKKLKSVKELLGITIMERSSFEKNPIDFLEAKGYKEVKKDLIIKLPKYSLFELENGRKRMLASAGELQKGNELALPSKYVNFLYLASHYEKLKGSPEDNEQKQLFVEQHKHYLDEIIEQISEFSKRVILADANLDKVLSAYNKHRDKPIREQAENIIHLFTLTNLGAPAAFKYFDTTIDRKRYTSTKEVLDATLIHQSITGLYETRIDLSQLGGDGGEAAAKPAPGSSGGLGIEDEYRLHETSTEPDVSLGSTWLSDFPQAWAETGGMGLAVRQAPLIIPLKATSTPVSIQQYPMSHEARLGIKPHIQRLLDQGILVPCQSPWNTPLLPVKKPGTNDYRPVQDLREVNKRVEDIHPTVPNPYNLLSGLPPSHQWYTVLDLKDAFFCLRLHPTSQPLFAFEWRDPGMGISGQLTWTRLPQGFKNSPTLFNEALHRDLADFRIQHPDLILLQYVDDILLAATSELDCQQGTRALLQTLGDLGYRASAKKAQICQKQVKYLGYLLREGQRWLTEARKETVMGQPVPKTPRQLREFLGKAGFCRLFIPGFAEMAAPLYPLTKPGTLFSWGPDQQKAYQEIKQALLTAPALGLPDLTKPFELFVDEKQGYAKGVLTQKLGPWRRPVAYLSKKLDPVAAGWPPCLRMVAAIAVLTKDAGKLTMGQPLVILAPHAVEALVKQPPDRWLSNARMTHYQAMLLDTDRVQFGPVVALNPATLLPLPEEGAPHDCLEILAETHGTRPDLTDQPIPDADHTWYTDGSSFLQEGQRKAGAAVTTETEVIWAGALPAGTSAQRAELIALTQALKMAEGKRLNVYTDSRYAFATAHIHGEIYRRRGWLTSEGREIKNKSEILALLKALFLPKRLSIIHCLGHQKGDSAEARGNRLADQAAREAAIKTPPDTSTLLIAGKRTADGSEFEKRTADGSEFESPKKKAKVE

SEQ ID NO: 2164 - protein, 2100 aa, synthetic construct
MPAAKRVKLDGGDKKYSIGLDIGTNSVGWAVITDEYKVPSKKFKVLGNTDRHSIKKNLIGALLFDSGETAEATRLKRTARRRYTRRKNRICYLQEIFSNEMAKVDDSFFHRLEESFLVEEDKKHERHPIFGNIVDEVAYHEKYPTIYHLRKKLVDSTDKADLRLIYLALAHMIKFRGHFLIEGDLNPDNSDVDKLFIQLVQTYNQLFEENPINASGVDAKAILSARLSKSRRLENLIAQLPGEKKNGLFGNLIALSLGLTPNFKSNFDLAEDAKLQLSKDTYDDDLDNLLAQIGDQYADLFLAAKNLSDAILLSDILRVNTEITKAPLSASMIKRYDEHHQDLTLLKALVRQQLPEKYKEIFFDQSKNGYAGYIDGGASQEEFYKFIKPILEKMDGTEELLVKLNREDLLRKQRTFDNGSIPHQIHLGELHAILRRQEDFYPFLKDNREKIEKILTFRIPYYVGPLARGNSRFAWMTRKSEETITPWNFEEVVDKGASAQSFIERMTNFDKNLPNEKVLPKHSLLYEYFTVYNELTKVKYVTEGMRKPAFLSGEQKKAIVDLLFKTNRKVTVKQLKEDYFKKIECFDSVEISGVEDRFNASLGTYHDLLKIIKDKDFLDNEENEDILEDIVLTLTLFEDREMIEERLKTYAHLFDDKVMKQLKRRRYTGWGRLSRKLINGIRDKQSGKTILDFLKSDGFANRNFMQLIHDDSLTFKEDIQKAQVSGQGDSLHEHIANLAGSPAIKKGILQTVKVVDELVKVMGRHKPENIVIEMARENQTTQKGQKNSRERMKRIEEGIKELGSQILKEHPVENTQLQNEKLYLYYLQNGRDMYVDQELDINRLSDYDVDHIVPQSFLKDDSIDNKVLTRSDKARGKSDNVPSEEVVKKMKNYWRQLLNAKLITQRKFDNLTKAERGGLSELDKAGFIKRQLVETRQITKHVAQILDSRMNTKYDENDKLIREVKVITLKSKLVSDFRKDFQFYKVREINNYHHAHDAYLNAVVGTALIKKYPKLESEFVYGDYKVYDVRKMIAKSEQEIGKATAKYFFYSNIMNFFKTEITLANGEIRKRPLIETNGETGEIVWDKGRDFATVRKVLSMPQVNIVKKTEVQTGGFSKESILPKRNSDKLIARKKDWDPKKYGGFDSPTVAYSVLVVAKVEKGKSKKLKSVKELLGITIMERSSFEKNPIDFLEAKGYKEVKKDLIIKLPKYSLFELENGRKRMLASAGELQKGNELALPSKYVNFLYLASHYEKLKGSPEDNEQKQLFVEQHKHYLDEIIEQISEFSKRVILADANLDKVLSAYNKHRDKPIREQAENIIHLFTLTNLGAPAAFKYFDTTIDRKRYTSTKEVLDATLIHQSITGLYETRIDLSQLGGDGGGSSGSSGSSGSSGSSGGLGIEDEYRLHETSTEPDVSLGSTWLSDFPQAWAETGGMGLAVRQAPLIIPLKATSTPVSIQQYPMSHEARLGIKPHIQRLLDQGILVPCQSPWNTPLLPVKKPGTNDYRPVQDLREVNKRVEDIHPTVPNPYNLLSGLPPSHQWYTVLDLKDAFFCLRLHPTSQPLFAFEWRDPGMGISGQLTWTRLPQGFKNSPTLFNEALHRDLADFRIQHPDLILLQYVDDILLAATSELDCQQGTRALLQTLGDLGYRASAKKAQICQKQVKYLGYLLREGQRWLTEARKETVMGQPVPKTPRQLREFLGKAGFCRLFIPGFAEMAAPLYPLTKPGTLFSWGPDQQKAYQEIKQALLTAPALGLPDLTKPFELFVDEKQGYAKGVLTQKLGPWRRPVAYLSKKLDPVAAGWPPCLRMVAAIAVLTKDAGKLTMGQPLVILAPHAVEALVKQPPDRWLSNARMTHYQAMLLDTDRVQFGPVVALNPATLLPLPEEGAPHDCLEILAETHGTRPDLTDQPIPDADHTWYTDGSSFLQEGQRKAGAAVTTETEVIWAGALPAGTSAQRAELIALTQALKMAEGKRLNVYTDSRYAFATAHIHGEIYRRRGWLTSEGREIKNKSEILALLKALFLPKRLSIIHCLGHQKGDSAEARGNRLADQAAREAAIKTPPDTSTLLIAGKRTADGSEFEKRTADGSEFESPKKKAKVE

SEQ ID NO: 2165 - protein, 2094 aa, synthetic construct
MPAAKRVKLDGGDKKYSIGLDIGTNSVGWAVITDEYKVPSKKFKVLGNTDRHSIKKNLIGALLFDSGETAEATRLKRTARRRYTRRKNRICYLQEIFSNEMAKVDDSFFHRLEESFLVEEDKKHERHPIFGNIVDEVAYHEKYPTIYHLRKKLVDSTDKADLRLIYLALAHMIKFRGHFLIEGDLNPDNSDVDKLFIQLVQTYNQLFEENPINASGVDAKAILSARLSKSRRLENLIAQLPGEKKNGLFGNLIALSLGLTPNFKSNFDLAEDAKLQLSKDTYDDDLDNLLAQIGDQYADLFLAAKNLSDAILLSDILRVNTEITKAPLSASMIKRYDEHHQDLTLLKALVRQQLPEKYKEIFFDQSKNGYAGYIDGGASQEEFYKFIKPILEKMDGTEELLVKLNREDLLRKQRTFDNGSIPHQIHLGELHAILRRQEDFYPFLKDNREKIEKILTFRIPYYVGPLARGNSRFAWMTRKSEETITPWNFEEVVDKGASAQSFIERMTNFDKNLPNEKVLPKHSLLYEYFTVYNELTKVKYVTEGMRKPAFLSGEQKKAIVDLLFKTNRKVTVKQLKEDYFKKIECFDSVEISGVEDRFNASLGTYHDLLKIIKDKDFLDNEENEDILEDIVLTLTLFEDREMIEERLKTYAHLFDDKVMKQLKRRRYTGWGRLSRKLINGIRDKQSGKTILDFLKSDGFANRNFMQLIHDDSLTFKEDIQKAQVSGQGDSLHEHIANLAGSPAIKKGILQTVKVVDELVKVMGRHKPENIVIEMARENQTTQKGQKNSRERMKRIEEGIKELGSQILKEHPVENTQLQNEKLYLYYLQNGRDMYVDQELDINRLSDYDVDHIVPQSFLKDDSIDNKVLTRSDKARGKSDNVPSEEVVKKMKNYWRQLLNAKLITQRKFDNLTKAERGGLSELDKAGFIKRQLVETRQITKHVAQILDSRMNTKYDENDKLIREVKVITLKSKLVSDFRKDFQFYKVREINNYHHAHDAYLNAVVGTALIKKYPKLESEFVYGDYKVYDVRKMIAKSEQEIGKATAKYFFYSNIMNFFKTEITLANGEIRKRPLIETNGETGEIVWDKGRDFATVRKVLSMPQVNIVKKTEVQTGGFSKESILPKRNSDKLIARKKDWDPKKYGGFDSPTVAYSVLVVAKVEKGKSKKLKSVKELLGITIMERSSFEKNPIDFLEAKGYKEVKKDLIIKLPKYSLFELENGRKRMLASAGELQKGNELALPSKYVNFLYLASHYEKLKGSPEDNEQKQLFVEQHKHYLDEIIEQISEFSKRVILADANLDKVLSAYNKHRDKPIREQAENIIHLFTLTNLGAPAAFKYFDTTIDRKRYTSTKEVLDATLIHQSITGLYETRIDLSQLGGDGGGSSGGSGGGGGLGIEDEYRLHETSTEPDVSLGSTWLSDFPQAWAETGGMGLAVRQAPLIIPLKATSTPVSIQQYPMSHEARLGIKPHIQRLLDQGILVPCQSPWNTPLLPVKKPGTNDYRPVQDLREVNKRVEDIHPTVPNPYNLLSGLPPSHQWYTVLDLKDAFFCLRLHPTSQPLFAFEWRDPGMGISGQLTWTRLPQGFKNSPTLFNEALHRDLADFRIQHPDLILLQYVDDILLAATSELDCQQGTRALLQTLGDLGYRASAKKAQICQKQVKYLGYLLREGQRWLTEARKETVMGQPVPKTPRQLREFLGKAGFCRLFIPGFAEMAAPLYPLTKPGTLFSWGPDQQKAYQEIKQALLTAPALGLPDLTKPFELFVDEKQGYAKGVLTQKLGPWRRPVAYLSKKLDPVAAGWPPCLRMVAAIAVLTKDAGKLTMGQPLVILAPHAVEALVKQPPDRWLSNARMTHYQAMLLDTDRVQFGPVVALNPATLLPLPEEGAPHDCLEILAETHGTRPDLTDQPIPDADHTWYTDGSSFLQEGQRKAGAAVTTETEVIWAGALPAGTSAQRAELIALTQALKMAEGKRLNVYTDSRYAFATAHIHGEIYRRRGWLTSEGREIKNKSEILALLKALFLPKRLSIIHCLGHQKGDSAEARGNRLADQAAREAAIKTPPDTSTLLIAGKRTADGSEFEKRTADGSEFESPKKKAKVE

SEQ ID NO: 2166 - protein, 2094 aa, synthetic construct; identical to SEQ ID NO: 2051

SEQ ID NO: 2167 - protein, 2092 aa, synthetic construct
MPAAKRVKLDGGDKKYSIGLDIGTNSVGWAVITDEYKVPSKKFKVLGNTDRHSIKKNLIGALLFDSGETAEATRLKRTARRRYTRRKNRICYLQEIFSNEMAKVDDSFFHRLEESFLVEEDKKHERHPIFGNIVDEVAYHEKYPTIYHLRKKLVDSTDKADLRLIYLALAHMIKFRGHFLIEGDLNPDNSDVDKLFIQLVQTYNQLFEENPINASGVDAKAILSARLSKSRRLENLIAQLPGEKKNGLFGNLIALSLGLTPNFKSNFDLAEDAKLQLSKDTYDDDLDNLLAQIGDQYADLFLAAKNLSDAILLSDILRVNTEITKAPLSASMIKRYDEHHQDLTLLKALVRQQLPEKYKEIFFDQSKNGYAGYIDGGASQEEFYKFIKPILEKMDGTEELLVKLNREDLLRKQRTFDNGSIPHQIHLGELHAILRRQEDFYPFLKDNREKIEKILTFRIPYYVGPLARGNSRFAWMTRKSEETITPWNFEEVVDKGASAQSFIERMTNFDKNLPNEKVLPKHSLLYEYFTVYNELTKVKYVTEGMRKPAFLSGEQKKAIVDLLFKTNRKVTVKQLKEDYFKKIECFDSVEISGVEDRFNASLGTYHDLLKIIKDKDFLDNEENEDILEDIVLTLTLFEDREMIEERLKTYAHLFDDKVMKQLKRRRYTGWGRLSRKLINGIRDKQSGKTILDFLKSDGFANRNFMQLIHDDSLTFKEDIQKAQVSGQGDSLHEHIANLAGSPAIKKGILQTVKVVDELVKVMGRHKPENIVIEMARENQTTQKGQKNSRERMKRIEEGIKELGSQILKEHPVENTQLQNEKLYLYYLQNGRDMYVDQELDINRLSDYDVDHIVPQSFLKDDSIDNKVLTRSDKARGKSDNVPSEEVVKKMKNYWRQLLNAKLITQRKFDNLTKAERGGLSELDKAGFIKRQLVETRQITKHVAQILDSRMNTKYDENDKLIREVKVITLKSKLVSDFRKDFQFYKVREINNYHHAHDAYLNAVVGTALIKKYPKLESEFVYGDYKVYDVRKMIAKSEQEIGKATAKYFFYSNIMNFFKTEITLANGEIRKRPLIETNGETGEIVWDKGRDFATVRKVLSMPQVNIVKKTEVQTGGFSKESILPKRNSDKLIARKKDWDPKKYGGFDSPTVAYSVLVVAKVEKGKSKKLKSVKELLGITIMERSSFEKNPIDFLEAKGYKEVKKDLIIKLPKYSLFELENGRKRMLASAGELQKGNELALPSKYVNFLYLASHYEKLKGSPEDNEQKQLFVEQHKHYLDEIIEQISEFSKRVILADANLDKVLSAYNKHRDKPIREQAENIIHLFTLTNLGAPAAFKYFDTTIDRKRYTSTKEVLDATLIHQSITGLYETRIDLSQLGGDGGPAPAPAPGGLGIEDEYRLHETSTEPDVSLGSTWLSDFPQAWAETGGMGLAVRQAPLIIPLKATSTPVSIQQYPMSHEARLGIKPHIQRLLDQGILVPCQSPWNTPLLPVKKPGTNDYRPVQDLREVNKRVEDIHPTVPNPYNLLSGLPPSHQWYTVLDLKDAFFCLRLHPTSQPLFAFEWRDPGMGISGQLTWTRLPQGFKNSPTLFNEALHRDLADFRIQHPDLILLQYVDDILLAATSELDCQQGTRALLQTLGDLGYRASAKKAQICQKQVKYLGYLLREGQRWLTEARKETVMGQPVPKTPRQLREFLGKAGFCRLFIPGFAEMAAPLYPLTKPGTLFSWGPDQQKAYQEIKQALLTAPALGLPDLTKPFELFVDEKQGYAKGVLTQKLGPWRRPVAYLSKKLDPVAAGWPPCLRMVAAIAVLTKDAGKLTMGQPLVILAPHAVEALVKQPPDRWLSNARMTHYQAMLLDTDRVQFGPVVALNPATLLPLPEEGAPHDCLEILAETHGTRPDLTDQPIPDADHTWYTDGSSFLQEGQRKAGAAVTTETEVIWAGALPAGTSAQRAELIALTQALKMAEGKRLNVYTDSRYAFATAHIHGEIYRRRGWLTSEGREIKNKSEILALLKALFLPKRLSIIHCLGHQKGDSAEARGNRLADQAAREAAIKTPPDTSTLLIAGKRTADGSEFEKRTADGSEFESPKKKAKVE

SEQ ID NO: 2168 - protein, 2096 aa, synthetic construct
MPAAKRVKLDGGDKKYSIGLDIGTNSVGWAVITDEYKVPSKKFKVLGNTDRHSIKKNLIGALLFDSGETAEATRLKRTARRRYTRRKNRICYLQEIFSNEMAKVDDSFFHRLEESFLVEEDKKHERHPIFGNIVDEVAYHEKYPTIYHLRKKLVDSTDKADLRLIYLALAHMIKFRGHFLIEGDLNPDNSDVDKLFIQLVQTYNQLFEENPINASGVDAKAILSARLSKSRRLENLIAQLPGEKKNGLFGNLIALSLGLTPNFKSNFDLAEDAKLQLSKDTYDDDLDNLLAQIGDQYADLFLAAKNLSDAILLSDILRVNTEITKAPLSASMIKRYDEHHQDLTLLKALVRQQLPEKYKEIFFDQSKNGYAGYIDGGASQEEFYKFIKPILEKMDGTEELLVKLNREDLLRKQRTFDNGSIPHQIHLGELHAILRRQEDFYPFLKDNREKIEKILTFRIPYYVGPLARGNSRFAWMTRKSEETITPWNFEEVVDKGASAQSFIERMTNFDKNLPNEKVLPKHSLLYEYFTVYNELTKVKYVTEGMRKPAFLSGEQKKAIVDLLFKTNRKVTVKQLKEDYFKKIECFDSVEISGVEDRFNASLGTYHDLLKIIKDKDFLDNEENEDILEDIVLTLTLFEDREMIEERLKTYAHLFDDKVMKQLKRRRYTGWGRLSRKLINGIRDKQSGKTILDFLKSDGFANRNFMQLIHDDSLTFKEDIQKAQVSGQGDSLHEHIANLAGSPAIKKGILQTVKVVDELVKVMGRHKPENIVIEMARENQTTQKGQKNSRERMKRIEEGIKELGSQILKEHPVENTQLQNEKLYLYYLQNGRDMYVDQELDINRLSDYDVDHIVPQSFLKDDSIDNKVLTRSDKARGKSDNVPSEEVVKKMKNYWRQLLNAKLITQRKFDNLTKAERGGLSELDKAGFIKRQLVETRQITKHVAQILDSRMNTKYDENDKLIREVKVITLKSKLVSDFRKDFQFYKVREINNYHHAHDAYLNAVVGTALIKKYPKLESEFVYGDYKVYDVRKMIAKSEQEIGKATAKYFFYSNIMNFFKTEITLANGEIRKRPLIETNGETGEIVWDKGRDFATVRKVLSMPQVNIVKKTEVQTGGFSKESILPKRNSDKLIARKKDWDPKKYGGFDSPTVAYSVLVVAKVEKGKSKKLKSVKELLGITIMERSSFEKNPIDFLEAKGYKEVKKDLIIKLPKYSLFELENGRKRMLASAGELQKGNELALPSKYVNFLYLASHYEKLKGSPEDNEQKQLFVEQHKHYLDEIIEQISEFSKRVILADANLDKVLSAYNKHRDKPIREQAENIIHLFTLTNLGAPAAFKYFDTTIDRKRYTSTKEVLDATLIHQSITGLYETRIDLSQLGGDGGGGSEAAAKGSSGGLGIEDEYRLHETSTEPDVSLGSTWLSDFPQAWAETGGMGLAVRQAPLIIPLKATSTPVSIQQYPMSHEARLGIKPHIQRLLDQGILVPCQSPWNTPLLPVKKPGTNDYRPVQDLREVNKRVEDIHPTVPNPYNLLSGLPPSHQWYTVLDLKDAFFCLRLHPTSQPLFAFEWRDPGMGISGQLTWTRLPQGFKNSPTLFNEALHRDLADFRIQHPDLILLQYVDDILLAATSELDCQQGTRALLQTLGDLGYRASAKKAQICQKQVKYLGYLLREGQRWLTEARKETVMGQPVPKTPRQLREFLGKAGFCRLFIPGFAEMAAPLYPLTKPGTLFSWGPDQQKAYQEIKQALLTAPALGLPDLTKPFELFVDEKQGYAKGVLTQKLGPWRRPVAYLSKKLDPVAAGWPPCLRMVAAIAVLTKDAGKLTMGQPLVILAPHAVEALVKQPPDRWLSNARMTHYQAMLLDTDRVQFGPVVALNPATLLPLPEEGAPHDCLEILAETHGTRPDLTDQPIPDADHTWYTDGSSFLQEGQRKAGAAVTTETEVIWAGALPAGTSAQRAELIALTQALKMAEGKRLNVYTDSRYAFATAHIHGEIYRRRGWLTSEGREIKNKSEILALLKALFLPKRLSIIHCLGHQKGDSAEARGNRLADQAAREAAIKTPPDTSTLLIAGKRTADGSEFEKRTADGSEFESPKKKAKVE

SEQ ID NO: 2169 - protein, 2090 aa, synthetic construct
MPAAKRVKLDGGDKKYSIGLDIGTNSVGWAVITDEYKVPSKKFKVLGNTDRHSIKKNLIGALLFDSGETAEATRLKRTARRRYTRRKNRICYLQEIFSNEMAKVDDSFFHRLEESFLVEEDKKHERHPIFGNIVDEVAYHEKYPTIYHLRKKLVDSTDKADLRLIYLALAHMIKFRGHFLIEGDLNPDNSDVDKLFIQLVQTYNQLFEENPINASGVDAKAILSARLSKSRRLENLIAQLPGEKKNGLFGNLIALSLGLTPNFKSNFDLAEDAKLQLSKDTYDDDLDNLLAQIGDQYADLFLAAKNLSDAILLSDILRVNTEITKAPLSASMIKRYDEHHQDLTLLKALVRQQLPEKYKEIFFDQSKNGYAGYIDGGASQEEFYKFIKPILEKMDGTEELLVKLNREDLLRKQRTFDNGSIPHQIHLGELHAILRRQEDFYPFLKDNREKIEKILTFRIPYYVGPLARGNSRFAWMTRKSEETITPWNFEEVVDKGASAQSFIERMTNFDKNLPNEKVLPKHSLLYEYFTVYNELTKVKYVTEGMRKPAFLSGEQKKAIVDLLFKTNRKVTVKQLKEDYFKKIECFDSVEISGVEDRFNASLGTYHDLLKIIKDKDFLDNEENEDILEDIVLTLTLFEDREMIEERLKTYAHLFDDKVMKQLKRRRYTGWGRLSRKLINGIRDKQSGKTILDFLKSDGFANRNFMQLIHDDSLTFKEDIQKAQVSGQGDSLHEHIANLAGSPAIKKGILQTVKVVDELVKVMGRHKPENIVIEMARENQTTQKGQKNSRERMKRIEEGIKELGSQILKEHPVENTQLQNEKLYLYYLQNGRDMYVDQELDINRLSDYDVDHIVPQSFLKDDSIDNKVLTRSDKARGKSDNVPSEEVVKKMKNYWRQLLNAKLITQRKFDNLTKAERGGLSELDKAGFIKRQLVETRQITKHVAQILDSRMNTKYDENDKLIREVKVITLKSKLVSDFRKDFQFYKVREINNYHHAHDAYLNAVVGTALIKKYPKLESEFVYGDYKVYDVRKMIAKSEQEIGKATAKYFFYSNIMNFFKTEITLANGEIRKRPLIETNGETGEIVWDKGRDFATVRKVLSMPQVNIVKKTEVQTGGFSKESILPKRNSDKLIARKKDWDPKKYGGFDSPTVAYSVLVVAKVEKGKSKKLKSVKELLGITIMERSSFEKNPIDFLEAKGYKEVKKDLIIKLPKYSLFELENGRKRMLASAGELQKGNELALPSKYVNFLYLASHYEKLKGSPEDNEQKQLFVEQHKHYLDEIIEQISEFSKRVILADANLDKVLSAYNKHRDKPIREQAENIIHLFTLTNLGAPAAFKYFDTTIDRKRYTSTKEVLDATLIHQSITGLYETRIDLSQLGGDGGGGGGGGGLGIEDEYRLHETSTEPDVSLGSTWLSDFPQAWAETGGMGLAVRQAPLIIPLKATSTPVSIQQYPMSHEARLGIKPHIQRLLDQGILVPCQSPWNTPLLPVKKPGTNDYRPVQDLREVNKRVEDIHPTVPNPYNLLSGLPPSHQWYTVLDLKDAFFCLRLHPTSQPLFAFEWRDPGMGISGQLTWTRLPQGFKNSPTLFNEALHRDLADFRIQHPDLILLQYVDDILLAATSELDCQQGTRALLQTLGDLGYRASAKKAQICQKQVKYLGYLLREGQRWLTEARKETVMGQPVPKTPRQLREFLGKAGFCRLFIPGFAEMAAPLYPLTKPGTLFSWGPDQQKAYQEIKQALLTAPALGLPDLTKPFELFVDEKQGYAKGVLTQKLGPWRRPVAYLSKKLDPVAAGWPPCLRMVAAIAVLTKDAGKLTMGQPLVILAPHAVEALVKQPPDRWLSNARMTHYQAMLLDTDRVQFGPVVALNPATLLPLPEEGAPHDCLEILAETHGTRPDLTDQPIPDADHTWYTDGSSFLQEGQRKAGAAVTTETEVIWAGALPAGTSAQRAELIALTQALKMAEGKRLNVYTDSRYAFATAHIHGEIYRRRGWLTSEGREIKNKSEILALLKALFLPKRLSIIHCLGHQKGDSAEARGNRLADQAAREAAIKTPPDTSTLLIAGKRTADGSEFEKRTADGSEFESPKKKAKVE

SEQ ID NO: 2170 - protein, 2091 aa, synthetic construct
MPAAKRVKLDGGDKKYSIGLDIGTNSVGWAVITDEYKVPSKKFKVLGNTDRHSIKKNLIGALLFDSGETAEATRLKRTARRRYTRRKNRICYLQEIFSNEMAKVDDSFFHRLEESFLVEEDKKHERHPIFGNIVDEVAYHEKYPTIYHLRKKLVDSTDKADLRLIYLALAHMIKFRGHFLIEGDLNPDNSDVDKLFIQLVQTYNQLFEENPINASGVDAKAILSARLSKSRRLENLIAQLPGEKKNGLFGNLIALSLGLTPNFKSNFDLAEDAKLQLSKDTYDDDLDNLLAQIGDQYADLFLAAKNLSDAILLSDILRVNTEITKAPLSASMIKRYDEHHQDLTLLKALVRQQLPEKYKEIFFDQSKNGYAGYIDGGASQEEFYKFIKPILEKMDGTEELLVKLNREDLLRKQRTFDNGSIPHQIHLGELHAILRRQEDFYPFLKDNREKIEKILTFRIPYYVGPLARGNSRFAWMTRKSEETITPWNFEEVVDKGASAQSFIERMTNFDKNLPNEKVLPKHSLLYEYFTVYNELTKVKYVTEGMRKPAFLSGEQKKAIVDLLFKTNRKVTVKQLKEDYFKKIECFDSVEISGVEDRFNASLGTYHDLLKIIKDKDFLDNEENEDILEDIVLTLTLFEDREMIEERLKTYAHLFDDKVMKQLKRRRYTGWGRLSRKLINGIRDKQSGKTILDFLKSDGFANRNFMQLIHDDSLTFKEDIQKAQVSGQGDSLHEHIANLAGSPAIKKGILQTVKVVDELVKVMGRHKPENIVIEMARENQTTQKGQKNSRERMKRIEEGIKELGSQILKEHPVENTQLQNEKLYLYYLQNGRDMYVDQELDINRLSDYDVDHIVPQSFLKDDSIDNKVLTRSDKARGKSDNVPSEEVVKKMKNYWRQLLNAKLITQRKFDNLTKAERGGLSELDKAGFIKRQLVETRQITKHVAQILDSRMNTKYDENDKLIREVKVITLKSKLVSDFRKDFQFYKVREINNYHHAHDAYLNAVVGTALIKKYPKLESEFVYGDYKVYDVRKMIAKSEQEIGKATAKYFFYSNIMNFFKTEITLANGEIRKRPLIETNGETGEIVWDKGRDFATVRKVLSMPQVNIVKKTEVQTGGFSKESILPKRNSDKLIARKKDWDPKKYGGFDSPTVAYSVLVVAKVEKGKSKKLKSVKELLGITIMERSSFEKNPIDFLEAKGYKEVKKDLIIKLPKYSLFELENGRKRMLASAGELQKGNELALPSKYVNFLYLASHYEKLKGSPEDNEQKQLFVEQHKHYLDEIIEQISEFSKRVILADANLDKVLSAYNKHRDKPIREQAENIIHLFTLTNLGAPAAFKYFDTTIDRKRYTSTKEVLDATLIHQSITGLYETRIDLSQLGGDGGGSSGGGGGLGIEDEYRLHETSTEPDVSLGSTWLSDFPQAWAETGGMGLAVRQAPLIIPLKATSTPVSIQQYPMSHEARLGIKPHIQRLLDQGILVPCQSPWNTPLLPVKKPGTNDYRPVQDLREVNKRVEDIHPTVPNPYNLLSGLPPSHQWYTVLDLKDAFFCLRLHPTSQPLFAFEWRDPGMGISGQLTWTRLPQGFKNSPTLFNEALHRDLADFRIQHPDLILLQYVDDILLAATSELDCQQGTRALLQTLGDLGYRASAKKAQICQKQVKYLGYLLREGQRWLTEARKETVMGQPVPKTPRQLREFLGKAGFCRLFIPGFAEMAAPLYPLTKPGTLFSWGPDQQKAYQEIKQALLTAPALGLPDLTKPFELFVDEKQGYAKGVLTQKLGPWRRPVAYLSKKLDPVAAGWPPCLRMVAAIAVLTKDAGKLTMGQPLVILAPHAVEALVKQPPDRWLSNARMTHYQAMLLDTDRVQFGPVVALNPATLLPLPEEGAPHDCLEILAETHGTRPDLTDQPIPDADHTWYTDGSSFLQEGQRKAGAAVTTETEVIWAGALPAGTSAQRAELIALTQALKMAEGKRLNVYTDSRYAFATAHIHGEIYRRRGWLTSEGREIKNKSEILALLKALFLPKRLSIIHCLGHQKGDSAEARGNRLADQAAREAAIKTPPDTSTLLIAGKRTADGSEFEKRTADGSEFESPKKKAKVE

SEQ ID NO: 2171 - protein, 2091 aa, synthetic construct
MPAAKRVKLDGGDKKYSIGLDIGTNSVGWAVITDEYKVPSKKFKVLGNTDRHSIKKNLIGALLFDSGETAEATRLKRTARRRYTRRKNRICYLQEIFSNEMAKVDDSFFHRLEESFLVEEDKKHERHPIFGNIVDEVAYHEKYPTIYHLRKKLVDSTDKADLRLIYLALAHMIKFRGHFLIEGDLNPDNSDVDKLFIQLVQTYNQLFEENPINASGVDAKAILSARLSKSRRLENLIAQLPGEKKNGLFGNLIALSLGLTPNFKSNFDLAEDAKLQLSKDTYDDDLDNLLAQIGDQYADLFLAAKNLSDAILLSDILRVNTEITKAPLSASMIKRYDEHHQDLTLLKALVRQQLPEKYKEIFFDQSKNGYAGYIDGGASQEEFYKFIKPILEKMDGTEELLVKLNREDLLRKQRTFDNGSIPHQIHLGELHAILRRQEDFYPFLKDNREKIEKILTFRIPYYVGPLARGNSRFAWMTRKSEETITPWNFEEVVDKGASAQSFIERMTNFDKNLPNEKVLPKHSLLYEYFTVYNELTKVKYVTEGMRKPAFLSGEQKKAIVDLLFKTNRKVTVKQLKEDYFKKIECFDSVEISGVEDRFNASLGTYHDLLKIIKDKDFLDNEENEDILEDIVLTLTLFEDREMIEERLKTYAHLFDDKVMKQLKRRRYTGWGRLSRKLINGIRDKQSGKTILDFLKSDGFANRNFMQLIHDDSLTFKEDIQKAQVSGQGDSLHEHIANLAGSPAIKKGILQTVKVVDELVKVMGRHKPENIVIEMARENQTTQKGQKNSRERMKRIEEGIKELGSQILKEHPVENTQLQNEKLYLYYLQNGRDMYVDQELDINRLSDYDVDHIVPQSFLKDDSIDNKVLTRSDKARGKSDNVPSEEVVKKMKNYWRQLLNAKLITQRKFDNLTKAERGGLSELDKAGFIKRQLVETRQITKHVAQILDSRMNTKYDENDKLIREVKVITLKSKLVSDFRKDFQFYKVREINNYHHAHDAYLNAVVGTALIKKYPKLESEFVYGDYKVYDVRKMIAKSEQEIGKATAKYFFYSNIMNFFKTEITLANGEIRKRPLIETNGETGEIVWDKGRDFATVRKVLSMPQVNIVKKTEVQTGGFSKESILPKRNSDKLIARKKDWDPKKYGGFDSPTVAYSVLVVAKVEKGKSKKLKSVKELLGITIMERSSFEKNPIDFLEAKGYKEVKKDLIIKLPKYSLFELENGRKRMLASAGELQKGNELALPSKYVNFLYLASHYEKLKGSPEDNEQKQLFVEQHKHYLDEIIEQISEFSKRVILADANLDKVLSAYNKHRDKPIREQAENIIHLFTLTNLGAPAAFKYFDTTIDRKRYTSTKEVLDATLIHQSITGLYETRIDLSQLGGDGGGSSGGSGGLGIEDEYRLHETSTEPDVSLGSTWLSDFPQAWAETGGMGLAVRQAPLIIPLKATSTPVSIQQYPMSHEARLGIKPHIQRLLDQGILVPCQSPWNTPLLPVKKPGTNDYRPVQDLREVNKRVEDIHPTVPNPYNLLSGLPPSHQWYTVLDLKDAFFCLRLHPTSQPLFAFEWRDPGMGISGQLTWTRLPQGFKNSPTLFNEALHRDLADFRIQHPDLILLQYVDDILLAATSELDCQQGTRALLQTLGDLGYRASAKKAQICQKQVKYLGYLLREGQRWLTEARKETVMGQPVPKTPRQLREFLGKAGFCRLFIPGFAEMAAPLYPLTKPGTLFSWGPDQQKAYQEIKQALLTAPALGLPDLTKPFELFVDEKQGYAKGVLTQKLGPWRRPVAYLSKKLDPVAAGWPPCLRMVAAIAVLTKDAGKLTMGQPLVILAPHAVEALVKQPPDRWLSNARMTHYQAMLLDTDRVQFGPVVALNPATLLPLPEEGAPHDCLEILAETHGTRPDLTDQPIPDADHTWYTDGSSFLQEGQRKAGAAVTTETEVIWAGALPAGTSAQRAELIALTQALKMAEGKRLNVYTDSRYAFATAHIHGEIYRRRGWLTSEGREIKNKSEILALLKALFLPKRLSIIHCLGHQKGDSAEARGNRLADQAAREAAIKTPPDTSTLLIAGKRTADGSEFEKRTADGSEFESPKKKAKVE

SEQ ID NO: 2172 - protein, 2094 aa, synthetic construct
MPAAKRVKLDGGDKKYSIGLDIGTNSVGWAVITDEYKVPSKKFKVLGNTDRHSIKKNLIGALLFDSGETAEATRLKRTARRRYTRRKNRICYLQEIFSNEMAKVDDSFFHRLEESFLVEEDKKHERHPIFGNIVDEVAYHEKYPTIYHLRKKLVDSTDKADLRLIYLALAHMIKFRGHFLIEGDLNPDNSDVDKLFIQLVQTYNQLFEENPINASGVDAKAILSARLSKSRRLENLIAQLPGEKKNGLFGNLIALSLGLTPNFKSNFDLAEDAKLQLSKDTYDDDLDNLLAQIGDQYADLFLAAKNLSDAILLSDILRVNTEITKAPLSASMIKRYDEHHQDLTLLKALVRQQLPEKYKEIFFDQSKNGYAGYIDGGASQEEFYKFIKPILEKMDGTEELLVKLNREDLLRKQRTFDNGSIPHQIHLGELHAILRRQEDFYPFLKDNREKIEKILTFRIPYYVGPLARGNSRFAWMTRKSEETITPWNFEEVVDKGASAQSFIERMTNFDKNLPNEKVLPKHSLLYEYFTVYNELTKVKYVTEGMRKPAFLSGEQKKAIVDLLFKTNRKVTVKQLKEDYFKKIECFDSVEISGVEDRFNASLGTYHDLLKIIKDKDFLDNEENEDILEDIVLTLTLFEDREMIEERLKTYAHLFDDKVMKQLKRRRYTGWGRLSRKLINGIRDKQSGKTILDFLKSDGFANRNFMQLIHDDSLTFKEDIQKAQVSGQGDSLHEHIANLAGSPAIKKGILQTVKVVDELVKVMGRHKPENIVIEMARENQTTQKGQKNSRERMKRIEEGIKELGSQILKEHPVENTQLQNEKLYLYYLQNGRDMYVDQELDINRLSDYDVDHIVPQSFLKDDSIDNKVLTRSDKARGKSDNVPSEEVVKKMKNYWRQLLNAKLITQRKFDNLTKAERGGLSELDKAGFIKRQLVETRQITKHVAQILDSRMNTKYDENDKLIREVKVITLKSKLVSDFRKDFQFYKVREINNYHHAHDAYLNAVVGTALIKKYPKLESEFVYGDYKVYDVRKMIAKSEQEIGKATAKYFFYSNIMNFFKTEITLANGEIRKRPLIETNGETGEIVWDKGRDFATVRKVLSMPQVNIVKKTEVQTGGFSKESILPKRNSDKLIARKKDWDPKKYGGFDSPTVAYSVLVVAKVEKGKSKKLKSVKELLGITIMERSSFEKNPIDFLEAKGYKEVKKDLIIKLPKYSLFELENGRKRMLASAGELQKGNELALPSKYVNFLYLASHYEKLKGSPEDNEQKQLFVEQHKHYLDEIIEQISEFSKRVILADANLDKVLSAYNKHRDKPIREQAENIIHLFTLTNLGAPAAFKYFDTTIDRKRYTSTKEVLDATLIHQSITGLYETRIDLSQLGGDGGGGSGGGGSSGGLGIEDEYRLHETSTEPDVSLGSTWLSDFPQAWAETGGMGLAVRQAPLIIPLKATSTPVSIQQYPMSHEARLGIKPHIQRLLDQGILVPCQSPWNTPLLPVKKPGTNDYRPVQDLREVNKRVEDIHPTVPNPYNLLSGLPPSHQWYTVLDLKDAFFCLRLHPTSQPLFAFEWRDPGMGISGQLTWTRLPQGFKNSPTLFNEALHRDLADFRIQHPDLILLQYVDDILLAATSELDCQQGTRALLQTLGDLGYRASAKKAQICQKQVKYLGYLLREGQRWLTEARKETVMGQPVPKTPRQLREFLGKAGFCRLFIPGFAEMAAPLYPLTKPGTLFSWGPDQQKAYQEIKQALLTAPALGLPDLTKPFELFVDEKQGYAKGVLTQKLGPWRRPVAYLSKKLDPVAAGWPPCLRMVAAIAVLTKDAGKLTMGQPLVILAPHAVEALVKQPPDRWLSNARMTHYQAMLLDTDRVQFGPVVALNPATLLPLPEEGAPHDCLEILAETHGTRPDLTDQPIPDADHTWYTDGSSFLQEGQRKAGAAVTTETEVIWAGALPAGTSAQRAELIALTQALKMAEGKRLNVYTDSRYAFATAHIHGEIYRRRGWLTSEGREIKNKSEILALLKALFLPKRLSIIHCLGHQKGDSAEARGNRLADQAAREAAIKTPPDTSTLLIAGKRTADGSEFEKRTADGSEFESPKKKAKVE

SEQ ID NO: 2173 - protein, 2096 aa, synthetic construct
MPAAKRVKLDGGDKKYSIGLDIGTNSVGWAVITDEYKVPSKKFKVLGNTDRHSIKKNLIGALLFDSGETAEATRLKRTARRRYTRRKNRICYLQEIFSNEMAKVDDSFFHRLEESFLVEEDKKHERHPIFGNIVDEVAYHEKYPTIYHLRKKLVDSTDKADLRLIYLALAHMIKFRGHFLIEGDLNPDNSDVDKLFIQLVQTYNQLFEENPINASGVDAKAILSARLSKSRRLENLIAQLPGEKKNGLFGNLIALSLGLTPNFKSNFDLAEDAKLQLSKDTYDDDLDNLLAQIGDQYADLFLAAKNLSDAILLSDILRVNTEITKAPLSASMIKRYDEHHQDLTLLKALVRQQLPEKYKEIFFDQSKNGYAGYIDGGASQEEFYKFIKPILEKMDGTEELLVKLNREDLLRKQRTFDNGSIPHQIHLGELHAILRRQEDFYPFLKDNREKIEKILTFRIPYYVGPLARGNSRFAWMTRKSEETITPWNFEEVVDKGASAQSFIERMTNFDKNLPNEKVLPKHSLLYEYFTVYNELTKVKYVTEGMRKPAFLSGEQKKAIVDLLFKTNRKVTVKQLKEDYFKKIECFDSVEISGVEDRFNASLGTYHDLLKIIKDKDFLDNEENEDILEDIVLTLTLFEDREMIEERLKTYAHLFDDKVMKQLKRRRYTGWGRLSRKLINGIRDKQSGKTILDFLKSDGFANRNFMQLIHDDSLTFKEDIQKAQVSGQGDSLHEHIANLAGSPAIKKGILQTVKVVDELVKVMGRHKPENIVIEMARENQTTQKGQKNSRERMKRIEEGIKELGSQILKEHPVENTQLQNEKLYLYYLQNGRDMYVDQELDINRLSDYDVDHIVPQSFLKDDSIDNKVLTRSDKARGKSDNVPSEEVVKKMKNYWRQLLNAKLITQRKFDNLTKAERGGLSELDKAGFIKRQLVETRQITKHVAQILDSRMNTKYDENDKLIREVKVITLKSKLVSDFRKDFQFYKVREINNYHHAHDAYLNAVVGTALIKKYPKLESEFVYGDYKVYDVRKMIAKSEQEIGKATAKYFFYSNIMNFFKTEITLANGEIRKRPLIETNGETGEIVWDKGRDFATVRKVLSMPQVNIVKKTEVQTGGFSKESILPKRNSDKLIARKKDWDPKKYGGFDSPTVAYSVLVVAKVEKGKSKKLKSVKELLGITIMERSSFEKNPIDFLEAKGYKEVKKDLIIKLPKYSLFELENGRKRMLASAGELQKGNELALPSKYVNFLYLASHYEKLKGSPEDNEQKQLFVEQHKHYLDEIIEQISEFSKRVILADANLDKVLSAYNKHRDKPIREQAENIIHLFTLTNLGAPAAFKYFDTTIDRKRYTSTKEVLDATLIHQSITGLYETRIDLSQLGGDGGEAAAKGGGGSSGGLGIEDEYRLHETSTEPDVSLGSTWLSDFPQAWAETGGMGLAVRQAPLIIPLKATSTPVSIQQYPMSHEARLGIKPHIQRLLDQGILVPCQSPWNTPLLPVKKPGTNDYRPVQDLREVNKRVEDIHPTVPNPYNLLSGLPPSHQWYTVLDLKDAFFCLRLHPTSQPLFAFEWRDPGMGISGQLTWTRLPQGFKNSPTLFNEALHRDLADFRIQHPDLILLQYVDDILLAATSELDCQQGTRALLQTLGDLGYRASAKKAQICQKQVKYLGYLLREGQRWLTEARKETVMGQPVPKTPRQLREFLGKAGFCRLFIPGFAEMAAPLYPLTKPGTLFSWGPDQQKAYQEIKQALLTAPALGLPDLTKPFELFVDEKQGYAKGVLTQKLGPWRRPVAYLSKKLDPVAAGWPPCLRMVAAIAVLTKDAGKLTMGQPLVILAPHAVEALVKQPPDRWLSNARMTHYQAMLLDTDRVQFGPVVALNPATLLPLPEEGAPHDCLEILAETHGTRPDLTDQPIPDADHTWYTDGSSFLQEGQRKAGAAVTTETEVIWAGALPAGTSAQRAELIALTQALKMAEGKRLNVYTDSRYAFATAHIHGEIYRRRGWLTSEGREIKNKSEILALLKALFLPKRLSIIHCLGHQKGDSAEARGNRLADQAAREAAIKTPPDTSTLLIAGKRTADGSEFEKRTADGSEFESPKKKAKVE

SEQ ID NO: 2174 - protein, 2096 aa, synthetic construct
MPAAKRVKLDGGDKKYSIGLDIGTNSVGWAVITDEYKVPSKKFKVLGNTDRHSIKKNLIGALLFDSGETAEATRLKRTARRRYTRRKNRICYLQEIFSNEMAKVDDSFFHRLEESFLVEEDKKHERHPIFGNIVDEVAYHEKYPTIYHLRKKLVDSTDKADLRLIYLALAHMIKFRGHFLIEGDLNPDNSDVDKLFIQLVQTYNQLFEENPINASGVDAKAILSARLSKSRRLENLIAQLPGEKKNGLFGNLIALSLGLTPNFKSNFDLAEDAKLQLSKDTYDDDLDNLLAQIGDQYADLFLAAKNLSDAILLSDILRVNTEITKAPLSASMIKRYDEHHQDLTLLKALVRQQLPEKYKEIFFDQSKNGYAGYIDGGASQEEFYKFIKPILEKMDGTEELLVKLNREDLLRKQRTFDNGSIPHQIHLGELHAILRRQEDFYPFLKDNREKIEKILTFRIPYYVGPLARGNSRFAWMTRKSEETITPWNFEEVVDKGASAQSFIERMTNFDKNLPNEKVLPKHSLLYEYFTVYNELTKVKYVTEGMRKPAFLSGEQKKAIVDLLFKTNRKVTVKQLKEDYFKKIECFDSVEISGVEDRFNASLGTYHDLLKIIKDKDFLDNEENEDILEDIVLTLTLFEDREMIEERLKTYAHLFDDKVMKQLKRRRYTGWGRLSRKLINGIRDKQSGKTILDFLKSDGFANRNFMQLIHDDSLTFKEDIQKAQVSGQGDSLHEHIANLAGSPAIKKGILQTVKVVDELVKVMGRHKPENIVIEMARENQTTQKGQKNSRERMKRIEEGIKELGSQILKEHPVENTQLQNEKLYLYYLQNGRDMYVDQELDINRLSDYDVDHIVPQSFLKDDSIDNKVLTRSDKARGKSDNVPSEEVVKKMKNYWRQLLNAKLITQRKFDNLTKAERGGLSELDKAGFIKRQLVETRQITKHVAQILDSRMNTKYDENDKLIREVKVITLKSKLVSDFRKDFQFYKVREINNYHHAHDAYLNAVVGTALIKKYPKLESEFVYGDYKVYDVRKMIAKSEQEIGKATAKYFFYSNIMNFFKTEITLANGEIRKRPLIETNGETGEIVWDKGRDFATVRKVLSMPQVNIVKKTEVQTGGFSKESILPKRNSDKLIARKKDWDPKKYGGFDSPTVAYSVLVVAKVEKGKSKKLKSVKELLGITIMERSSFEKNPIDFLEAKGYKEVKKDLIIKLPKYSLFELENGRKRMLASAGELQKGNELALPSKYVNFLYLASHYEKLKGSPEDNEQKQLFVEQHKHYLDEIIEQISEFSKRVILADANLDKVLSAYNKHRDKPIREQAENIIHLFTLTNLGAPAAFKYFDTTIDRKRYTSTKEVLDATLIHQSITGLYETRIDLSQLGGDGGGGGEAAAKGSSGGLGIEDEYRLHETSTEPDVSLGSTWLSDFPQAWAETGGMGLAVRQAPLIIPLKATSTPVSIQQYPMSHEARLGIKPHIQRLLDQGILVPCQSPWNTPLLPVKKPGTNDYRPVQDLREVNKRVEDIHPTVPNPYNLLSGLPPSHQWYTVLDLKDAFFCLRLHPTSQPLFAFEWRDPGMGISGQLTWTRLPQGFKNSPTLFNEALHRDLADFRIQHPDLILLQYVDDILLAATSELDCQQGTRALLQTLGDLGYRASAKKAQICQKQVKYLGYLLREGQRWLTEARKETVMGQPVPKTPRQLREFLGKAGFCRLFIPGFAEMAAPLYPLTKPGTLFSWGPDQQKAYQEIKQALLTAPALGLPDLTKPFELFVDEKQGYAKGVLTQKLGPWRRPVAYLSKKLDPVAAGWPPCLRMVAAIAVLTKDAGKLTMGQPLVILAPHAVEALVKQPPDRWLSNARMTHYQAMLLDTDRVQFGPVVALNPATLLPLPEEGAPHDCLEILAETHGTRPDLTDQPIPDADHTWYTDGSSFLQEGQRKAGAAVTTETEVIWAGALPAGTSAQRAELIALTQALKMAEGKRLNVYTDSRYAFATAHIHGEIYRRRGWLTSEGREIKNKSEILALLKALFLPKRLSIIHCLGHQKGDSAEARGNRLADQAAREAAIKTPPDTSTLLIAGKRTADGSEFEKRTADGSEFESPKKKAKVE

SEQ ID NO: 2175 - protein, 2096 aa, synthetic construct
MPAAKRVKLDGGDKKYSIGLDIGTNSVGWAVITDEYKVPSKKFKVLGNTDRHSIKKNLIGALLFDSGETAEATRLKRTARRRYTRRKNRICYLQEIFSNEMAKVDDSFFHRLEESFLVEEDKKHERHPIFGNIVDEVAYHEKYPTIYHLRKKLVDSTDKADLRLIYLALAHMIKFRGHFLIEGDLNPDNSDVDKLFIQLVQTYNQLFEENPINASGVDAKAILSARLSKSRRLENLIAQLPGEKKNGLFGNLIALSLGLTPNFKSNFDLAEDAKLQLSKDTYDDDLDNLLAQIGDQYADLFLAAKNLSDAILLSDILRVNTEITKAPLSASMIKRYDEHHQDLTLLKALVRQQLPEKYKEIFFDQSKNGYAGYIDGGASQEEFYKFIKPILEKMDGTEELLVKLNREDLLRKQRTFDNGSIPHQIHLGELHAILRRQEDFYPFLKDNREKIEKILTFRIPYYVGPLARGNSRFAWMTRKSEETITPWNFEEVVDKGASAQSFIERMTNFDKNLPNEKVLPKHSLLYEYFTVYNELTKVKYVTEGMRKPAFLSGEQKKAIVDLLFKTNRKVTVKQLKEDYFKKIECFDSVEISGVEDRFNASLGTYHDLLKIIKDKDFLDNEENEDILEDIVLTLTLFEDREMIEERLKTYAHLFDDKVMKQLKRRRYTGWGRLSRKLINGIRDKQSGKTILDFLKSDGFANRNFMQLIHDDSLTFKEDIQKAQVSGQGDSLHEHIANLAGSPAIKKGILQTVKVVDELVKVMGRHKPENIVIEMARENQTTQKGQKNSRERMKRIEEGIKELGSQILKEHPVENTQLQNEKLYLYYLQNGRDMYVDQELDINRLSDYDVDHIVPQSFLKDDSIDNKVLTRSDKARGKSDNVPSEEVVKKMKNYWRQLLNAKLITQRKFDNLTKAERGGLSELDKAGFIKRQLVETRQITKHVAQILDSRMNTKYDENDKLIREVKVITLKSKLVSDFRKDFQFYKVREINNYHHAHDAYLNAVVGTALIKKYPKLESEFVYGDYKVYDVRKMIAKSEQEIGKATAKYFFYSNIMNFFKTEITLANGEIRKRPLIETNGETGEIVWDKGRDFATVRKVLSMPQVNIVKKTEVQTGGFSKESILPKRNSDKLIARKKDWDPKKYGGFDSPTVAYSVLVVAKVEKGKSKKLKSVKELLGITIMERSSFEKNPIDFLEAKGYKEVKKDLIIKLPKYSLFELENGRKRMLASAGELQKGNELALPSKYVNFLYLASHYEKLKGSPEDNEQKQLFVEQHKHYLDEIIEQISEFSKRVILADANLDKVLSAYNKHRDKPIREQAENIIHLFTLTNLGAPAAFKYFDTTIDRKRYTSTKEVLDATLIHQSITGLYETRIDLSQLGGDGGGGSGGGEAAAKGGLGIEDEYRLHETSTEPDVSLGSTWLSDFPQAWAETGGMGLAVRQAPLIIPLKATSTPVSIQQYPMSHEARLGIKPHIQRLLDQGILVPCQSPWNTPLLPVKKPGTNDYRPVQDLREVNKRVEDIHPTVPNPYNLLSGLPPSHQWYTVLDLKDAFFCLRLHPTSQPLFAFEWRDPGMGISGQLTWTRLPQGFKNSPTLFNEALHRDLADFRIQHPDLILLQYVDDILLAATSELDCQQGTRALLQTLGDLGYRASAKKAQICQKQVKYLGYLLREGQRWLTEARKETVMGQPVPKTPRQLREFLGKAGFCRLFIPGFAEMAAPLYPLTKPGTLFSWGPDQQKAYQEIKQALLTAPALGLPDLTKPFELFVDEKQGYAKGVLTQKLGPWRRPVAYLSKKLDPVAAGWPPCLRMVAAIAVLTKDAGKLTMGQPLVILAPHAVEALVKQPPDRWLSNARMTHYQAMLLDTDRVQFGPVVALNPATLLPLPEEGAPHDCLEILAETHGTRPDLTDQPIPDADHTWYTDGSSFLQEGQRKAGAAVTTETEVIWAGALPAGTSAQRAELIALTQALKMAEGKRLNVYTDSRYAFATAHIHGEIYRRRGWLTSEGREIKNKSEILALLKALFLPKRLSIIHCLGHQKGDSAEARGNRLADQAAREAAIKTPPDTSTLLIAGKRTADGSEFEKRTADGSEFESPKKKAKVE

SEQ ID NO: 2176 - protein, 2091 aa, synthetic construct
MPAAKRVKLDGGDKKYSIGLDIGTNSVGWAVITDEYKVPSKKFKVLGNTDRHSIKKNLIGALLFDSGETAEATRLKRTARRRYTRRKNRICYLQEIFSNEMAKVDDSFFHRLEESFLVEEDKKHERHPIFGNIVDEVAYHEKYPTIYHLRKKLVDSTDKADLRLIYLALAHMIKFRGHFLIEGDLNPDNSDVDKLFIQLVQTYNQLFEENPINASGVDAKAILSARLSKSRRLENLIAQLPGEKKNGLFGNLIALSLGLTPNFKSNFDLAEDAKLQLSKDTYDDDLDNLLAQIGDQYADLFLAAKNLSDAILLSDILRVNTEITKAPLSASMIKRYDEHHQDLTLLKALVRQQLPEKYKEIFFDQSKNGYAGYIDGGASQEEFYKFIKPILEKMDGTEELLVKLNREDLLRKQRTFDNGSIPHQIHLGELHAILRRQEDFYPFLKDNREKIEKILTFRIPYYVGPLARGNSRFAWMTRKSEETITPWNFEEVVDKGASAQSFIERMTNFDKNLPNEKVLPKHSLLYEYFTVYNELTKVKYVTEGMRKPAFLSGEQKKAIVDLLFKTNRKVTVKQLKEDYFKKIECFDSVEISGVEDRFNASLGTYHDLLKIIKDKDFLDNEENEDILEDIVLTLTLFEDREMIEERLKTYAHLFDDKVMKQLKRRRYTGWGRLSRKLINGIRDKQSGKTILDFLKSDGFANRNFMQLIHDDSLTFKEDIQKAQVSGQGDSLHEHIANLAGSPAIKKGILQTVKVVDELVKVMGRHKPENIVIEMARENQTTQKGQKNSRERMKRIEEGIKELGSQILKEHPVENTQLQNEKLYLYYLQNGRDMYVDQELDINRLSDYDVDHIVPQSFLKDDSIDNKVLTRSDKARGKSDNVPSEEVVKKMKNYWRQLLNAKLITQRKFDNLTKAERGGLSELDKAGFIKRQLVETRQITKHVAQILDSRMNTKYDENDKLIREVKVITLKSKLVSDFRKDFQFYKVREINNYHHAHDAYLNAVVGTALIKKYPKLESEFVYGDYKVYDVRKMIAKSEQEIGKATAKYFFYSNIMNFFKTEITLANGEIRKRPLIETNGETGEIVWDKGRDFATVRKVLSMPQVNIVKKTEVQTGGFSKESILPKRNSDKLIARKKDWDPKKYGGFDSPTVAYSVLVVAKVEKGKSKKLKSVKELLGITIMERSSFEKNPIDFLEAKGYKEVKKDLIIKLPKYSLFELENGRKRMLASAGELQKGNELALPSKYVNFLYLASHYEKLKGSPEDNEQKQLFVEQHKHYLDEIIEQISEFSKRVILADANLDKVLSAYNKHRDKPIREQAENIIHLFTLTNLGAPAAFKYFDTTIDRKRYTSTKEVLDATLIHQSITGLYETRIDLSQLGGDGGGSSGSSGGLGIEDEYRLHETSTEPDVSLGSTWLSDFPQAWAETGGMGLAVRQAPLIIPLKATSTPVSIQQYPMSHEARLGIKPHIQRLLDQGILVPCQSPWNTPLLPVKKPGTNDYRPVQDLREVNKRVEDIHPTVPNPYNLLSGLPPSHQWYTVLDLKDAFFCLRLHPTSQPLFAFEWRDPGMGISGQLTWTRLPQGFKNSPTLFNEALHRDLADFRIQHPDLILLQYVDDILLAATSELDCQQGTRALLQTLGDLGYRASAKKAQICQKQVKYLGYLLREGQRWLTEARKETVMGQPVPKTPRQLREFLGKAGFCRLFIPGFAEMAAPLYPLTKPGTLFSWGPDQQKAYQEIKQALLTAPALGLPDLTKPFELFVDEKQGYAKGVLTQKLGPWRRPVAYLSKKLDPVAAGWPPCLRMVAAIAVLTKDAGKLTMGQPLVILAPHAVEALVKQPPDRWLSNARMTHYQAMLLDTDRVQFGPVVALNPATLLPLPEEGAPHDCLEILAETHGTRPDLTDQPIPDADHTWYTDGSSFLQEGQRKAGAAVTTETEVIWAGALPAGTSAQRAELIALTQALKMAEGKRLNVYTDSRYAFATAHIHGEIYRRRGWLTSEGREIKNKSEILALLKALFLPKRLSIIHCLGHQKGDSAEARGNRLADQAAREAAIKTPPDTSTLLIAGKRTADGSEFEKRTADGSEFESPKKKAKVE

SEQ ID NO: 2177 - protein, 2096 aa, synthetic construct
MPAAKRVKLDGGDKKYSIGLDIGTNSVGWAVITDEYKVPSKKFKVLGNTDRHSIKKNLIGALLFDSGETAEATRLKRTARRRYTRRKNRICYLQEIFSNEMAKVDDSFFHRLEESFLVEEDKKHERHPIFGNIVDEVAYHEKYPTIYHLRKKLVDSTDKADLRLIYLALAHMIKFRGHFLIEGDLNPDNSDVDKLFIQLVQTYNQLFEENPINASGVDAKAILSARLSKSRRLENLIAQLPGEKKNGLFGNLIALSLGLTPNFKSNFDLAEDAKLQLSKDTYDDDLDNLLAQIGDQYADLFLAAKNLSDAILLSDILRVNTEITKAPLSASMIKRYDEHHQDLTLLKALVRQQLPEKYKEIFFDQSKNGYAGYIDGGASQEEFYKFIKPILEKMDGTEELLVKLNREDLLRKQRTFDNGSIPHQIHLGELHAILRRQEDFYPFLKDNREKIEKILTFRIPYYVGPLARGNSRFAWMTRKSEETITPWNFEEVVDKGASAQSFIERMTNFDKNLPNEKVLPKHSLLYEYFTVYNELTKVKYVTEGMRKPAFLSGEQKKAIVDLLFKTNRKVTVKQLKEDYFKKIECFDSVEISGVEDRFNASLGTYHDLLKIIKDKDFLDNEENEDILEDIVLTLTLFEDREMIEERLKTYAHLFDDKVMKQLKRRRYTGWGRLSRKLINGIRDKQSGKTILDFLKSDGFANRNFMQLIHDDSLTFKEDIQKAQVSGQGDSLHEHIANLAGSPAIKKGILQTVKVVDELVKVMGRHKPENIVIEMARENQTTQKGQKNSRERMKRIEEGIKELGSQILKEHPVENTQLQNEKLYLYYLQNGRDMYVDQELDINRLSDYDVDHIVPQSFLKDDSIDNKVLTRSDKARGKSDNVPSEEVVKKMKNYWRQLLNAKLITQRKFDNLTKAERGGLSELDKAGFIKRQLVETRQITKHVAQILDSRMNTKYDENDKLIREVKVITLKSKLVSDFRKDFQFYKVREINNYHHAHDAYLNAVVGTALIKKYPKLESEFVYGDYKVYDVRKMIAKSEQEIGKATAKYFFYSNIMNFFKTEITLANGEIRKRPLIETNGETGEIVWDKGRDFATVRKVLSMPQVNIVKKTEVQTGGFSKESILPKRNSDKLIARKKDWDPKKYGGFDSPTVAYSVLVVAKVEKGKSKKLKSVKELLGITIMERSSFEKNPIDFLEAKGYKEVKKDLIIKLPKYSLFELENGRKRMLASAGELQKGNELALPSKYVNFLYLASHYEKLKGSPEDNEQKQLFVEQHKHYLDEIIEQISEFSKRVILADANLDKVLSAYNKHRDKPIREQAENIIHLFTLTNLGAPAAFKYFDTTIDRKRYTSTKEVLDATLIHQSITGLYETRIDLSQLGGDGGGSSEAAAKGGSGGLGIEDEYRLHETSTEPDVSLGSTWLSDFPQAWAETGGMGLAVRQAPLIIPLKATSTPVSIQQYPMSHEARLGIKPHIQRLLDQGILVPCQSPWNTPLLPVKKPGTNDYRPVQDLREVNKRVEDIHPTVPNPYNLLSGLPPSHQWYTVLDLKDAFFCLRLHPTSQPLFAFEWRDPGMGISGQLTWTRLPQGFKNSPTLFNEALHRDLADFRIQHPDLILLQYVDDILLAATSELDCQQGTRALLQTLGDLGYRASAKKAQICQKQVKYLGYLLREGQRWLTEARKETVMGQPVPKTPRQLREFLGKAGFCRLFIPGFAEMAAPLYPLTKPGTLFSWGPDQQKAYQEIKQALLTAPALGLPDLTKPFELFVDEKQGYAKGVLTQKLGPWRRPVAYLSKKLDPVAAGWPPCLRMVAAIAVLTKDAGKLTMGQPLVILAPHAVEALVKQPPDRWLSNARMTHYQAMLLDTDRVQFGPVVALNPATLLPLPEEGAPHDCLEILAETHGTRPDLTDQPIPDADHTWYTDGSSFLQEGQRKAGAAVTTETEVIWAGALPAGTSAQRAELIALTQALKMAEGKRLNVYTDSRYAFATAHIHGEIYRRRGWLTSEGREIKNKSEILALLKALFLPKRLSIIHCLGHQKGDSAEARGNRLADQAAREAAIKTPPDTSTLLIAGKRTADGSEFEKRTADGSEFESPKKKAKVE

SEQ ID NO: 2178 - protein, 2096 aa, synthetic construct
MPAAKRVKLDGGDKKYSIGLDIGTNSVGWAVITDEYKVPSKKFKVLGNTDRHSIKKNLIGALLFDSGETAEATRLKRTARRRYTRRKNRICYLQEIFSNEMAKVDDSFFHRLEESFLVEEDKKHERHPIFGNIVDEVAYHEKYPTIYHLRKKLVDSTDKADLRLIYLALAHMIKFRGHFLIEGDLNPDNSDVDKLFIQLVQTYNQLFEENPINASGVDAKAILSARLSKSRRLENLIAQLPGEKKNGLFGNLIALSLGLTPNFKSNFDLAEDAKLQLSKDTYDDDLDNLLAQIGDQYADLFLAAKNLSDAILLSDILRVNTEITKAPLSASMIKRYDEHHQDLTLLKALVRQQLPEKYKEIFFDQSKNGYAGYIDGGASQEEFYKFIKPILEKMDGTEELLVKLNREDLLRKQRTFDNGSIPHQIHLGELHAILRRQEDFYPFLKDNREKIEKILTFRIPYYVGPLARGNSRFAWMTRKSEETITPWNFEEVVDKGASAQSFIERMTNFDKNLPNEKVLPKHSLLYEYFTVYNELTKVKYVTEGMRKPAFLSGEQKKAIVDLLFKTNRKVTVKQLKEDYFKKIECFDSVEISGVEDRFNASLGTYHDLLKIIKDKDFLDNEENEDILEDIVLTLTLFEDREMIEERLKTYAHLFDDKVMKQLKRRRYTGWGRLSRKLINGIRDKQSGKTILDFLKSDGFANRNFMQLIHDDSLTFKEDIQKAQVSGQGDSLHEHIANLAGSPAIKKGILQTVKVVDELVKVMGRHKPENIVIEMARENQTTQKGQKNSRERMKRIEEGIKELGSQILKEHPVENTQLQNEKLYLYYLQNGRDMYVDQELDINRLSDYDVDHIVPQSFLKDDSIDNKVLTRSDKARGKSDNVPSEEVVKKMKNYWRQLLNAKLITQRKFDNLTKAERGGLSELDKAGFIKRQLVETRQITKHVAQILDSRMNTKYDENDKLIREVKVITLKSKLVSDFRKDFQFYKVREINNYHHAHDAYLNAVVGTALIKKYPKLESEFVYGDYKVYDVRKMIAKSEQEIGKATAKYFFYSNIMNFFKTEITLANGEIRKRPLIETNGETGEIVWDKGRDFATVRKVLSMPQVNIVKKTEVQTGGFSKESILPKRNSDKLIARKKDWDPKKYGGFDSPTVAYSVLVVAKVEKGKSKKLKSVKELLGITIMERSSFEKNPIDFLEAKGYKEVKKDLIIKLPKYSLFELENGRKRMLASAGELQKGNELALPSKYVNFLYLASHYEKLKGSPEDNEQKQLFVEQHKHYLDEIIEQISEFSKRVILADANLDKVLSAYNKHRDKPIREQAENIIHLFTLTNLGAPAAFKYFDTTIDRKRYTSTKEVLDATLIHQSITGLYETRIDLSQLGGDGGPAPGGGEAAAKGGLGIEDEYRLHETSTEPDVSLGSTWLSDFPQAWAETGGMGLAVRQAPLIIPLKATSTPVSIQQYPMSHEARLGIKPHIQRLLDQGILVPCQSPWNTPLLPVKKPGTNDYRPVQDLREVNKRVEDIHPTVPNPYNLLSGLPPSHQWYTVLDLKDAFFCLRLHPTSQPLFAFEWRDPGMGISGQLTWTRLPQGFKNSPTLFNEALHRDLADFRIQHPDLILLQYVDDILLAATSELDCQQGTRALLQTLGDLGYRASAKKAQICQKQVKYLGYLLREGQRWLTEARKETVMGQPVPKTPRQLREFLGKAGFCRLFIPGFAEMAAPLYPLTKPGTLFSWGPDQQKAYQEIKQALLTAPALGLPDLTKPFELFVDEKQGYAKGVLTQKLGPWRRPVAYLSKKLDPVAAGWPPCLRMVAAIAVLTKDAGKLTMGQPLVILAPHAVEALVKQPPDRWLSNARMTHYQAMLLDTDRVQFGPVVALNPATLLPLPEEGAPHDCLEILAETHGTRPDLTDQPIPDADHTWYTDGSSFLQEGQRKAGAAVTTETEVIWAGALPAGTSAQRAELIALTQALKMAEGKRLNVYTDSRYAFATAHIHGEIYRRRGWLTSEGREIKNKSEILALLKALFLPKRLSIIHCLGHQKGDSAEARGNRLADQAAREAAIKTPPDTSTLLIAGKRTADGSEFEKRTADGSEFESPKKKAKVE

SEQ ID NO: 2179 - protein, 2091 aa, synthetic construct
MPAAKRVKLDGGDKKYSIGLDIGTNSVGWAVITDEYKVPSKKFKVLGNTDRHSIKKNLIGALLFDSGETAEATRLKRTARRRYTRRKNRICYLQEIFSNEMAKVDDSFFHRLEESFLVEEDKKHERHPIFGNIVDEVAYHEKYPTIYHLRKKLVDSTDKADLRLIYLALAHMIKFRGHFLIEGDLNPDNSDVDKLFIQLVQTYNQLFEENPINASGVDAKAILSARLSKSRRLENLIAQLPGEKKNGLFGNLIALSLGLTPNFKSNFDLAEDAKLQLSKDTYDDDLDNLLAQIGDQYADLFLAAKNLSDAILLSDILRVNTEITKAPLSASMIKRYDEHHQDLTLLKALVRQQLPEKYKEIFFDQSKNGYAGYIDGGASQEEFYKFIKPILEKMDGTEELLVKLNREDLLRKQRTFDNGSIPHQIHLGELHAILRRQEDFYPFLKDNREKIEKILTFRIPYYVGPLARGNSRFAWMTRKSEETITPWNFEEVVDKGASAQSFIERMTNFDKNLPNEKVLPKHSLLYEYFTVYNELTKVKYVTEGMRKPAFLSGEQKKAIVDLLFKTNRKVTVKQLKEDYFKKIECFDSVEISGVEDRFNASLGTYHDLLKIIKDKDFLDNEENEDILEDIVLTLTLFEDREMIEERLKTYAHLFDDKVMKQLKRRRYTGWGRLSRKLINGIRDKQSGKTILDFLKSDGFANRNFMQLIHDDSLTFKEDIQKAQVSGQGDSLHEHIANLAGSPAIKKGILQTVKVVDELVKVMGRHKPENIVIEMARENQTTQKGQKNSRERMKRIEEGIKELGSQILKEHPVENTQLQNEKLYLYYLQNGRDMYVDQELDINRLSDYDVDHIVPQSFLKDDSIDNKVLTRSDKARGKSDNVPSEEVVKKMKNYWRQLLNAKLITQRKFDNLTKAERGGLSELDKAGFIKRQLVETRQITKHVAQILDSRMNTKYDENDKLIREVKVITLKSKLVSDFRKDFQFYKVREINNYHHAHDAYLNAVVGTALIKKYPKLESEFVYGDYKVYDVRKMIAKSEQEIGKATAKYFFYSNIMNFFKTEITLANGEIRKRPLIETNGETGEIVWDKGRDFATVRKVLSMPQVNIVKKTEVQTGGFSKESILPKRNSDKLIARKKDWDPKKYGGFDSPTVAYSVLVVAKVEKGKSKKLKSVKELLGITIMERSSFEKNPIDFLEAKGYKEVKKDLIIKLPKYSLFELENGRKRMLASAGELQKGNELALPSKYVNFLYLASHYEKLKGSPEDNEQKQLFVEQHKHYLDEIIEQISEFSKRVILADANLDKVLSAYNKHRDKPIREQAENIIHLFTLTNLGAPAAFKYFDTTIDRKRYTSTKEVLDATLIHQSITGLYETRIDLSQLGGDGGGGGGSSGGLGIEDEYRLHETSTEPDVSLGSTWLSDFPQAWAETGGMGLAVRQAPLIIPLKATSTPVSIQQYPMSHEARLGIKPHIQRLLDQGILVPCQSPWNTPLLPVKKPGTNDYRPVQDLREVNKRVEDIHPTVPNPYNLLSGLPPSHQWYTVLDLKDAFFCLRLHPTSQPLFAFEWRDPGMGISGQLTWTRLPQGFKNSPTLFNEALHRDLADFRIQHPDLILLQYVDDILLAATSELDCQQGTRALLQTLGDLGYRASAKKAQICQKQVKYLGYLLREGQRWLTEARKETVMGQPVPKTPRQLREFLGKAGFCRLFIPGFAEMAAPLYPLTKPGTLFSWGPDQQKAYQEIKQALLTAPALGLPDLTKPFELFVDEKQGYAKGVLTQKLGPWRRPVAYLSKKLDPVAAGWPPCLRMVAAIAVLTKDAGKLTMGQPLVILAPHAVEALVKQPPDRWLSNARMTHYQAMLLDTDRVQFGPVVALNPATLLPLPEEGAPHDCLEILAETHGTRPDLTDQPIPDADHTWYTDGSSFLQEGQRKAGAAVTTETEVIWAGALPAGTSAQRAELIALTQALKMAEGKRLNVYTDSRYAFATAHIHGEIYRRRGWLTSEGREIKNKSEILALLKALFLPKRLSIIHCLGHQKGDSAEARGNRLADQAAREAAIKTPPDTSTLLIAGKRTADGSEFEKRTADGSEFESPKKKAKVE

SEQ ID NO: 2180 - protein, 2094 aa, synthetic construct
MPAAKRVKLDGGDKKYSIGLDIGTNSVGWAVITDEYKVPSKKFKVLGNTDRHSIKKNLIGALLFDSGETAEATRLKRTARRRYTRRKNRICYLQEIFSNEMAKVDDSFFHRLEESFLVEEDKKHERHPIFGNIVDEVAYHEKYPTIYHLRKKLVDSTDKADLRLIYLALAHMIKFRGHFLIEGDLNPDNSDVDKLFIQLVQTYNQLFEENPINASGVDAKAILSARLSKSRRLENLIAQLPGEKKNGLFGNLIALSLGLTPNFKSNFDLAEDAKLQLSKDTYDDDLDNLLAQIGDQYADLFLAAKNLSDAILLSDILRVNTEITKAPLSASMIKRYDEHHQDLTLLKALVRQQLPEKYKEIFFDQSKNGYAGYIDGGASQEEFYKFIKPILEKMDGTEELLVKLNREDLLRKQRTFDNGSIPHQIHLGELHAILRRQEDFYPFLKDNREKIEKILTFRIPYYVGPLARGNSRFAWMTRKSEETITPWNFEEVVDKGASAQSFIERMTNFDKNLPNEKVLPKHSLLYEYFTVYNELTKVKYVTEGMRKPAFLSGEQKKAIVDLLFKTNRKVTVKQLKEDYFKKIECFDSVEISGVEDRFNASLGTYHDLLKIIKDKDFLDNEENEDILEDIVLTLTLFEDREMIEERLKTYAHLFDDKVMKQLKRRRYTGWGRLSRKLINGIRDKQSGKTILDFLKSDGFANRNFMQLIHDDSLTFKEDIQKAQVSGQGDSLHEHIANLAGSPAIKKGILQTVKVVDELVKVMGRHKPENIVIEMARENQTTQKGQKNSRERMKRIEEGIKELGSQILKEHPVENTQLQNEKLYLYYLQNGRDMYVDQELDINRLSDYDVDHIVPQSFLKDDSIDNKVLTRSDKARGKSDNVPSEEVVKKMKNYWRQLLNAKLITQRKFDNLTKAERGGLSELDKAGFIKRQLVETRQITKHVAQILDSRMNTKYDENDKLIREVKVITLKSKLVSDFRKDFQFYKVREINNYHHAHDAYLNAVVGTALIKKYPKLESEFVYGDYKVYDVRKMIAKSEQEIGKATAKYFFYSNIMNFFKTEITLANGEIRKRPLIETNGETGEIVWDKGRDFATVRKVLSMPQVNIVKKTEVQTGGFSKESILPKRNSDKLIARKKDWDPKKYGGFDSPTVAYSVLVVAKVEKGKSKKLKSVKELLGITIMERSSFEKNPIDFLEAKGYKEVKKDLIIKLPKYSLFELENGRKRMLASAGELQKGNELALPSKYVNFLYLASHYEKLKGSPEDNEQKQLFVEQHKHYLDEIIEQISEFSKRVILADANLDKVLSAYNKHRDKPIREQAENIIHLFTLTNLGAPAAFKYFDTTIDRKRYTSTKEVLDATLIHQSITGLYETRIDLSQLGGDGGGGGPAPGSSGGLGIEDEYRLHETSTEPDVSLGSTWLSDFPQAWAETGGMGLAVRQAPLIIPLKATSTPVSIQQYPMSHEARLGIKPHIQRLLDQGILVPCQSPWNTPLLPVKKPGTNDYRPVQDLREVNKRVEDIHPTVPNPYNLLSGLPPSHQWYTVLDLKDAFFCLRLHPTSQPLFAFEWRDPGMGISGQLTWTRLPQGFKNSPTLFNEALHRDLADFRIQHPDLILLQYVDDILLAATSELDCQQGTRALLQTLGDLGYRASAKKAQICQKQVKYLGYLLREGQRWLTEARKETVMGQPVPKTPRQLREFLGKAGFCRLFIPGFAEMAAPLYPLTKPGTLFSWGPDQQKAYQEIKQALLTAPALGLPDLTKPFELFVDEKQGYAKGVLTQKLGPWRRPVAYLSKKLDPVAAGWPPCLRMVAAIAVLTKDAGKLTMGQPLVILAPHAVEALVKQPPDRWLSNARMTHYQAMLLDTDRVQFGPVVALNPATLLPLPEEGAPHDCLEILAETHGTRPDLTDQPIPDADHTWYTDGSSFLQEGQRKAGAAVTTETEVIWAGALPAGTSAQRAELIALTQALKMAEGKRLNVYTDSRYAFATAHIHGEIYRRRGWLTSEGREIKNKSEILALLKALFLPKRLSIIHCLGHQKGDSAEARGNRLADQAAREAAIKTPPDTSTLLIAGKRTADGSEFEKRTADGSEFESPKKKAKVE

SEQ ID NO: 2181 - protein, 2118 aa, synthetic construct
MPAAKRVKLDGGDKKYSIGLDIGTNSVGWAVITDEYKVPSKKFKVLGNTDRHSIKKNLIGALLFDSGETAEATRLKRTARRRYTRRKNRICYLQEIFSNEMAKVDDSFFHRLEESFLVEEDKKHERHPIFGNIVDEVAYHEKYPTIYHLRKKLVDSTDKADLRLIYLALAHMIKFRGHFLIEGDLNPDNSDVDKLFIQLVQTYNQLFEENPINASGVDAKAILSARLSKSRRLENLIAQLPGEKKNGLFGNLIALSLGLTPNFKSNFDLAEDAKLQLSKDTYDDDLDNLLAQIGDQYADLFLAAKNLSDAILLSDILRVNTEITKAPLSASMIKRYDEHHQDLTLLKALVRQQLPEKYKEIFFDQSKNGYAGYIDGGASQEEFYKFIKPILEKMDGTEELLVKLNREDLLRKQRTFDNGSIPHQIHLGELHAILRRQEDFYPFLKDNREKIEKILTFRIPYYVGPLARGNSRFAWMTRKSEETITPWNFEEVVDKGASAQSFIERMTNFDKNLPNEKVLPKHSLLYEYFTVYNELTKVKYVTEGMRKPAFLSGEQKKAIVDLLFKTNRKVTVKQLKEDYFKKIECFDSVEISGVEDRFNASLGTYHDLLKIIKDKDFLDNEENEDILEDIVLTLTLFEDREMIEERLKTYAHLFDDKVMKQLKRRRYTGWGRLSRKLINGIRDKQSGKTILDFLKSDGFANRNFMQLIHDDSLTFKEDIQKAQVSGQGDSLHEHIANLAGSPAIKKGILQTVKVVDELVKVMGRHKPENIVIEMARENQTTQKGQKNSRERMKRIEEGIKELGSQILKEHPVENTQLQNEKLYLYYLQNGRDMYVDQELDINRLSDYDVDHIVPQSFLKDDSIDNKVLTRSDKARGKSDNVPSEEVVKKMKNYWRQLLNAKLITQRKFDNLTKAERGGLSELDKAGFIKRQLVETRQITKHVAQILDSRMNTKYDENDKLIREVKVITLKSKLVSDFRKDFQFYKVREINNYHHAHDAYLNAVVGTALIKKYPKLESEFVYGDYKVYDVRKMIAKSEQEIGKATAKYFFYSNIMNFFKTEITLANGEIRKRPLIETNGETGEIVWDKGRDFATVRKVLSMPQVNIVKKTEVQTGGFSKESILPKRNSDKLIARKKDWDPKKYGGFDSPTVAYSVLVVAKVEKGKSKKLKSVKELLGITIMERSSFEKNPIDFLEAKGYKEVKKDLIIKLPKYSLFELENGRKRMLASAGELQKGNELALPSKYVNFLYLASHYEKLKGSPEDNEQKQLFVEQHKHYLDEIIEQISEFSKRVILADANLDKVLSAYNKHRDKPIREQAENIIHLFTLTNLGAPAAFKYFDTTIDRKRYTSTKEVLDATLIHQSITGLYETRIDLSQLGGDGGSGGSSGGSSGSETPGTSESATPESSGGSSGGSSGGLGIEDEYRLHETSTEPDVSLGSTWLSDFPQAWAETGGMGLAVRQAPLIIPLKATSTPVSIQQYPMSHEARLGIKPHIQRLLDQGILVPCQSPWNTPLLPVKKPGTNDYRPVQDLREVNKRVEDIHPTVPNPYNLLSGLPPSHQWYTVLDLKDAFFCLRLHPTSQPLFAFEWRDPGMGISGQLTWTRLPQGFKNSPTLFNEALHRDLADFRIQHPDLILLQYVDDILLAATSELDCQQGTRALLQTLGDLGYRASAKKAQICQKQVKYLGYLLREGQRWLTEARKETVMGQPVPKTPRQLREFLGKAGFCRLFIPGFAEMAAPLYPLTKPGTLFSWGPDQQKAYQEIKQALLTAPALGLPDLTKPFELFVDEKQGYAKGVLTQKLGPWRRPVAYLSKKLDPVAAGWPPCLRMVAAIAVLTKDAGKLTMGQPLVILAPHAVEALVKQPPDRWLSNARMTHYQAMLLDTDRVQFGPVVALNPATLLPLPEEGAPHDCLEILAETHGTRPDLTDQPIPDADHTWYTDGSSFLQEGQRKAGAAVTTETEVIWAGALPAGTSAQRAELIALTQALKMAEGKRLNVYTDSRYAFATAHIHGEIYRRRGWLTSEGREIKNKSEILALLKALFLPKRLSIIHCLGHQKGDSAEARGNRLADQAAREAAIKTPPDTSTLLIAGKRTADGSEFEKRTADGSEFESPKKKAKVE

SEQ ID NO: 2182 - protein, 2096 aa, synthetic construct
MPAAKRVKLDGGDKKYSIGLDIGTNSVGWAVITDEYKVPSKKFKVLGNTDRHSIKKNLIGALLFDSGETAEATRLKRTARRRYTRRKNRICYLQEIFSNEMAKVDDSFFHRLEESFLVEEDKKHERHPIFGNIVDEVAYHEKYPTIYHLRKKLVDSTDKADLRLIYLALAHMIKFRGHFLIEGDLNPDNSDVDKLFIQLVQTYNQLFEENPINASGVDAKAILSARLSKSRRLENLIAQLPGEKKNGLFGNLIALSLGLTPNFKSNFDLAEDAKLQLSKDTYDDDLDNLLAQIGDQYADLFLAAKNLSDAILLSDILRVNTEITKAPLSASMIKRYDEHHQDLTLLKALVRQQLPEKYKEIFFDQSKNGYAGYIDGGASQEEFYKFIKPILEKMDGTEELLVKLNREDLLRKQRTFDNGSIPHQIHLGELHAILRRQEDFYPFLKDNREKIEKILTFRIPYYVGPLARGNSRFAWMTRKSEETITPWNFEEVVDKGASAQSFIERMTNFDKNLPNEKVLPKHSLLYEYFTVYNELTKVKYVTEGMRKPAFLSGEQKKAIVDLLFKTNRKVTVKQLKEDYFKKIECFDSVEISGVEDRFNASLGTYHDLLKIIKDKDFLDNEENEDILEDIVLTLTLFEDREMIEERLKTYAHLFDDKVMKQLKRRRYTGWGRLSRKLINGIRDKQSGKTILDFLKSDGFANRNFMQLIHDDSLTFKEDIQKAQVSGQGDSLHEHIANLAGSPAIKKGILQTVKVVDELVKVMGRHKPENIVIEMARENQTTQKGQKNSRERMKRIEEGIKELGSQILKEHPVENTQLQNEKLYLYYLQNGRDMYVDQELDINRLSDYDVDHIVPQSFLKDDSIDNKVLTRSDKARGKSDNVPSEEVVKKMKNYWRQLLNAKLITQRKFDNLTKAERGGLSELDKAGFIKRQLVETRQITKHVAQILDSRMNTKYDENDKLIREVKVITLKSKLVSDFRKDFQFYKVREINNYHHAHDAYLNAVVGTALIKKYPKLESEFVYGDYKVYDVRKMIAKSEQEIGKATAKYFFYSNIMNFFKTEITLANGEIRKRPLIETNGETGEIVWDKGRDFATVRKVLSMPQVNIVKKTEVQTGGFSKESILPKRNSDKLIARKKDWDPKKYGGFDSPTVAYSVLVVAKVEKGKSKKLKSVKELLGITIMERSSFEKNPIDFLEAKGYKEVKKDLIIKLPKYSLFELENGRKRMLASAGELQKGNELALPSKYVNFLYLASHYEKLKGSPEDNEQKQLFVEQHKHYLDEIIEQISEFSKRVILADANLDKVLSAYNKHRDKPIREQAENIIHLFTLTNLGAPAAFKYFDTTIDRKRYTSTKEVLDATLIHQSITGLYETRIDLSQLGGDGGGSSGGGEAAAKGGTLGIEDEYRLHETSTEPDVSLGSTWLSDFPQAWAETGGMGLAVRQAPLIIPLKATSTPVSIQQYPMSHEARLGIKPHIQRLLDQGILVPCQSPWNTPLLPVKKPGTNDYRPVQDLREVNKRVEDIHPTVPNPYNLLSGLPPSHQWYTVLDLKDAFFCLRLHPTSQPLFAFEWRDPGMGISGQLTWTRLPQGFKNSPTLFDEALHRDLADFRIQHPDLILLQYVDDILLAATSELDCQQGTRALLQTLGDLGYRASAKKAQICQKQVKYLGYLLREGQRWLTEARKETVMGQPVPKTPRQLREFLGTAGFCRLWIPGFAEMAAPLYPLTKTGTLFSWGPDQQKAYQEIKQALLTAPALGLPDLTKPFELFVDEKQGYAKGVLTQKLGPWRRPVAYLSKKLDPVAAGWPPCLRMVAAIAVLTKDAGKLTMGQPLVILAPHAVEALVKQPPDRWLSNARMTHYQAMLLDTDRVQFGPVVALNPATLLPLPEEGAPHDCLEILAETHGTRPDLTDQPIPDADHTWYTDGSSFLQEGQRKAGAAVTTETEVIWAGALPAGTSAQRAELIALTQALKMAEGKRLNVYTDSRYAFATAHIHGEIYRRRGLLTSEGREIKNKSEILALLKALFLPKRLSIIHCLGHQKGDSAEARGNRLADQAAREAAIKTPPDTSTLLAGKRTADGSEFEKRTADGSEFESPKKKAKVE

SEQ ID NO: 2183 - protein, 2091 aa, synthetic construct
MPAAKRVKLDGGDKKYSIGLDIGTNSVGWAVITDEYKVPSKKFKVLGNTDRHSIKKNLIGALLFDSGETAEATRLKRTARRRYTRRKNRICYLQEIFSNEMAKVDDSFFHRLEESFLVEEDKKHERHPIFGNIVDEVAYHEKYPTIYHLRKKLVDSTDKADLRLIYLALAHMIKFRGHFLIEGDLNPDNSDVDKLFIQLVQTYNQLFEENPINASGVDAKAILSARLSKSRRLENLIAQLPGEKKNGLFGNLIALSLGLTPNFKSNFDLAEDAKLQLSKDTYDDDLDNLLAQIGDQYADLFLAAKNLSDAILLSDILRVNTEITKAPLSASMIKRYDEHHQDLTLLKALVRQQLPEKYKEIFFDQSKNGYAGYIDGGASQEEFYKFIKPILEKMDGTEELLVKLNREDLLRKQRTFDNGSIPHQIHLGELHAILRRQEDFYPFLKDNREKIEKILTFRIPYYVGPLARGNSRFAWMTRKSEETITPWNFEEVVDKGASAQSFIERMTNFDKNLPNEKVLPKHSLLYEYFTVYNELTKVKYVTEGMRKPAFLSGEQKKAIVDLLFKTNRKVTVKQLKEDYFKKIECFDSVEISGVEDRFNASLGTYHDLLKIIKDKDFLDNEENEDILEDIVLTLTLFEDREMIEERLKTYAHLFDDKVMKQLKRRRYTGWGRLSRKLINGIRDKQSGKTILDFLKSDGFANRNFMQLIHDDSLTFKEDIQKAQVSGQGDSLHEHIANLAGSPAIKKGILQTVKVVDELVKVMGRHKPENIVIEMARENQTTQKGQKNSRERMKRIEEGIKELGSQILKEHPVENTQLQNEKLYLYYLQNGRDMYVDQELDINRLSDYDVDHIVPQSFLKDDSIDNKVLTRSDKARGKSDNVPSEEVVKKMKNYWRQLLNAKLITQRKFDNLTKAERGGLSELDKAGFIKRQLVETRQITKHVAQILDSRMNTKYDENDKLIREVKVITLKSKLVSDFRKDFQFYKVREINNYHHAHDAYLNAVVGTALIKKYPKLESEFVYGDYKVYDVRKMIAKSEQEIGKATAKYFFYSNIMNFFKTEITLANGEIRKRPLIETNGETGEIVWDKGRDFATVRKVLSMPQVNIVKKTEVQTGGFSKESILPKRNSDKLIARKKDWDPKKYGGFDSPTVAYSVLVVAKVEKGKSKKLKSVKELLGITIMERSSFEKNPIDFLEAKGYKEVKKDLIIKLPKYSLFELENGRKRMLASAGELQKGNELALPSKYVNFLYLASHYEKLKGSPEDNEQKQLFVEQHKHYLDEIIEQISEFSKRVILADANLDKVLSAYNKHRDKPIREQAENIIHLFTLTNLGAPAAFKYFDTTIDRKRYTSTKEVLDATLIHQSITGLYETRIDLSQLGGDGGGSSPAPGGTLGIEDEYRLHETSTEPDVSLGSTWLSDFPQAWAETGGMGLAVRQAPLIIPLKATSTPVSIQQYPMSHEARLGIKPHIQRLLDQGILVPCQSPWNTPLLPVKKPGTNDYRPVQDLREVNKRVEDIHPTVPNPYNLLSGLPPSHQWYTVLDLKDAFFCLRLHPTSQPLFAFEWRDPGMGISGQLTWTRLPQGFKNSPTLFDEALHRDLADFRIQHPDLILLQYVDDILLAATSELDCQQGTRALLQTLGDLGYRASAKKAQICQKQVKYLGYLLREGQRWLTEARKETVMGQPVPKTPRQLREFLGTAGFCRLWIPGFAEMAAPLYPLTKTGTLFSWGPDQQKAYQEIKQALLTAPALGLPDLTKPFELFVDEKQGYAKGVLTQKLGPWRRPVAYLSKKLDPVAAGWPPCLRMVAAIAVLTKDAGKLTMGQPLVILAPHAVEALVKQPPDRWLSNARMTHYQAMLLDTDRVQFGPVVALNPATLLPLPEEGAPHDCLEILAETHGTRPDLTDQPIPDADHTWYTDGSSFLQEGQRKAGAAVTTETEVIWAGALPAGTSAQRAELIALTQALKMAEGKRLNVYTDSRYAFATAHIHGEIYRRRGLLTSEGREIKNKSEILALLKALFLPKRLSIIHCLGHQKGDSAEARGNRLADQAAREAAIKTPPDTSTLLAGKRTADGSEFEKRTADGSEFESPKKKAKVE

SEQ ID NO: 2184 - protein, 2096 aa, synthetic construct
MPAAKRVKLDGGDKKYSIGLDIGTNSVGWAVITDEYKVPSKKFKVLGNTDRHSIKKNLIGALLFDSGETAEATRLKRTARRRYTRRKNRICYLQEIFSNEMAKVDDSFFHRLEESFLVEEDKKHERHPIFGNIVDEVAYHEKYPTIYHLRKKLVDSTDKADLRLIYLALAHMIKFRGHFLIEGDLNPDNSDVDKLFIQLVQTYNQLFEENPINASGVDAKAILSARLSKSRRLENLIAQLPGEKKNGLFGNLIALSLGLTPNFKSNFDLAEDAKLQLSKDTYDDDLDNLLAQIGDQYADLFLAAKNLSDAILLSDILRVNTEITKAPLSASMIKRYDEHHQDLTLLKALVRQQLPEKYKEIFFDQSKNGYAGYIDGGASQEEFYKFIKPILEKMDGTEELLVKLNREDLLRKQRTFDNGSIPHQIHLGELHAILRRQEDFYPFLKDNREKIEKILTFRIPYYVGPLARGNSRFAWMTRKSEETITPWNFEEVVDKGASAQSFIERMTNFDKNLPNEKVLPKHSLLYEYFTVYNELTKVKYVTEGMRKPAFLSGEQKKAIVDLLFKTNRKVTVKQLKEDYFKKIECFDSVEISGVEDRFNASLGTYHDLLKIIKDKDFLDNEENEDILEDIVLTLTLFEDREMIEERLKTYAHLFDDKVMKQLKRRRYTGWGRLSRKLINGIRDKQSGKTILDFLKSDGFANRNFMQLIHDDSLTFKEDIQKAQVSGQGDSLHEHIANLAGSPAIKKGILQTVKVVDELVKVMGRHKPENIVIEMARENQTTQKGQKNSRERMKRIEEGIKELGSQILKEHPVENTQLQNEKLYLYYLQNGRDMYVDQELDINRLSDYDVDHIVPQSFLKDDSIDNKVLTRSDKARGKSDNVPSEEVVKKMKNYWRQLLNAKLITQRKFDNLTKAERGGLSELDKAGFIKRQLVETRQITKHVAQILDSRMNTKYDENDKLIREVKVITLKSKLVSDFRKDFQFYKVREINNYHHAHDAYLNAVVGTALIKKYPKLESEFVYGDYKVYDVRKMIAKSEQEIGKATAKYFFYSNIMNFFKTEITLANGEIRKRPLIETNGETGEIVWDKGRDFATVRKVLSMPQVNIVKKTEVQTGGFSKESILPKRNSDKLIARKKDWDPKKYGGFDSPTVAYSVLVVAKVEKGKSKKLKSVKELLGITIMERSSFEKNPIDFLEAKGYKEVKKDLIIKLPKYSLFELENGRKRMLASAGELQKGNELALPSKYVNFLYLASHYEKLKGSPEDNEQKQLFVEQHKHYLDEIIEQISEFSKRVILADANLDKVLSAYNKHRDKPIREQAENIIHLFTLTNLGAPAAFKYFDTTIDRKRYTSTKEVLDATLIHQSITGLYETRIDLSQLGGDGGGGGEAAAKGGSGGTLGIEDEYRLHETSTEPDVSLGSTWLSDFPQAWAETGGMGLAVRQAPLIIPLKATSTPVSIQQYPMSHEARLGIKPHIQRLLDQGILVPCQSPWNTPLLPVKKPGTNDYRPVQDLREVNKRVEDIHPTVPNPYNLLSGLPPSHQWYTVLDLKDAFFCLRLHPTSQPLFAFEWRDPGMGISGQLTWTRLPQGFKNSPTLFDEALHRDLADFRIQHPDLILLQYVDDILLAATSELDCQQGTRALLQTLGDLGYRASAKKAQICQKQVKYLGYLLREGQRWLTEARKETVMGQPVPKTPRQLREFLGTAGFCRLWIPGFAEMAAPLYPLTKTGTLFSWGPDQQKAYQEIKQALLTAPALGLPDLTKPFELFVDEKQGYAKGVLTQKLGPWRRPVAYLSKKLDPVAAGWPPCLRMVAAIAVLTKDAGKLTMGQPLVILAPHAVEALVKQPPDRWLSNARMTHYQAMLLDTDRVQFGPVVALNPATLLPLPEEGAPHDCLEILAETHGTRPDLTDQPIPDADHTWYTDGSSFLQEGQRKAGAAVTTETEVIWAGALPAGTSAQRAELIALTQALKMAEGKRLNVYTDSRYAFATAHIHGEIYRRRGLLTSEGREIKNKSEILALLKALFLPKRLSIIHCLGHQKGDSAEARGNRLADQAAREAAIKTPPDTSTLLAGKRTADGSEFEKRTADGSEFESPKKKAKVE

SEQ ID NO: 2185 - protein, 2096 aa, synthetic construct
MPAAKRVKLDGGDKKYSIGLDIGTNSVGWAVITDEYKVPSKKFKVLGNTDRHSIKKNLIGALLFDSGETAEATRLKRTARRRYTRRKNRICYLQEIFSNEMAKVDDSFFHRLEESFLVEEDKKHERHPIFGNIVDEVAYHEKYPTIYHLRKKLVDSTDKADLRLIYLALAHMIKFRGHFLIEGDLNPDNSDVDKLFIQLVQTYNQLFEENPINASGVDAKAILSARLSKSRRLENLIAQLPGEKKNGLFGNLIALSLGLTPNFKSNFDLAEDAKLQLSKDTYDDDLDNLLAQIGDQYADLFLAAKNLSDAILLSDILRVNTEITKAPLSASMIKRYDEHHQDLTLLKALVRQQLPEKYKEIFFDQSKNGYAGYIDGGASQEEFYKFIKPILEKMDGTEELLVKLNREDLLRKQRTFDNGSIPHQIHLGELHAILRRQEDFYPFLKDNREKIEKILTFRIPYYVGPLARGNSRFAWMTRKSEETITPWNFEEVVDKGASAQSFIERMTNFDKNLPNEKVLPKHSLLYEYFTVYNELTKVKYVTEGMRKPAFLSGEQKKAIVDLLFKTNRKVTVKQLKEDYFKKIECFDSVEISGVEDRFNASLGTYHDLLKIIKDKDFLDNEENEDILEDIVLTLTLFEDREMIEERLKTYAHLFDDKVMKQLKRRRYTGWGRLSRKLINGIRDKQSGKTILDFLKSDGFANRNFMQLIHDDSLTFKEDIQKAQVSGQGDSLHEHIANLAGSPAIKKGILQTVKVVDELVKVMGRHKPENIVIEMARENQTTQKGQKNSRERMKRIEEGIKELGSQILKEHPVENTQLQNEKLYLYYLQNGRDMYVDQELDINRLSDYDVDHIVPQSFLKDDSIDNKVLTRSDKARGKSDNVPSEEVVKKMKNYWRQLLNAKLITQRKFDNLTKAERGGLSELDKAGFIKRQLVETRQITKHVAQILDSRMNTKYDENDKLIREVKVITLKSKLVSDFRKDFQFYKVREINNYHHAHDAYLNAVVGTALIKKYPKLESEFVYGDYKVYDVRKMIAKSEQEIGKATAKYFFYSNIMNFFKTEITLANGEIRKRPLIETNGETGEIVWDKGRDFATVRKVLSMPQVNIVKKTEVQTGGFSKESILPKRNSDKLIARKKDWDPKKYGGFDSPTVAYSVLVVAKVEKGKSKKLKSVKELLGITIMERSSFEKNPIDFLEAKGYKEVKKDLIIKLPKYSLFELENGRKRMLASAGELQKGNELALPSKYVNFLYLASHYEKLKGSPEDNEQKQLFVEQHKHYLDEIIEQISEFSKRVILADANLDKVLSAYNKHRDKPIREQAENIIHLFTLTNLGAPAAFKYFDTTIDRKRYTSTKEVLDATLIHQSITGLYETRIDLSQLGGDGGEAAAKPAPGSSGGTLGIEDEYRLHETSTEPDVSLGSTWLSDFPQAWAETGGMGLAVRQAPLIIPLKATSTPVSIQQYPMSHEARLGIKPHIQRLLDQGILVPCQSPWNTPLLPVKKPGTNDYRPVQDLREVNKRVEDIHPTVPNPYNLLSGLPPSHQWYTVLDLKDAFFCLRLHPTSQPLFAFEWRDPGMGISGQLTWTRLPQGFKNSPTLFDEALHRDLADFRIQHPDLILLQYVDDILLAATSELDCQQGTRALLQTLGDLGYRASAKKAQICQKQVKYLGYLLREGQRWLTEARKETVMGQPVPKTPRQLREFLGTAGFCRLWIPGFAEMAAPLYPLTKTGTLFSWGPDQQKAYQEIKQALLTAPALGLPDLTKPFELFVDEKQGYAKGVLTQKLGPWRRPVAYLSKKLDPVAAGWPPCLRMVAAIAVLTKDAGKLTMGQPLVILAPHAVEALVKQPPDRWLSNARMTHYQAMLLDTDRVQFGPVVALNPATLLPLPEEGAPHDCLEILAETHGTRPDLTDQPIPDADHTWYTDGSSFLQEGQRKAGAAVTTETEVIWAGALPAGTSAQRAELIALTQALKMAEGKRLNVYTDSRYAFATAHIHGEIYRRRGLLTSEGREIKNKSEILALLKALFLPKRLSIIHCLGHQKGDSAEARGNRLADQAAREAAIKTPPDTSTLLAGKRTADGSEFEKRTADGSEFESPKKKAKVE

SEQ ID NO: 2186 - protein, 2096 aa, synthetic construct; identical to SEQ ID NO: 2069

SEQ ID NO: 2187 - protein, 2096 aa, synthetic construct
MPAAKRVKLDGGDKKYSIGLDIGTNSVGWAVITDEYKVPSKKFKVLGNTDRHSIKKNLIGALLFDSGETAEATRLKRTARRRYTRRKNRICYLQEIFSNEMAKVDDSFFHRLEESFLVEEDKKHERHPIFGNIVDEVAYHEKYPTIYHLRKKLVDSTDKADLRLIYLALAHMIKFRGHFLIEGDLNPDNSDVDKLFIQLVQTYNQLFEENPINASGVDAKAILSARLSKSRRLENLIAQLPGEKKNGLFGNLIALSLGLTPNFKSNFDLAEDAKLQLSKDTYDDDLDNLLAQIGDQYADLFLAAKNLSDAILLSDILRVNTEITKAPLSASMIKRYDEHHQDLTLLKALVRQQLPEKYKEIFFDQSKNGYAGYIDGGASQEEFYKFIKPILEKMDGTEELLVKLNREDLLRKQRTFDNGSIPHQIHLGELHAILRRQEDFYPFLKDNREKIEKILTFRIPYYVGPLARGNSRFAWMTRKSEETITPWNFEEVVDKGASAQSFIERMTNFDKNLPNEKVLPKHSLLYEYFTVYNELTKVKYVTEGMRKPAFLSGEQKKAIVDLLFKTNRKVTVKQLKEDYFKKIECFDSVEISGVEDRFNASLGTYHDLLKIIKDKDFLDNEENEDILEDIVLTLTLFEDREMIEERLKTYAHLFDDKVMKQLKRRRYTGWGRLSRKLINGIRDKQSGKTILDFLKSDGFANRNFMQLIHDDSLTFKEDIQKAQVSGQGDSLHEHIANLAGSPAIKKGILQTVKVVDELVKVMGRHKPENIVIEMARENQTTQKGQKNSRERMKRIEEGIKELGSQILKEHPVENTQLQNEKLYLYYLQNGRDMYVDQELDINRLSDYDVDHIVPQSFLKDDSIDNKVLTRSDKARGKSDNVPSEEVVKKMKNYWRQLLNAKLITQRKFDNLTKAERGGLSELDKAGFIKRQLVETRQITKHVAQILDSRMNTKYDENDKLIREVKVITLKSKLVSDFRKDFQFYKVREINNYHHAHDAYLNAVVGTALIKKYPKLESEFVYGDYKVYDVRKMIAKSEQEIGKATAKYFFYSNIMNFFKTEITLANGEIRKRPLIETNGETGEIVWDKGRDFATVRKVLSMPQVNIVKKTEVQTGGFSKESILPKRNSDKLIARKKDWDPKKYGGFDSPTVAYSVLVVAKVEKGKSKKLKSVKELLGITIMERSSFEKNPIDFLEAKGYKEVKKDLIIKLPKYSLFELENGRKRMLASAGELQKGNELALPSKYVNFLYLASHYEKLKGSPEDNEQKQLFVEQHKHYLDEIIEQISEFSKRVILADANLDKVLSAYNKHRDKPIREQAENIIHLFTLTNLGAPAAFKYFDTTIDRKRYTSTKEVLDATLIHQSITGLYETRIDLSQLGGDGGPAPAPAPAPAPGGTLGIEDEYRLHETSTEPDVSLGSTWLSDFPQAWAETGGMGLAVRQAPLIIPLKATSTPVSIQQYPMSHEARLGIKPHIQRLLDQGILVPCQSPWNTPLLPVKKPGTNDYRPVQDLREVNKRVEDIHPTVPNPYNLLSGLPPSHQWYTVLDLKDAFFCLRLHPTSQPLFAFEWRDPGMGISGQLTWTRLPQGFKNSPTLFNEALHRDLADFRIQHPDLILLQYVDDILLAATSELDCQQGTRALLQTLGDLGYRASAKKAQICQKQVKYLGYLLREGQRWLTEARKETVMGQPVPKTPRQLREFLGTAGFCRLWIPGFAEMAAPLYPLTKPGTLFSWGPDQQKAYQEIKQALLTAPALGLPDLTKPFELFVDEKQGYAKGVLTQKLGPWRRPVAYLSKKLDPVAAGWPPCLRMVAAIAVLTKDAGKLTMGQPLVILAPHAVEALVKQPPDRWLSNARMTHYQAMLLDTDRVQFGPVVALNPATLLPLPEEGAPHDCLEILAETHGTRPDLTDQPIPDADHTWYTDGSSFLQEGQRKAGAAVTTETEVIWAGALPAGTSAQRAELIALTQALKMAEGKRLNVYTDSRYAFATAHIHGEIYRRRGWLTSEGREIKNKSEILALLKALFLPKRLSIIHCLGHQKGDSAEARGNRLADQAAREAAIKTPPDTSTLLAGKRTADGSEFEKRTADGSEFESPKKKAKVE

SEQ ID NO: 2188 - protein, 2110 aa, synthetic construct
MPAAKRVKLDGGDKKYSIGLDIGTNSVGWAVITDEYKVPSKKFKVLGNTDRHSIKKNLIGALLFDSGETAEATRLKRTARRRYTRRKNRICYLQEIFSNEMAKVDDSFFHRLEESFLVEEDKKHERHPIFGNIVDEVAYHEKYPTIYHLRKKLVDSTDKADLRLIYLALAHMIKFRGHFLIEGDLNPDNSDVDKLFIQLVQTYNQLFEENPINASGVDAKAILSARLSKSRRLENLIAQLPGEKKNGLFGNLIALSLGLTPNFKSNFDLAEDAKLQLSKDTYDDDLDNLLAQIGDQYADLFLAAKNLSDAILLSDILRVNTEITKAPLSASMIKRYDEHHQDLTLLKALVRQQLPEKYKEIFFDQSKNGYAGYIDGGASQEEFYKFIKPILEKMDGTEELLVKLNREDLLRKQRTFDNGSIPHQIHLGELHAILRRQEDFYPFLKDNREKIEKILTFRIPYYVGPLARGNSRFAWMTRKSEETITPWNFEEVVDKGASAQSFIERMTNFDKNLPNEKVLPKHSLLYEYFTVYNELTKVKYVTEGMRKPAFLSGEQKKAIVDLLFKTNRKVTVKQLKEDYFKKIECFDSVEISGVEDRFNASLGTYHDLLKIIKDKDFLDNEENEDILEDIVLTLTLFEDREMIEERLKTYAHLFDDKVMKQLKRRRYTGWGRLSRKLINGIRDKQSGKTILDFLKSDGFANRNFMQLIHDDSLTFKEDIQKAQVSGQGDSLHEHIANLAGSPAIKKGILQTVKVVDELVKVMGRHKPENIVIEMARENQTTQKGQKNSRERMKRIEEGIKELGSQILKEHPVENTQLQNEKLYLYYLQNGRDMYVDQELDINRLSDYDVDHIVPQSFLKDDSIDNKVLTRSDKARGKSDNVPSEEVVKKMKNYWRQLLNAKLITQRKFDNLTKAERGGLSELDKAGFIKRQLVETRQITKHVAQILDSRMNTKYDENDKLIREVKVITLKSKLVSDFRKDFQFYKVREINNYHHAHDAYLNAVVGTALIKKYPKLESEFVYGDYKVYDVRKMIAKSEQEIGKATAKYFFYSNIMNFFKTEITLANGEIRKRPLIETNGETGEIVWDKGRDFATVRKVLSMPQVNIVKKTEVQTGGFSKESILPKRNSDKLIARKKDWDPKKYGGFDSPTVAYSVLVVAKVEKGKSKKLKSVKELLGITIMERSSFEKNPIDFLEAKGYKEVKKDLIIKLPKYSLFELENGRKRMLASAGELQKGNELALPSKYVNFLYLASHYEKLKGSPEDNEQKQLFVEQHKHYLDEIIEQISEFSKRVILADANLDKVLSAYNKHRDKPIREQAENIIHLFTLTNLGAPAAFKYFDTTIDRKRYTSTKEVLDATLIHQSITGLYETRIDLSQLGGDGGEAAAKEAAAKEAAAKEAAAKEAAAKGGTLGIEDEYRLHETSTEPDVSLGSTWLSDFPQAWAETGGMGLAVRQAPLIIPLKATSTPVSIQQYPMSHEARLGIKPHIQRLLDQGILVPCQSPWNTPLLPVKKPGTNDYRPVQDLREVNKRVEDIHPTVPNPYNLLSGLPPSHQWYTVLDLKDAFFCLRLHPTSQPLFAFEWRDPGMGISGQLTWTRLPQGFKNSPTLFNEALHRDLADFRIQHPDLILLQYVDDILLAATSELDCQQGTRALLQTLGDLGYRASAKKAQICQKQVKYLGYLLREGQRWLTEARKETVMGQPVPKTPRQLREFLGTAGFCRLWIPGFAEMAAPLYPLTKPGTLFSWGPDQQKAYQEIKQALLTAPALGLPDLTKPFELFVDEKQGYAKGVLTQKLGPWRRPVAYLSKKLDPVAAGWPPCLRMVAAIAVLTKDAGKLTMGQPLVILAPHAVEALVKQPPDRWLSNARMTHYQAMLLDTDRVQFGPVVALNPATLLPLPEEGAPHDCLEILAETHGTRPDLTDQPIPDADHTWYTDGSSFLQEGQRKAGAAVTTETEVIWAGALPAGTSAQRAELIALTQALKMAEGKRLNVYTDSRYAFATAHIHGEIYRRRGWLTSEGREIKNKSEILALLKALFLPKRLSIIHCLGHQKGDSAEARGNRLADQAAREAAIKTPPDTSTLLAGKRTADGSEFEKRTADGSEFESPKKKAKVE

SEQ ID NO: 2189 - protein, 2115 aa, synthetic construct
MPAAKRVKLDGGDKKYSIGLDIGTNSVGWAVITDEYKVPSKKFKVLGNTDRHSIKKNLIGALLFDSGETAEATRLKRTARRRYTRRKNRICYLQEIFSNEMAKVDDSFFHRLEESFLVEEDKKHERHPIFGNIVDEVAYHEKYPTIYHLRKKLVDSTDKADLRLIYLALAHMIKFRGHFLIEGDLNPDNSDVDKLFIQLVQTYNQLFEENPINASGVDAKAILSARLSKSRRLENLIAQLPGEKKNGLFGNLIALSLGLTPNFKSNFDLAEDAKLQLSKDTYDDDLDNLLAQIGDQYADLFLAAKNLSDAILLSDILRVNTEITKAPLSASMIKRYDEHHQDLTLLKALVRQQLPEKYKEIFFDQSKNGYAGYIDGGASQEEFYKFIKPILEKMDGTEELLVKLNREDLLRKQRTFDNGSIPHQIHLGELHAILRRQEDFYPFLKDNREKIEKILTFRIPYYVGPLARGNSRFAWMTRKSEETITPWNFEEVVDKGASAQSFIERMTNFDKNLPNEKVLPKHSLLYEYFTVYNELTKVKYVTEGMRKPAFLSGEQKKAIVDLLFKTNRKVTVKQLKEDYFKKIECFDSVEISGVEDRFNASLGTYHDLLKIIKDKDFLDNEENEDILEDIVLTLTLFEDREMIEERLKTYAHLFDDKVMKQLKRRRYTGWGRLSRKLINGIRDKQSGKTILDFLKSDGFANRNFMQLIHDDSLTFKEDIQKAQVSGQGDSLHEHIANLAGSPAIKKGILQTVKVVDELVKVMGRHKPENIVIEMARENQTTQKGQKNSRERMKRIEEGIKELGSQILKEHPVENTQLQNEKLYLYYLQNGRDMYVDQELDINRLSDYDVDHIVPQSFLKDDSIDNKVLTRSDKARGKSDNVPSEEVVKKMKNYWRQLLNAKLITQRKFDNLTKAERGGLSELDKAGFIKRQLVETRQITKHVAQILDSRMNTKYDENDKLIREVKVITLKSKLVSDFRKDFQFYKVREINNYHHAHDAYLNAVVGTALIKKYPKLESEFVYGDYKVYDVRKMIAKSEQEIGKATAKYFFYSNIMNFFKTEITLANGEIRKRPLIETNGETGEIVWDKGRDFATVRKVLSMPQVNIVKKTEVQTGGFSKESILPKRNSDKLIARKKDWDPKKYGGFDSPTVAYSVLVVAKVEKGKSKKLKSVKELLGITIMERSSFEKNPIDFLEAKGYKEVKKDLIIKLPKYSLFELENGRKRMLASAGELQKGNELALPSKYVNFLYLASHYEKLKGSPEDNEQKQLFVEQHKHYLDEIIEQISEFSKRVILADANLDKVLSAYNKHRDKPIREQAENIIHLFTLTNLGAPAAFKYFDTTIDRKRYTSTKEVLDATLIHQSITGLYETRIDLSQLGGDGGEAAAKEAAAKEAAAKEAAAKEAAAKEAAAKGGTLGIEDEYRLHETSTEPDVSLGSTWLSDFPQAWAETGGMGLAVRQAPLIIPLKATSTPVSIQQYPMSHEARLGIKPHIQRLLDQGILVPCQSPWNTPLLPVKKPGTNDYRPVQDLREVNKRVEDIHPTVPNPYNLLSGLPPSHQWYTVLDLKDAFFCLRLHPTSQPLFAFEWRDPGMGISGQLTWTRLPQGFKNSPTLFNEALHRDLADFRIQHPDLILLQYVDDILLAATSELDCQQGTRALLQTLGDLGYRASAKKAQICQKQVKYLGYLLREGQRWLTEARKETVMGQPVPKTPRQLREFLGTAGFCRLWIPGFAEMAAPLYPLTKPGTLFSWGPDQQKAYQEIKQALLTAPALGLPDLTKPFELFVDEKQGYAKGVLTQKLGPWRRPVAYLSKKLDPVAAGWPPCLRMVAAIAVLTKDAGKLTMGQPLVILAPHAVEALVKQPPDRWLSNARMTHYQAMLLDTDRVQFGPVVALNPATLLPLPEEGAPHDCLEILAETHGTRPDLTDQPIPDADHTWYTDGSSFLQEGQRKAGAAVTTETEVIWAGALPAGTSAQRAELIALTQALKMAEGKRLNVYTDSRYAFATAHIHGEIYRRRGWLTSEGREIKNKSEILALLKALFLPKRLSIIHCLGHQKGDSAEARGNRLADQAAREAAIKTPPDTSTLLAGKRTADGSEFEKRTADGSEFESPKKKAKVE

SEQ ID NO: 2190 - protein, 2096 aa, synthetic construct
MPAAKRVKLDGGDKKYSIGLDIGTNSVGWAVITDEYKVPSKKFKVLGNTDRHSIKKNLIGALLFDSGETAEATRLKRTARRRYTRRKNRICYLQEIFSNEMAKVDDSFFHRLEESFLVEEDKKHERHPIFGNIVDEVAYHEKYPTIYHLRKKLVDSTDKADLRLIYLALAHMIKFRGHFLIEGDLNPDNSDVDKLFIQLVQTYNQLFEENPINASGVDAKAILSARLSKSRRLENLIAQLPGEKKNGLFGNLIALSLGLTPNFKSNFDLAEDAKLQLSKDTYDDDLDNLLAQIGDQYADLFLAAKNLSDAILLSDILRVNTEITKAPLSASMIKRYDEHHQDLTLLKALVRQQLPEKYKEIFFDQSKNGYAGYIDGGASQEEFYKFIKPILEKMDGTEELLVKLNREDLLRKQRTFDNGSIPHQIHLGELHAILRRQEDFYPFLKDNREKIEKILTFRIPYYVGPLARGNSRFAWMTRKSEETITPWNFEEVVDKGASAQSFIERMTNFDKNLPNEKVLPKHSLLYEYFTVYNELTKVKYVTEGMRKPAFLSGEQKKAIVDLLFKTNRKVTVKQLKEDYFKKIECFDSVEISGVEDRFNASLGTYHDLLKIIKDKDFLDNEENEDILEDIVLTLTLFEDREMIEERLKTYAHLFDDKVMKQLKRRRYTGWGRLSRKLINGIRDKQSGKTILDFLKSDGFANRNFMQLIHDDSLTFKEDIQKAQVSGQGDSLHEHIANLAGSPAIKKGILQTVKVVDELVKVMGRHKPENIVIEMARENQTTQKGQKNSRERMKRIEEGIKELGSQILKEHPVENTQLQNEKLYLYYLQNGRDMYVDQELDINRLSDYDVDHIVPQSFLKDDSIDNKVLTRSDKARGKSDNVPSEEVVKKMKNYWRQLLNAKLITQRKFDNLTKAERGGLSELDKAGFIKRQLVETRQITKHVAQILDSRMNTKYDENDKLIREVKVITLKSKLVSDFRKDFQFYKVREINNYHHAHDAYLNAVVGTALIKKYPKLESEFVYGDYKVYDVRKMIAKSEQEIGKATAKYFFYSNIMNFFKTEITLANGEIRKRPLIETNGETGEIVWDKGRDFATVRKVLSMPQVNIVKKTEVQTGGFSKESILPKRNSDKLIARKKDWDPKKYGGFDSPTVAYSVLVVAKVEKGKSKKLKSVKELLGITIMERSSFEKNPIDFLEAKGYKEVKKDLIIKLPKYSLFELENGRKRMLASAGELQKGNELALPSKYVNFLYLASHYEKLKGSPEDNEQKQLFVEQHKHYLDEIIEQISEFSKRVILADANLDKVLSAYNKHRDKPIREQAENIIHLFTLTNLGAPAAFKYFDTTIDRKRYTSTKEVLDATLIHQSITGLYETRIDLSQLGGDGGEAAAKGSSGGSGGTLGIEDEYRLHETSTEPDVSLGSTWLSDFPQAWAETGGMGLAVRQAPLIIPLKATSTPVSIQQYPMSHEARLGIKPHIQRLLDQGILVPCQSPWNTPLLPVKKPGTNDYRPVQDLREVNKRVEDIHPTVPNPYNLLSGLPPSHQWYTVLDLKDAFFCLRLHPTSQPLFAFEWRDPGMGISGQLTWTRLPQGFKNSPTLFNEALHRDLADFRIQHPDLILLQYVDDILLAATSELDCQQGTRALLQTLGDLGYRASAKKAQICQKQVKYLGYLLREGQRWLTEARKETVMGQPVPKTPRQLREFLGTAGFCRLWIPGFAEMAAPLYPLTKPGTLFSWGPDQQKAYQEIKQALLTAPALGLPDLTKPFELFVDEKQGYAKGVLTQKLGPWRRPVAYLSKKLDPVAAGWPPCLRMVAAIAVLTKDAGKLTMGQPLVILAPHAVEALVKQPPDRWLSNARMTHYQAMLLDTDRVQFGPVVALNPATLLPLPEEGAPHDCLEILAETHGTRPDLTDQPIPDADHTWYTDGSSFLQEGQRKAGAAVTTETEVIWAGALPAGTSAQRAELIALTQALKMAEGKRLNVYTDSRYAFATAHIHGEIYRRRGWLTSEGREIKNKSEILALLKALFLPKRLSIIHCLGHQKGDSAEARGNRLADQAAREAAIKTPPDTSTLLAGKRTADGSEFEKRTADGSEFESPKKKAKVE

SEQ ID NO: 2191 - protein, 2105 aa, synthetic construct; identical to SEQ ID NO: 2070

SEQ ID NO: 2192 - protein, 2096 aa, synthetic construct
MPAAKRVKLDGGDKKYSIGLDIGTNSVGWAVITDEYKVPSKKFKVLGNTDRHSIKKNLIGALLFDSGETAEATRLKRTARRRYTRRKNRICYLQEIFSNEMAKVDDSFFHRLEESFLVEEDKKHERHPIFGNIVDEVAYHEKYPTIYHLRKKLVDSTDKADLRLIYLALAHMIKFRGHFLIEGDLNPDNSDVDKLFIQLVQTYNQLFEENPINASGVDAKAILSARLSKSRRLENLIAQLPGEKKNGLFGNLIALSLGLTPNFKSNFDLAEDAKLQLSKDTYDDDLDNLLAQIGDQYADLFLAAKNLSDAILLSDILRVNTEITKAPLSASMIKRYDEHHQDLTLLKALVRQQLPEKYKEIFFDQSKNGYAGYIDGGASQEEFYKFIKPILEKMDGTEELLVKLNREDLLRKQRTFDNGSIPHQIHLGELHAILRRQEDFYPFLKDNREKIEKILTFRIPYYVGPLARGNSRFAWMTRKSEETITPWNFEEVVDKGASAQSFIERMTNFDKNLPNEKVLPKHSLLYEYFTVYNELTKVKYVTEGMRKPAFLSGEQKKAIVDLLFKTNRKVTVKQLKEDYFKKIECFDSVEISGVEDRFNASLGTYHDLLKIIKDKDFLDNEENEDILEDIVLTLTLFEDREMIEERLKTYAHLFDDKVMKQLKRRRYTGWGRLSRKLINGIRDKQSGKTILDFLKSDGFANRNFMQLIHDDSLTFKEDIQKAQVSGQGDSLHEHIANLAGSPAIKKGILQTVKVVDELVKVMGRHKPENIVIEMARENQTTQKGQKNSRERMKRIEEGIKELGSQILKEHPVENTQLQNEKLYLYYLQNGRDMYVDQELDINRLSDYDVDHIVPQSFLKDDSIDNKVLTRSDKARGKSDNVPSEEVVKKMKNYWRQLLNAKLITQRKFDNLTKAERGGLSELDKAGFIKRQLVETRQITKHVAQILDSRMNTKYDENDKLIREVKVITLKSKLVSDFRKDFQFYKVREINNYHHAHDAYLNAVVGTALIKKYPKLESEFVYGDYKVYDVRKMIAKSEQEIGKATAKYFFYSNIMNFFKTEITLANGEIRKRPLIETNGETGEIVWDKGRDFATVRKVLSMPQVNIVKKTEVQTGGFSKESILPKRNSDKLIARKKDWDPKKYGGFDSPTVAYSVLVVAKVEKGKSKKLKSVKELLGITIMERSSFEKNPIDFLEAKGYKEVKKDLIIKLPKYSLFELENGRKRMLASAGELQKGNELALPSKYVNFLYLASHYEKLKGSPEDNEQKQLFVEQHKHYLDEIIEQISEFSKRVILADANLDKVLSAYNKHRDKPIREQAENIIHLFTLTNLGAPAAFKYFDTTIDRKRYTSTKEVLDATLIHQSITGLYETRIDLSQLGGDGGGGSPAPEAAAKGGTLGIEDEYRLHETSTEPDVSLGSTWLSDFPQAWAETGGMGLAVRQAPLIIPLKATSTPVSIQQYPMSHEARLGIKPHIQRLLDQGILVPCQSPWNTPLLPVKKPGTNDYRPVQDLREVNKRVEDIHPTVPNPYNLLSGLPPSHQWYTVLDLKDAFFCLRLHPTSQPLFAFEWRDPGMGISGQLTWTRLPQGFKNSPTLFNEALHRDLADFRIQHPDLILLQYVDDILLAATSELDCQQGTRALLQTLGDLGYRASAKKAQICQKQVKYLGYLLREGQRWLTEARKETVMGQPVPKTPRQLREFLGTAGFCRLWIPGFAEMAAPLYPLTKPGTLFSWGPDQQKAYQEIKQALLTAPALGLPDLTKPFELFVDEKQGYAKGVLTQKLGPWRRPVAYLSKKLDPVAAGWPPCLRMVAAIAVLTKDAGKLTMGQPLVILAPHAVEALVKQPPDRWLSNARMTHYQAMLLDTDRVQFGPVVALNPATLLPLPEEGAPHDCLEILAETHGTRPDLTDQPIPDADHTWYTDGSSFLQEGQRKAGAAVTTETEVIWAGALPAGTSAQRAELIALTQALKMAEGKRLNVYTDSRYAFATAHIHGEIYRRRGWLTSEGREIKNKSEILALLKALFLPKRLSIIHCLGHQKGDSAEARGNRLADQAAREAAIKTPPDTSTLLAGKRTADGSEFEKRTADGSEFESPKKKAKVE

SEQ ID NO: 2193 - protein, 2115 aa, synthetic construct
MPAAKRVKLDGGDKKYSIGLDIGTNSVGWAVITDEYKVPSKKFKVLGNTDRHSIKKNLIGALLFDSGETAEATRLKRTARRRYTRRKNRICYLQEIFSNEMAKVDDSFFHRLEESFLVEEDKKHERHPIFGNIVDEVAYHEKYPTIYHLRKKLVDSTDKADLRLIYLALAHMIKFRGHFLIEGDLNPDNSDVDKLFIQLVQTYNQLFEENPINASGVDAKAILSARLSKSRRLENLIAQLPGEKKNGLFGNLIALSLGLTPNFKSNFDLAEDAKLQLSKDTYDDDLDNLLAQIGDQYADLFLAAKNLSDAILLSDILRVNTEITKAPLSASMIKRYDEHHQDLTLLKALVRQQLPEKYKEIFFDQSKNGYAGYIDGGASQEEFYKFIKPILEKMDGTEELLVKLNREDLLRKQRTFDNGSIPHQIHLGELHAILRRQEDFYPFLKDNREKIEKILTFRIPYYVGPLARGNSRFAWMTRKSEETITPWNFEEVVDKGASAQSFIERMTNFDKNLPNEKVLPKHSLLYEYFTVYNELTKVKYVTEGMRKPAFLSGEQKKAIVDLLFKTNRKVTVKQLKEDYFKKIECFDSVEISGVEDRFNASLGTYHDLLKIIKDKDFLDNEENEDILEDIVLTLTLFEDREMIEERLKTYAHLFDDKVMKQLKRRRYTGWGRLSRKLINGIRDKQSGKTILDFLKSDGFANRNFMQLIHDDSLTFKEDIQKAQVSGQGDSLHEHIANLAGSPAIKKGILQTVKVVDELVKVMGRHKPENIVIEMARENQTTQKGQKNSRERMKRIEEGIKELGSQILKEHPVENTQLQNEKLYLYYLQNGRDMYVDQELDINRLSDYDVDHIVPQSFLKDDSIDNKVLTRSDKARGKSDNVPSEEVVKKMKNYWRQLLNAKLITQRKFDNLTKAERGGLSELDKAGFIKRQLVETRQITKHVAQILDSRMNTKYDENDKLIREVKVITLKSKLVSDFRKDFQFYKVREINNYHHAHDAYLNAVVGTALIKKYPKLESEFVYGDYKVYDVRKMIAKSEQEIGKATAKYFFYSNIMNFFKTEITLANGEIRKRPLIETNGETGEIVWDKGRDFATVRKVLSMPQVNIVKKTEVQTGGFSKESILPKRNSDKLIARKKDWDPKKYGGFDSPTVAYSVLVVAKVEKGKSKKLKSVKELLGITIMERSSFEKNPIDFLEAKGYKEVKKDLIIKLPKYSLFELENGRKRMLASAGELQKGNELALPSKYVNFLYLASHYEKLKGSPEDNEQKQLFVEQHKHYLDEIIEQISEFSKRVILADANLDKVLSAYNKHRDKPIREQAENIIHLFTLTNLGAPAAFKYFDTTIDRKRYTSTKEVLDATLIHQSITGLYETRIDLSQLGGDGGGGGGSGGGGSGGGGSGGGGSGGGGSGGGGSGGTLGIEDEYRLHETSTEPDVSLGSTWLSDFPQAWAETGGMGLAVRQAPLIIPLKATSTPVSIQQYPMSHEARLGIKPHIQRLLDQGILVPCQSPWNTPLLPVKKPGTNDYRPVQDLREVNKRVEDIHPTVPNPYNLLSGLPPSHQWYTVLDLKDAFFCLRLHPTSQPLFAFEWRDPGMGISGQLTWTRLPQGFKNSPTLFNEALHRDLADFRIQHPDLILLQYVDDILLAATSELDCQQGTRALLQTLGDLGYRASAKKAQICQKQVKYLGYLLREGQRWLTEARKETVMGQPVPKTPRQLREFLGTAGFCRLWIPGFAEMAAPLYPLTKPGTLFSWGPDQQKAYQEIKQALLTAPALGLPDLTKPFELFVDEKQGYAKGVLTQKLGPWRRPVAYLSKKLDPVAAGWPPCLRMVAAIAVLTKDAGKLTMGQPLVILAPHAVEALVKQPPDRWLSNARMTHYQAMLLDTDRVQFGPVVALNPATLLPLPEEGAPHDCLEILAETHGTRPDLTDQPIPDADHTWYTDGSSFLQEGQRKAGAAVTTETEVIWAGALPAGTSAQRAELIALTQALKMAEGKRLNVYTDSRYAFATAHIHGEIYRRRGWLTSEGREIKNKSEILALLKALFLPKRLSIIHCLGHQKGDSAEARGNRLADQAAREAAIKTPPDTSTLLAGKRTADGSEFEKRTADGSEFESPKKKAKVE

SEQ ID NO: 2194 - protein, 2131 aa, synthetic construct
MPAAKRVKLDGGDKKYSIGLDIGTNSVGWAVITDEYKVPSKKFKVLGNTDRHSIKKNLIGALLFDSGETAEATRLKRTARRRYTRRKNRICYLQEIFSNEMAKVDDSFFHRLEESFLVEEDKKHERHPIFGNIVDEVAYHEKYPTIYHLRKKLVDSTDKADLRLIYLALAHMIKFRGHFLIEGDLNPDNSDVDKLFIQLVQTYNQLFEENPINASGVDAKAILSARLSKSRRLENLIAQLPGEKKNGLFGNLIALSLGLTPNFKSNFDLAEDAKLQLSKDTYDDDLDNLLAQIGDQYADLFLAAKNLSDAILLSDILRVNTEITKAPLSASMIKRYDEHHQDLTLLKALVRQQLPEKYKEIFFDQSKNGYAGYIDGGASQEEFYKFIKPILEKMDGTEELLVKLNREDLLRKQRTFDNGSIPHQIHLGELHAILRRQEDFYPFLKDNREKIEKILTFRIPYYVGPLARGNSRFAWMTRKSEETITPWNFEEVVDKGASAQSFIERMTNFDKNLPNEKVLPKHSLLYEYFTVYNELTKVKYVTEGMRKPAFLSGEQKKAIVDLLFKTNRKVTVKQLKEDYFKKIECFDSVEISGVEDRFNASLGTYHDLLKIIKDKDFLDNEENEDILEDIVLTLTLFEDREMIEERLKTYAHLFDDKVMKQLKRRRYTGWGRLSRKLINGIRDKQSGKTILDFLKSDGFANRNFMQLIHDDSLTFKEDIQKAQVSGQGDSLHEHIANLAGSPAIKKGILQTVKVVDELVKVMGRHKPENIVIEMARENQTTQKGQKNSRERMKRIEEGIKELGSQILKEHPVENTQLQNEKLYLYYLQNGRDMYVDQELDINRLSDYDVDHIVPQSFLKDDSIDNKVLTRSDKARGKSDNVPSEEVVKKMKNYWRQLLNAKLITQRKFDNLTKAERGGLSELDKAGFIKRQLVETRQITKHVAQILDSRMNTKYDENDKLIREVKVITLKSKLVSDFRKDFQFYKVREINNYHHAHDAYLNAVVGTALIKKYPKLESEFVYGDYKVYDVRKMIAKSEQEIGKATAKYFFYSNIMNFFKTEITLANGEIRKRPLIETNGETGEIVWDKGRDFATVRKVLSMPQVNIVKKTEVQTGGFSKESILPKRNSDKLIARKKDWDPKKYGGFDSPTVAYSVLVVAKVEKGKSKKLKSVKELLGITIMERSSFEKNPIDFLEAKGYKEVKKDLIIKLPKYSLFELENGRKRMLASAGELQKGNELALPSKYVNFLYLASHYEKLKGSPEDNEQKQLFVEQHKHYLDEIIEQISEFSKRVILADANLDKVLSAYNKHRDKPIREQAENIIHLFTLTNLGAPAAFKYFDTTIDRKRYTSTKEVLDATLIHQSITGLYETRIDLSQLGGDGGAEAAAKEAAAKEAAAKEAAAKALEAEAAAKEAAAKEAAAKEAAAKAGGTLGIEDEYRLHETSTEPDVSLGSTWLSDFPQAWAETGGMGLAVRQAPLIIPLKATSTPVSIQQYPMSHEARLGIKPHIQRLLDQGILVPCQSPWNTPLLPVKKPGTNDYRPVQDLREVNKRVEDIHPTVPNPYNLLSGLPPSHQWYTVLDLKDAFFCLRLHPTSQPLFAFEWRDPGMGISGQLTWTRLPQGFKNSPTLFNEALHRDLADFRIQHPDLILLQYVDDILLAATSELDCQQGTRALLQTLGDLGYRASAKKAQICQKQVKYLGYLLREGQRWLTEARKETVMGQPVPKTPRQLREFLGTAGFCRLWIPGFAEMAAPLYPLTKPGTLFSWGPDQQKAYQEIKQALLTAPALGLPDLTKPFELFVDEKQGYAKGVLTQKLGPWRRPVAYLSKKLDPVAAGWPPCLRMVAAIAVLTKDAGKLTMGQPLVILAPHAVEALVKQPPDRWLSNARMTHYQAMLLDTDRVQFGPVVALNPATLLPLPEEGAPHDCLEILAETHGTRPDLTDQPIPDADHTWYTDGSSFLQEGQRKAGAAVTTETEVIWAGALPAGTSAQRAELIALTQALKMAEGKRLNVYTDSRYAFATAHIHGEIYRRRGWLTSEGREIKNKSEILALLKALFLPKRLSIIHCLGHQKGDSAEARGNRLADQAAREAAIKTPPDTSTLLAGKRTADGSEFEKRTADGSEFESPKKKAKVE

SEQ ID NO: 2195 - protein, 2096 aa, synthetic construct; identical to SEQ ID NO: 2076

SEQ ID NO: 2196 - protein, 2096 aa, synthetic construct
MPAAKRVKLDGGDKKYSIGLDIGTNSVGWAVITDEYKVPSKKFKVLGNTDRHSIKKNLIGALLFDSGETAEATRLKRTARRRYTRRKNRICYLQEIFSNEMAKVDDSFFHRLEESFLVEEDKKHERHPIFGNIVDEVAYHEKYPTIYHLRKKLVDSTDKADLRLIYLALAHMIKFRGHFLIEGDLNPDNSDVDKLFIQLVQTYNQLFEENPINASGVDAKAILSARLSKSRRLENLIAQLPGEKKNGLFGNLIALSLGLTPNFKSNFDLAEDAKLQLSKDTYDDDLDNLLAQIGDQYADLFLAAKNLSDAILLSDILRVNTEITKAPLSASMIKRYDEHHQDLTLLKALVRQQLPEKYKEIFFDQSKNGYAGYIDGGASQEEFYKFIKPILEKMDGTEELLVKLNREDLLRKQRTFDNGSIPHQIHLGELHAILRRQEDFYPFLKDNREKIEKILTFRIPYYVGPLARGNSRFAWMTRKSEETITPWNFEEVVDKGASAQSFIERMTNFDKNLPNEKVLPKHSLLYEYFTVYNELTKVKYVTEGMRKPAFLSGEQKKAIVDLLFKTNRKVTVKQLKEDYFKKIECFDSVEISGVEDRFNASLGTYHDLLKIIKDKDFLDNEENEDILEDIVLTLTLFEDREMIEERLKTYAHLFDDKVMKQLKRRRYTGWGRLSRKLINGIRDKQSGKTILDFLKSDGFANRNFMQLIHDDSLTFKEDIQKAQVSGQGDSLHEHIANLAGSPAIKKGILQTVKVVDELVKVMGRHKPENIVIEMARENQTTQKGQKNSRERMKRIEEGIKELGSQILKEHPVENTQLQNEKLYLYYLQNGRDMYVDQELDINRLSDYDVDHIVPQSFLKDDSIDNKVLTRSDKARGKSDNVPSEEVVKKMKNYWRQLLNAKLITQRKFDNLTKAERGGLSELDKAGFIKRQLVETRQITKHVAQILDSRMNTKYDENDKLIREVKVITLKSKLVSDFRKDFQFYKVREINNYHHAHDAYLNAVVGTALIKKYPKLESEFVYGDYKVYDVRKMIAKSEQEIGKATAKYFFYSNIMNFFKTEITLANGEIRKRPLIETNGETGEIVWDKGRDFATVRKVLSMPQVNIVKKTEVQTGGFSKESILPKRNSDKLIARKKDWDPKKYGGFDSPTVAYSVLVVAKVEKGKSKKLKSVKELLGITIMERSSFEKNPIDFLEAKGYKEVKKDLIIKLPKYSLFELENGRKRMLASAGELQKGNELALPSKYVNFLYLASHYEKLKGSPEDNEQKQLFVEQHKHYLDEIIEQISEFSKRVILADANLDKVLSAYNKHRDKPIREQAENIIHLFTLTNLGAPAAFKYFDTTIDRKRYTSTKEVLDATLIHQSITGLYETRIDLSQLGGDGGGGGGSSEAAAKGGTLGIEDEYRLHETSTEPDVSLGSTWLSDFPQAWAETGGMGLAVRQAPLIIPLKATSTPVSIQQYPMSHEARLGIKPHIQRLLDQGILVPCQSPWNTPLLPVKKPGTNDYRPVQDLREVNKRVEDIHPTVPNPYNLLSGLPPSHQWYTVLDLKDAFFCLRLHPTSQPLFAFEWRDPGMGISGQLTWTRLPQGFKNSPTLFNEALHRDLADFRIQHPDLILLQYVDDILLAATSELDCQQGTRALLQTLGDLGYRASAKKAQICQKQVKYLGYLLREGQRWLTEARKETVMGQPVPKTPRQLREFLGTAGFCRLWIPGFAEMAAPLYPLTKPGTLFSWGPDQQKAYQEIKQALLTAPALGLPDLTKPFELFVDEKQGYAKGVLTQKLGPWRRPVAYLSKKLDPVAAGWPPCLRMVAAIAVLTKDAGKLTMGQPLVILAPHAVEALVKQPPDRWLSNARMTHYQAMLLDTDRVQFGPVVALNPATLLPLPEEGAPHDCLEILAETHGTRPDLTDQPIPDADHTWYTDGSSFLQEGQRKAGAAVTTETEVIWAGALPAGTSAQRAELIALTQALKMAEGKRLNVYTDSRYAFATAHIHGEIYRRRGWLTSEGREIKNKSEILALLKALFLPKRLSIIHCLGHQKGDSAEARGNRLADQAAREAAIKTPPDTSTLLAGKRTADGSEFEKRTADGSEFESPKKKAKVE

SEQ ID NO: 2197 - protein, 2096 aa, synthetic construct
MPAAKRVKLDGGDKKYSIGLDIGTNSVGWAVITDEYKVPSKKFKVLGNTDRHSIKKNLIGALLFDSGETAEATRLKRTARRRYTRRKNRICYLQEIFSNEMAKVDDSFFHRLEESFLVEEDKKHERHPIFGNIVDEVAYHEKYPTIYHLRKKLVDSTDKADLRLIYLALAHMIKFRGHFLIEGDLNPDNSDVDKLFIQLVQTYNQLFEENPINASGVDAKAILSARLSKSRRLENLIAQLPGEKKNGLFGNLIALSLGLTPNFKSNFDLAEDAKLQLSKDTYDDDLDNLLAQIGDQYADLFLAAKNLSDAILLSDILRVNTEITKAPLSASMIKRYDEHHQDLTLLKALVRQQLPEKYKEIFFDQSKNGYAGYIDGGASQEEFYKFIKPILEKMDGTEELLVKLNREDLLRKQRTFDNGSIPHQIHLGELHAILRRQEDFYPFLKDNREKIEKILTFRIPYYVGPLARGNSRFAWMTRKSEETITPWNFEEVVDKGASAQSFIERMTNFDKNLPNEKVLPKHSLLYEYFTVYNELTKVKYVTEGMRKPAFLSGEQKKAIVDLLFKTNRKVTVKQLKEDYFKKIECFDSVEISGVEDRFNASLGTYHDLLKIIKDKDFLDNEENEDILEDIVLTLTLFEDREMIEERLKTYAHLFDDKVMKQLKRRRYTGWGRLSRKLINGIRDKQSGKTILDFLKSDGFANRNFMQLIHDDSLTFKEDIQKAQVSGQGDSLHEHIANLAGSPAIKKGILQTVKVVDELVKVMGRHKPENIVIEMARENQTTQKGQKNSRERMKRIEEGIKELGSQILKEHPVENTQLQNEKLYLYYLQNGRDMYVDQELDINRLSDYDVDHIVPQSFLKDDSIDNKVLTRSDKARGKSDNVPSEEVVKKMKNYWRQLLNAKLITQRKFDNLTKAERGGLSELDKAGFIKRQLVETRQITKHVAQILDSRMNTKYDENDKLIREVKVITLKSKLVSDFRKDFQFYKVREINNYHHAHDAYLNAVVGTALIKKYPKLESEFVYGDYKVYDVRKMIAKSEQEIGKATAKYFFYSNIMNFFKTEITLANGEIRKRPLIETNGETGEIVWDKGRDFATVRKVLSMPQVNIVKKTEVQTGGFSKESILPKRNSDKLIARKKDWDPKKYGGFDSPTVAYSVLVVAKVEKGKSKKLKSVKELLGITIMERSSFEKNPIDFLEAKGYKEVKKDLIIKLPKYSLFELENGRKRMLASAGELQKGNELALPSKYVNFLYLASHYEKLKGSPEDNEQKQLFVEQHKHYLDEIIEQISEFSKRVILADANLDKVLSAYNKHRDKPIREQAENIIHLFTLTNLGAPAAFKYFDTTIDRKRYTSTKEVLDATLIHQSITGLYETRIDLSQLGGDGGPAPEAAAKGGGGGTLGIEDEYRLHETSTEPDVSLGSTWLSDFPQAWAETGGMGLAVRQAPLIIPLKATSTPVSIQQYPMSHEARLGIKPHIQRLLDQGILVPCQSPWNTPLLPVKKPGTNDYRPVQDLREVNKRVEDIHPTVPNPYNLLSGLPPSHQWYTVLDLKDAFFCLRLHPTSQPLFAFEWRDPGMGISGQLTWTRLPQGFKNSPTLFNEALHRDLADFRIQHPDLILLQYVDDILLAATSELDCQQGTRALLQTLGDLGYRASAKKAQICQKQVKYLGYLLREGQRWLTEARKETVMGQPVPKTPRQLREFLGTAGFCRLWIPGFAEMAAPLYPLTKPGTLFSWGPDQQKAYQEIKQALLTAPALGLPDLTKPFELFVDEKQGYAKGVLTQKLGPWRRPVAYLSKKLDPVAAGWPPCLRMVAAIAVLTKDAGKLTMGQPLVILAPHAVEALVKQPPDRWLSNARMTHYQAMLLDTDRVQFGPVVALNPATLLPLPEEGAPHDCLEILAETHGTRPDLTDQPIPDADHTWYTDGSSFLQEGQRKAGAAVTTETEVIWAGALPAGTSAQRAELIALTQALKMAEGKRLNVYTDSRYAFATAHIHGEIYRRRGWLTSEGREIKNKSEILALLKALFLPKRLSIIHCLGHQKGDSAEARGNRLADQAAREAAIKTPPDTSTLLAGKRTADGSEFEKRTADGSEFESPKKKAKVE

SEQ ID NO: 2198 - protein, 2090 aa, synthetic construct
MPAAKRVKLDGGDKKYSIGLDIGTNSVGWAVITDEYKVPSKKFKVLGNTDRHSIKKNLIGALLFDSGETAEATRLKRTARRRYTRRKNRICYLQEIFSNEMAKVDDSFFHRLEESFLVEEDKKHERHPIFGNIVDEVAYHEKYPTIYHLRKKLVDSTDKADLRLIYLALAHMIKFRGHFLIEGDLNPDNSDVDKLFIQLVQTYNQLFEENPINASGVDAKAILSARLSKSRRLENLIAQLPGEKKNGLFGNLIALSLGLTPNFKSNFDLAEDAKLQLSKDTYDDDLDNLLAQIGDQYADLFLAAKNLSDAILLSDILRVNTEITKAPLSASMIKRYDEHHQDLTLLKALVRQQLPEKYKEIFFDQSKNGYAGYIDGGASQEEFYKFIKPILEKMDGTEELLVKLNREDLLRKQRTFDNGSIPHQIHLGELHAILRRQEDFYPFLKDNREKIEKILTFRIPYYVGPLARGNSRFAWMTRKSEETITPWNFEEVVDKGASAQSFIERMTNFDKNLPNEKVLPKHSLLYEYFTVYNELTKVKYVTEGMRKPAFLSGEQKKAIVDLLFKTNRKVTVKQLKEDYFKKIECFDSVEISGVEDRFNASLGTYHDLLKIIKDKDFLDNEENEDILEDIVLTLTLFEDREMIEERLKTYAHLFDDKVMKQLKRRRYTGWGRLSRKLINGIRDKQSGKTILDFLKSDGFANRNFMQLIHDDSLTFKEDIQKAQVSGQGDSLHEHIANLAGSPAIKKGILQTVKVVDELVKVMGRHKPENIVIEMARENQTTQKGQKNSRERMKRIEEGIKELGSQILKEHPVENTQLQNEKLYLYYLQNGRDMYVDQELDINRLSDYDVDHIVPQSFLKDDSIDNKVLTRSDKARGKSDNVPSEEVVKKMKNYWRQLLNAKLITQRKFDNLTKAERGGLSELDKAGFIKRQLVETRQITKHVAQILDSRMNTKYDENDKLIREVKVITLKSKLVSDFRKDFQFYKVREINNYHHAHDAYLNAVVGTALIKKYPKLESEFVYGDYKVYDVRKMIAKSEQEIGKATAKYFFYSNIMNFFKTEITLANGEIRKRPLIETNGETGEIVWDKGRDFATVRKVLSMPQVNIVKKTEVQTGGFSKESILPKRNSDKLIARKKDWDPKKYGGFDSPTVAYSVLVVAKVEKGKSKKLKSVKELLGITIMERSSFEKNPIDFLEAKGYKEVKKDLIIKLPKYSLFELENGRKRMLASAGELQKGNELALPSKYVNFLYLASHYEKLKGSPEDNEQKQLFVEQHKHYLDEIIEQISEFSKRVILADANLDKVLSAYNKHRDKPIREQAENIIHLFTLTNLGAPAAFKYFDTTIDRKRYTSTKEVLDATLIHQSITGLYETRIDLSQLGGDGGEAAAKGGTLGIEDEYRLHETSTEPDVSLGSTWLSDFPQAWAETGGMGLAVRQAPLIIPLKATSTPVSIQQYPMSHEARLGIKPHIQRLLDQGILVPCQSPWNTPLLPVKKPGTNDYRPVQDLREVNKRVEDIHPTVPNPYNLLSGLPPSHQWYTVLDLKDAFFCLRLHPTSQPLFAFEWRDPGMGISGQLTWTRLPQGFKNSPTLFNEALHRDLADFRIQHPDLILLQYVDDILLAATSELDCQQGTRALLQTLGDLGYRASAKKAQICQKQVKYLGYLLREGQRWLTEARKETVMGQPVPKTPRQLREFLGTAGFCRLWIPGFAEMAAPLYPLTKPGTLFSWGPDQQKAYQEIKQALLTAPALGLPDLTKPFELFVDEKQGYAKGVLTQKLGPWRRPVAYLSKKLDPVAAGWPPCLRMVAAIAVLTKDAGKLTMGQPLVILAPHAVEALVKQPPDRWLSNARMTHYQAMLLDTDRVQFGPVVALNPATLLPLPEEGAPHDCLEILAETHGTRPDLTDQPIPDADHTWYTDGSSFLQEGQRKAGAAVTTETEVIWAGALPAGTSAQRAELIALTQALKMAEGKRLNVYTDSRYAFATAHIHGEIYRRRGWLTSEGREIKNKSEILALLKALFLPKRLSIIHCLGHQKGDSAEARGNRLADQAAREAAIKTPPDTSTLLAGKRTADGSEFEKRTADGSEFESPKKKAKVE

SEQ ID NO: 2199 - protein, 2096 aa, synthetic construct
MPAAKRVKLDGGDKKYSIGLDIGTNSVGWAVITDEYKVPSKKFKVLGNTDRHSIKKNLIGALLFDSGETAEATRLKRTARRRYTRRKNRICYLQEIFSNEMAKVDDSFFHRLEESFLVEEDKKHERHPIFGNIVDEVAYHEKYPTIYHLRKKLVDSTDKADLRLIYLALAHMIKFRGHFLIEGDLNPDNSDVDKLFIQLVQTYNQLFEENPINASGVDAKAILSARLSKSRRLENLIAQLPGEKKNGLFGNLIALSLGLTPNFKSNFDLAEDAKLQLSKDTYDDDLDNLLAQIGDQYADLFLAAKNLSDAILLSDILRVNTEITKAPLSASMIKRYDEHHQDLTLLKALVRQQLPEKYKEIFFDQSKNGYAGYIDGGASQEEFYKFIKPILEKMDGTEELLVKLNREDLLRKQRTFDNGSIPHQIHLGELHAILRRQEDFYPFLKDNREKIEKILTFRIPYYVGPLARGNSRFAWMTRKSEETITPWNFEEVVDKGASAQSFIERMTNFDKNLPNEKVLPKHSLLYEYFTVYNELTKVKYVTEGMRKPAFLSGEQKKAIVDLLFKTNRKVTVKQLKEDYFKKIECFDSVEISGVEDRFNASLGTYHDLLKIIKDKDFLDNEENEDILEDIVLTLTLFEDREMIEERLKTYAHLFDDKVMKQLKRRRYTGWGRLSRKLINGIRDKQSGKTILDFLKSDGFANRNFMQLIHDDSLTFKEDIQKAQVSGQGDSLHEHIANLAGSPAIKKGILQTVKVVDELVKVMGRHKPENIVIEMARENQTTQKGQKNSRERMKRIEEGIKELGSQILKEHPVENTQLQNEKLYLYYLQNGRDMYVDQELDINRLSDYDVDHIVPQSFLKDDSIDNKVLTRSDKARGKSDNVPSEEVVKKMKNYWRQLLNAKLITQRKFDNLTKAERGGLSELDKAGFIKRQLVETRQITKHVAQILDSRMNTKYDENDKLIREVKVITLKSKLVSDFRKDFQFYKVREINNYHHAHDAYLNAVVGTALIKKYPKLESEFVYGDYKVYDVRKMIAKSEQEIGKATAKYFFYSNIMNFFKTEITLANGEIRKRPLIETNGETGEIVWDKGRDFATVRKVLSMPQVNIVKKTEVQTGGFSKESILPKRNSDKLIARKKDWDPKKYGGFDSPTVAYSVLVVAKVEKGKSKKLKSVKELLGITIMERSSFEKNPIDFLEAKGYKEVKKDLIIKLPKYSLFELENGRKRMLASAGELQKGNELALPSKYVNFLYLASHYEKLKGSPEDNEQKQLFVEQHKHYLDEIIEQISEFSKRVILADANLDKVLSAYNKHRDKPIREQAENIIHLFTLTNLGAPAAFKYFDTTIDRKRYTSTKEVLDATLIHQSITGLYETRIDLSQLGGDGGGGSEAAAKGSSGGTLGIEDEYRLHETSTEPDVSLGSTWLSDFPQAWAETGGMGLAVRQAPLIIPLKATSTPVSIQQYPMSHEARLGIKPHIQRLLDQGILVPCQSPWNTPLLPVKKPGTNDYRPVQDLREVNKRVEDIHPTVPNPYNLLSGLPPSHQWYTVLDLKDAFFCLRLHPTSQPLFAFEWRDPGMGISGQLTWTRLPQGFKNSPTLFNEALHRDLADFRIQHPDLILLQYVDDILLAATSELDCQQGTRALLQTLGDLGYRASAKKAQICQKQVKYLGYLLREGQRWLTEARKETVMGQPVPKTPRQLREFLGTAGFCRLWIPGFAEMAAPLYPLTKPGTLFSWGPDQQKAYQEIKQALLTAPALGLPDLTKPFELFVDEKQGYAKGVLTQKLGPWRRPVAYLSKKLDPVAAGWPPCLRMVAAIAVLTKDAGKLTMGQPLVILAPHAVEALVKQPPDRWLSNARMTHYQAMLLDTDRVQFGPVVALNPATLLPLPEEGAPHDCLEILAETHGTRPDLTDQPIPDADHTWYTDGSSFLQEGQRKAGAAVTTETEVIWAGALPAGTSAQRAELIALTQALKMAEGKRLNVYTDSRYAFATAHIHGEIYRRRGWLTSEGREIKNKSEILALLKALFLPKRLSIIHCLGHQKGDSAEARGNRLADQAAREAAIKTPPDTSTLLAGKRTADGSEFEKRTADGSEFESPKKKAKVE

SEQ ID NO: 2200 - protein, 2096 aa, synthetic construct
MPAAKRVKLDGGDKKYSIGLDIGTNSVGWAVITDEYKVPSKKFKVLGNTDRHSIKKNLIGALLFDSGETAEATRLKRTARRRYTRRKNRICYLQEIFSNEMAKVDDSFFHRLEESFLVEEDKKHERHPIFGNIVDEVAYHEKYPTIYHLRKKLVDSTDKADLRLIYLALAHMIKFRGHFLIEGDLNPDNSDVDKLFIQLVQTYNQLFEENPINASGVDAKAILSARLSKSRRLENLIAQLPGEKKNGLFGNLIALSLGLTPNFKSNFDLAEDAKLQLSKDTYDDDLDNLLAQIGDQYADLFLAAKNLSDAILLSDILRVNTEITKAPLSASMIKRYDEHHQDLTLLKALVRQQLPEKYKEIFFDQSKNGYAGYIDGGASQEEFYKFIKPILEKMDGTEELLVKLNREDLLRKQRTFDNGSIPHQIHLGELHAILRRQEDFYPFLKDNREKIEKILTFRIPYYVGPLARGNSRFAWMTRKSEETITPWNFEEVVDKGASAQSFIERMTNFDKNLPNEKVLPKHSLLYEYFTVYNELTKVKYVTEGMRKPAFLSGEQKKAIVDLLFKTNRKVTVKQLKEDYFKKIECFDSVEISGVEDRFNASLGTYHDLLKIIKDKDFLDNEENEDILEDIVLTLTLFEDREMIEERLKTYAHLFDDKVMKQLKRRRYTGWGRLSRKLINGIRDKQSGKTILDFLKSDGFANRNFMQLIHDDSLTFKEDIQKAQVSGQGDSLHEHIANLAGSPAIKKGILQTVKVVDELVKVMGRHKPENIVIEMARENQTTQKGQKNSRERMKRIEEGIKELGSQILKEHPVENTQLQNEKLYLYYLQNGRDMYVDQELDINRLSDYDVDHIVPQSFLKDDSIDNKVLTRSDKARGKSDNVPSEEVVKKMKNYWRQLLNAKLITQRKFDNLTKAERGGLSELDKAGFIKRQLVETRQITKHVAQILDSRMNTKYDENDKLIREVKVITLKSKLVSDFRKDFQFYKVREINNYHHAHDAYLNAVVGTALIKKYPKLESEFVYGDYKVYDVRKMIAKSEQEIGKATAKYFFYSNIMNFFKTEITLANGEIRKRPLIETNGETGEIVWDKGRDFATVRKVLSMPQVNIVKKTEVQTGGFSKESILPKRNSDKLIARKKDWDPKKYGGFDSPTVAYSVLVVAKVEKGKSKKLKSVKELLGITIMERSSFEKNPIDFLEAKGYKEVKKDLIIKLPKYSLFELENGRKRMLASAGELQKGNELALPSKYVNFLYLASHYEKLKGSPEDNEQKQLFVEQHKHYLDEIIEQISEFSKRVILADANLDKVLSAYNKHRDKPIREQAENIIHLFTLTNLGAPAAFKYFDTTIDRKRYTSTKEVLDATLIHQSITGLYETRIDLSQLGGDGGEAAAKGGSGSSGGTLGIEDEYRLHETSTEPDVSLGSTWLSDFPQAWAETGGMGLAVRQAPLIIPLKATSTPVSIQQYPMSHEARLGIKPHIQRLLDQGILVPCQSPWNTPLLPVKKPGTNDYRPVQDLREVNKRVEDIHPTVPNPYNLLSGLPPSHQWYTVLDLKDAFFCLRLHPTSQPLFAFEWRDPGMGISGQLTWTRLPQGFKNSPTLFNEALHRDLADFRIQHPDLILLQYVDDILLAATSELDCQQGTRALLQTLGDLGYRASAKKAQICQKQVKYLGYLLREGQRWLTEARKETVMGQPVPKTPRQLREFLGTAGFCRLWIPGFAEMAAPLYPLTKPGTLFSWGPDQQKAYQEIKQALLTAPALGLPDLTKPFELFVDEKQGYAKGVLTQKLGPWRRPVAYLSKKLDPVAAGWPPCLRMVAAIAVLTKDAGKLTMGQPLVILAPHAVEALVKQPPDRWLSNARMTHYQAMLLDTDRVQFGPVVALNPATLLPLPEEGAPHDCLEILAETHGTRPDLTDQPIPDADHTWYTDGSSFLQEGQRKAGAAVTTETEVIWAGALPAGTSAQRAELIALTQALKMAEGKRLNVYTDSRYAFATAHIHGEIYRRRGWLTSEGREIKNKSEILALLKALFLPKRLSIIHCLGHQKGDSAEARGNRLADQAAREAAIKTPPDTSTLLAGKRTADGSEFEKRTADGSEFESPKKKAKVE

SEQ ID NO: 2201 - protein, 2096 aa, synthetic construct; identical to SEQ ID NO: 2071

SEQ ID NO: 2202 - protein, 2096 aa, synthetic construct; identical to SEQ ID NO: 2075

SEQ ID NO: 2203 - protein, 2091 aa, synthetic construct
MPAAKRVKLDGGDKKYSIGLDIGTNSVGWAVITDEYKVPSKKFKVLGNTDRHSIKKNLIGALLFDSGETAEATRLKRTARRRYTRRKNRICYLQEIFSNEMAKVDDSFFHRLEESFLVEEDKKHERHPIFGNIVDEVAYHEKYPTIYHLRKKLVDSTDKADLRLIYLALAHMIKFRGHFLIEGDLNPDNSDVDKLFIQLVQTYNQLFEENPINASGVDAKAILSARLSKSRRLENLIAQLPGEKKNGLFGNLIALSLGLTPNFKSNFDLAEDAKLQLSKDTYDDDLDNLLAQIGDQYADLFLAAKNLSDAILLSDILRVNTEITKAPLSASMIKRYDEHHQDLTLLKALVRQQLPEKYKEIFFDQSKNGYAGYIDGGASQEEFYKFIKPILEKMDGTEELLVKLNREDLLRKQRTFDNGSIPHQIHLGELHAILRRQEDFYPFLKDNREKIEKILTFRIPYYVGPLARGNSRFAWMTRKSEETITPWNFEEVVDKGASAQSFIERMTNFDKNLPNEKVLPKHSLLYEYFTVYNELTKVKYVTEGMRKPAFLSGEQKKAIVDLLFKTNRKVTVKQLKEDYFKKIECFDSVEISGVEDRFNASLGTYHDLLKIIKDKDFLDNEENEDILEDIVLTLTLFEDREMIEERLKTYAHLFDDKVMKQLKRRRYTGWGRLSRKLINGIRDKQSGKTILDFLKSDGFANRNFMQLIHDDSLTFKEDIQKAQVSGQGDSLHEHIANLAGSPAIKKGILQTVKVVDELVKVMGRHKPENIVIEMARENQTTQKGQKNSRERMKRIEEGIKELGSQILKEHPVENTQLQNEKLYLYYLQNGRDMYVDQELDINRLSDYDVDHIVPQSFLKDDSIDNKVLTRSDKARGKSDNVPSEEVVKKMKNYWRQLLNAKLITQRKFDNLTKAERGGLSELDKAGFIKRQLVETRQITKHVAQILDSRMNTKYDENDKLIREVKVITLKSKLVSDFRKDFQFYKVREINNYHHAHDAYLNAVVGTALIKKYPKLESEFVYGDYKVYDVRKMIAKSEQEIGKATAKYFFYSNIMNFFKTEITLANGEIRKRPLIETNGETGEIVWDKGRDFATVRKVLSMPQVNIVKKTEVQTGGFSKESILPKRNSDKLIARKKDWDPKKYGGFDSPTVAYSVLVVAKVEKGKSKKLKSVKELLGITIMERSSFEKNPIDFLEAKGYKEVKKDLIIKLPKYSLFELENGRKRMLASAGELQKGNELALPSKYVNFLYLASHYEKLKGSPEDNEQKQLFVEQHKHYLDEIIEQISEFSKRVILADANLDKVLSAYNKHRDKPIREQAENIIHLFTLTNLGAPAAFKYFDTTIDRKRYTSTKEVLDATLIHQSITGLYETRIDLSQLGGDGGGSSGGGGGTLGIEDEYRLHETSTEPDVSLGSTWLSDFPQAWAETGGMGLAVRQAPLIIPLKATSTPVSIQQYPMSHEARLGIKPHIQRLLDQGILVPCQSPWNTPLLPVKKPGTNDYRPVQDLREVNKRVEDIHPTVPNPYNLLSGLPPSHQWYTVLDLKDAFFCLRLHPTSQPLFAFEWRDPGMGISGQLTWTRLPQGFKNSPTLFNEALHRDLADFRIQHPDLILLQYVDDILLAATSELDCQQGTRALLQTLGDLGYRASAKKAQICQKQVKYLGYLLREGQRWLTEARKETVMGQPVPKTPRQLREFLGTAGFCRLWIPGFAEMAAPLYPLTKPGTLFSWGPDQQKAYQEIKQALLTAPALGLPDLTKPFELFVDEKQGYAKGVLTQKLGPWRRPVAYLSKKLDPVAAGWPPCLRMVAAIAVLTKDAGKLTMGQPLVILAPHAVEALVKQPPDRWLSNARMTHYQAMLLDTDRVQFGPVVALNPATLLPLPEEGAPHDCLEILAETHGTRPDLTDQPIPDADHTWYTDGSSFLQEGQRKAGAAVTTETEVIWAGALPAGTSAQRAELIALTQALKMAEGKRLNVYTDSRYAFATAHIHGEIYRRRGWLTSEGREIKNKSEILALLKALFLPKRLSIIHCLGHQKGDSAEARGNRLADQAAREAAIKTPPDTSTLLAGKRTADGSEFEKRTADGSEFESPKKKAKVE

SEQ ID NO: 2204 - protein, 2098 aa, synthetic construct
MPAAKRVKLDGGDKKYSIGLDIGTNSVGWAVITDEYKVPSKKFKVLGNTDRHSIKKNLIGALLFDSGETAEATRLKRTARRRYTRRKNRICYLQEIFSNEMAKVDDSFFHRLEESFLVEEDKKHERHPIFGNIVDEVAYHEKYPTIYHLRKKLVDSTDKADLRLIYLALAHMIKFRGHFLIEGDLNPDNSDVDKLFIQLVQTYNQLFEENPINASGVDAKAILSARLSKSRRLENLIAQLPGEKKNGLFGNLIALSLGLTPNFKSNFDLAEDAKLQLSKDTYDDDLDNLLAQIGDQYADLFLAAKNLSDAILLSDILRVNTEITKAPLSASMIKRYDEHHQDLTLLKALVRQQLPEKYKEIFFDQSKNGYAGYIDGGASQEEFYKFIKPILEKMDGTEELLVKLNREDLLRKQRTFDNGSIPHQIHLGELHAILRRQEDFYPFLKDNREKIEKILTFRIPYYVGPLARGNSRFAWMTRKSEETITPWNFEEVVDKGASAQSFIERMTNFDKNLPNEKVLPKHSLLYEYFTVYNELTKVKYVTEGMRKPAFLSGEQKKAIVDLLFKTNRKVTVKQLKEDYFKKIECFDSVEISGVEDRFNASLGTYHDLLKIIKDKDFLDNEENEDILEDIVLTLTLFEDREMIEERLKTYAHLFDDKVMKQLKRRRYTGWGRLSRKLINGIRDKQSGKTILDFLKSDGFANRNFMQLIHDDSLTFKEDIQKAQVSGQGDSLHEHIANLAGSPAIKKGILQTVKVVDELVKVMGRHKPENIVIEMARENQTTQKGQKNSRERMKRIEEGIKELGSQILKEHPVENTQLQNEKLYLYYLQNGRDMYVDQELDINRLSDYDVDHIVPQSFLKDDSIDNKVLTRSDKARGKSDNVPSEEVVKKMKNYWRQLLNAKLITQRKFDNLTKAERGGLSELDKAGFIKRQLVETRQITKHVAQILDSRMNTKYDENDKLIREVKVITLKSKLVSDFRKDFQFYKVREINNYHHAHDAYLNAVVGTALIKKYPKLESEFVYGDYKVYDVRKMIAKSEQEIGKATAKYFFYSNIMNFFKTEITLANGEIRKRPLIETNGETGEIVWDKGRDFATVRKVLSMPQVNIVKKTEVQTGGFSKESILPKRNSDKLIARKKDWDPKKYGGFDSPTVAYSVLVVAKVEKGKSKKLKSVKELLGITIMERSSFEKNPIDFLEAKGYKEVKKDLIIKLPKYSLFELENGRKRMLASAGELQKGNELALPSKYVNFLYLASHYEKLKGSPEDNEQKQLFVEQHKHYLDEIIEQISEFSKRVILADANLDKVLSAYNKHRDKPIREQAENIIHLFTLTNLGAPAAFKYFDTTIDRKRYTSTKEVLDATLIHQSITGLYETRIDLSQLGGDGGPAPAPAPAPAPAPGGTLGIEDEYRLHETSTEPDVSLGSTWLSDFPQAWAETGGMGLAVRQAPLIIPLKATSTPVSIQQYPMSHEARLGIKPHIQRLLDQGILVPCQSPWNTPLLPVKKPGTNDYRPVQDLREVNKRVEDIHPTVPNPYNLLSGLPPSHQWYTVLDLKDAFFCLRLHPTSQPLFAFEWRDPGMGISGQLTWTRLPQGFKNSPTLFNEALHRDLADFRIQHPDLILLQYVDDILLAATSELDCQQGTRALLQTLGDLGYRASAKKAQICQKQVKYLGYLLREGQRWLTEARKETVMGQPVPKTPRQLREFLGTAGFCRLWIPGFAEMAAPLYPLTKPGTLFSWGPDQQKAYQEIKQALLTAPALGLPDLTKPFELFVDEKQGYAKGVLTQKLGPWRRPVAYLSKKLDPVAAGWPPCLRMVAAIAVLTKDAGKLTMGQPLVILAPHAVEALVKQPPDRWLSNARMTHYQAMLLDTDRVQFGPVVALNPATLLPLPEEGAPHDCLEILAETHGTRPDLTDQPIPDADHTWYTDGSSFLQEGQRKAGAAVTTETEVIWAGALPAGTSAQRAELIALTQALKMAEGKRLNVYTDSRYAFATAHIHGEIYRRRGWLTSEGREIKNKSEILALLKALFLPKRLSIIHCLGHQKGDSAEARGNRLADQAAREAAIKTPPDTSTLLAGKRTADGSEFEKRTADGSEFESPKKKAKVE

SEQ ID NO: 2205 - protein, 2094 aa, synthetic construct
MPAAKRVKLDGGDKKYSIGLDIGTNSVGWAVITDEYKVPSKKFKVLGNTDRHSIKKNLIGALLFDSGETAEATRLKRTARRRYTRRKNRICYLQEIFSNEMAKVDDSFFHRLEESFLVEEDKKHERHPIFGNIVDEVAYHEKYPTIYHLRKKLVDSTDKADLRLIYLALAHMIKFRGHFLIEGDLNPDNSDVDKLFIQLVQTYNQLFEENPINASGVDAKAILSARLSKSRRLENLIAQLPGEKKNGLFGNLIALSLGLTPNFKSNFDLAEDAKLQLSKDTYDDDLDNLLAQIGDQYADLFLAAKNLSDAILLSDILRVNTEITKAPLSASMIKRYDEHHQDLTLLKALVRQQLPEKYKEIFFDQSKNGYAGYIDGGASQEEFYKFIKPILEKMDGTEELLVKLNREDLLRKQRTFDNGSIPHQIHLGELHAILRRQEDFYPFLKDNREKIEKILTFRIPYYVGPLARGNSRFAWMTRKSEETITPWNFEEVVDKGASAQSFIERMTNFDKNLPNEKVLPKHSLLYEYFTVYNELTKVKYVTEGMRKPAFLSGEQKKAIVDLLFKTNRKVTVKQLKEDYFKKIECFDSVEISGVEDRFNASLGTYHDLLKIIKDKDFLDNEENEDILEDIVLTLTLFEDREMIEERLKTYAHLFDDKVMKQLKRRRYTGWGRLSRKLINGIRDKQSGKTILDFLKSDGFANRNFMQLIHDDSLTFKEDIQKAQVSGQGDSLHEHIANLAGSPAIKKGILQTVKVVDELVKVMGRHKPENIVIEMARENQTTQKGQKNSRERMKRIEEGIKELGSQILKEHPVENTQLQNEKLYLYYLQNGRDMYVDQELDINRLSDYDVDHIVPQSFLKDDSIDNKVLTRSDKARGKSDNVPSEEVVKKMKNYWRQLLNAKLITQRKFDNLTKAERGGLSELDKAGFIKRQLVETRQITKHVAQILDSRMNTKYDENDKLIREVKVITLKSKLVSDFRKDFQFYKVREINNYHHAHDAYLNAVVGTALIKKYPKLESEFVYGDYKVYDVRKMIAKSEQEIGKATAKYFFYSNIMNFFKTEITLANGEIRKRPLIETNGETGEIVWDKGRDFATVRKVLSMPQVNIVKKTEVQTGGFSKESILPKRNSDKLIARKKDWDPKKYGGFDSPTVAYSVLVVAKVEKGKSKKLKSVKELLGITIMERSSFEKNPIDFLEAKGYKEVKKDLIIKLPKYSLFELENGRKRMLASAGELQKGNELALPSKYVNFLYLASHYEKLKGSPEDNEQKQLFVEQHKHYLDEIIEQISEFSKRVILADANLDKVLSAYNKHRDKPIREQAENIIHLFTLTNLGAPAAFKYFDTTIDRKRYTSTKEVLDATLIHQSITGLYETRIDLSQLGGDGGGGSGSSGGGGGTLGIEDEYRLHETSTEPDVSLGSTWLSDFPQAWAETGGMGLAVRQAPLIIPLKATSTPVSIQQYPMSHEARLGIKPHIQRLLDQGILVPCQSPWNTPLLPVKKPGTNDYRPVQDLREVNKRVEDIHPTVPNPYNLLSGLPPSHQWYTVLDLKDAFFCLRLHPTSQPLFAFEWRDPGMGISGQLTWTRLPQGFKNSPTLFNEALHRDLADFRIQHPDLILLQYVDDILLAATSELDCQQGTRALLQTLGDLGYRASAKKAQICQKQVKYLGYLLREGQRWLTEARKETVMGQPVPKTPRQLREFLGTAGFCRLWIPGFAEMAAPLYPLTKPGTLFSWGPDQQKAYQEIKQALLTAPALGLPDLTKPFELFVDEKQGYAKGVLTQKLGPWRRPVAYLSKKLDPVAAGWPPCLRMVAAIAVLTKDAGKLTMGQPLVILAPHAVEALVKQPPDRWLSNARMTHYQAMLLDTDRVQFGPVVALNPATLLPLPEEGAPHDCLEILAETHGTRPDLTDQPIPDADHTWYTDGSSFLQEGQRKAGAAVTTETEVIWAGALPAGTSAQRAELIALTQALKMAEGKRLNVYTDSRYAFATAHIHGEIYRRRGWLTSEGREIKNKSEILALLKALFLPKRLSIIHCLGHQKGDSAEARGNRLADQAAREAAIKTPPDTSTLLAGKRTADGSEFEKRTADGSEFESPKKKAKVE

SEQ ID NO: 2206 - protein, 2093 aa, synthetic construct
MPAAKRVKLDGGDKKYSIGLDIGTNSVGWAVITDEYKVPSKKFKVLGNTDRHSIKKNLIGALLFDSGETAEATRLKRTARRRYTRRKNRICYLQEIFSNEMAKVDDSFFHRLEESFLVEEDKKHERHPIFGNIVDEVAYHEKYPTIYHLRKKLVDSTDKADLRLIYLALAHMIKFRGHFLIEGDLNPDNSDVDKLFIQLVQTYNQLFEENPINASGVDAKAILSARLSKSRRLENLIAQLPGEKKNGLFGNLIALSLGLTPNFKSNFDLAEDAKLQLSKDTYDDDLDNLLAQIGDQYADLFLAAKNLSDAILLSDILRVNTEITKAPLSASMIKRYDEHHQDLTLLKALVRQQLPEKYKEIFFDQSKNGYAGYIDGGASQEEFYKFIKPILEKMDGTEELLVKLNREDLLRKQRTFDNGSIPHQIHLGELHAILRRQEDFYPFLKDNREKIEKILTFRIPYYVGPLARGNSRFAWMTRKSEETITPWNFEEVVDKGASAQSFIERMTNFDKNLPNEKVLPKHSLLYEYFTVYNELTKVKYVTEGMRKPAFLSGEQKKAIVDLLFKTNRKVTVKQLKEDYFKKIECFDSVEISGVEDRFNASLGTYHDLLKIIKDKDFLDNEENEDILEDIVLTLTLFEDREMIEERLKTYAHLFDDKVMKQLKRRRYTGWGRLSRKLINGIRDKQSGKTILDFLKSDGFANRNFMQLIHDDSLTFKEDIQKAQVSGQGDSLHEHIANLAGSPAIKKGILQTVKVVDELVKVMGRHKPENIVIEMARENQTTQKGQKNSRERMKRIEEGIKELGSQILKEHPVENTQLQNEKLYLYYLQNGRDMYVDQELDINRLSDYDVDHIVPQSFLKDDSIDNKVLTRSDKARGKSDNVPSEEVVKKMKNYWRQLLNAKLITQRKFDNLTKAERGGLSELDKAGFIKRQLVETRQITKHVAQILDSRMNTKYDENDKLIREVKVITLKSKLVSDFRKDFQFYKVREINNYHHAHDAYLNAVVGTALIKKYPKLESEFVYGDYKVYDVRKMIAKSEQEIGKATAKYFFYSNIMNFFKTEITLANGEIRKRPLIETNGETGEIVWDKGRDFATVRKVLSMPQVNIVKKTEVQTGGFSKESILPKRNSDKLIARKKDWDPKKYGGFDSPTVAYSVLVVAKVEKGKSKKLKSVKELLGITIMERSSFEKNPIDFLEAKGYKEVKKDLIIKLPKYSLFELENGRKRMLASAGELQKGNELALPSKYVNFLYLASHYEKLKGSPEDNEQKQLFVEQHKHYLDEIIEQISEFSKRVILADANLDKVLSAYNKHRDKPIREQAENIIHLFTLTNLGAPAAFKYFDTTIDRKRYTSTKEVLDATLIHQSITGLYETRIDLSQLGGDGGPAPEAAAKGGTLGIEDEYRLHETSTEPDVSLGSTWLSDFPQAWAETGGMGLAVRQAPLIIPLKATSTPVSIQQYPMSHEARLGIKPHIQRLLDQGILVPCQSPWNTPLLPVKKPGTNDYRPVQDLREVNKRVEDIHPTVPNPYNLLSGLPPSHQWYTVLDLKDAFFCLRLHPTSQPLFAFEWRDPGMGISGQLTWTRLPQGFKNSPTLFNEALHRDLADFRIQHPDLILLQYVDDILLAATSELDCQQGTRALLQTLGDLGYRASAKKAQICQKQVKYLGYLLREGQRWLTEARKETVMGQPVPKTPRQLREFLGTAGFCRLWIPGFAEMAAPLYPLTKPGTLFSWGPDQQKAYQEIKQALLTAPALGLPDLTKPFELFVDEKQGYAKGVLTQKLGPWRRPVAYLSKKLDPVAAGWPPCLRMVAAIAVLTKDAGKLTMGQPLVILAPHAVEALVKQPPDRWLSNARMTHYQAMLLDTDRVQFGPVVALNPATLLPLPEEGAPHDCLEILAETHGTRPDLTDQPIPDADHTWYTDGSSFLQEGQRKAGAAVTTETEVIWAGALPAGTSAQRAELIALTQALKMAEGKRLNVYTDSRYAFATAHIHGEIYRRRGWLTSEGREIKNKSEILALLKALFLPKRLSIIHCLGHQKGDSAEARGNRLADQAAREAAIKTPPDTSTLLAGKRTADGSEFEKRTADGSEFESPKKKAKVE

SEQ ID NO: 2207 - protein, 2096 aa, synthetic construct; identical to SEQ ID NO: 2074

SEQ ID NO: 2208 - protein, 2093 aa, synthetic construct
MPAAKRVKLDGGDKKYSIGLDIGTNSVGWAVITDEYKVPSKKFKVLGNTDRHSIKKNLIGALLFDSGETAEATRLKRTARRRYTRRKNRICYLQEIFSNEMAKVDDSFFHRLEESFLVEEDKKHERHPIFGNIVDEVAYHEKYPTIYHLRKKLVDSTDKADLRLIYLALAHMIKFRGHFLIEGDLNPDNSDVDKLFIQLVQTYNQLFEENPINASGVDAKAILSARLSKSRRLENLIAQLPGEKKNGLFGNLIALSLGLTPNFKSNFDLAEDAKLQLSKDTYDDDLDNLLAQIGDQYADLFLAAKNLSDAILLSDILRVNTEITKAPLSASMIKRYDEHHQDLTLLKALVRQQLPEKYKEIFFDQSKNGYAGYIDGGASQEEFYKFIKPILEKMDGTEELLVKLNREDLLRKQRTFDNGSIPHQIHLGELHAILRRQEDFYPFLKDNREKIEKILTFRIPYYVGPLARGNSRFAWMTRKSEETITPWNFEEVVDKGASAQSFIERMTNFDKNLPNEKVLPKHSLLYEYFTVYNELTKVKYVTEGMRKPAFLSGEQKKAIVDLLFKTNRKVTVKQLKEDYFKKIECFDSVEISGVEDRFNASLGTYHDLLKIIKDKDFLDNEENEDILEDIVLTLTLFEDREMIEERLKTYAHLFDDKVMKQLKRRRYTGWGRLSRKLINGIRDKQSGKTILDFLKSDGFANRNFMQLIHDDSLTFKEDIQKAQVSGQGDSLHEHIANLAGSPAIKKGILQTVKVVDELVKVMGRHKPENIVIEMARENQTTQKGQKNSRERMKRIEEGIKELGSQILKEHPVENTQLQNEKLYLYYLQNGRDMYVDQELDINRLSDYDVDHIVPQSFLKDDSIDNKVLTRSDKARGKSDNVPSEEVVKKMKNYWRQLLNAKLITQRKFDNLTKAERGGLSELDKAGFIKRQLVETRQITKHVAQILDSRMNTKYDENDKLIREVKVITLKSKLVSDFRKDFQFYKVREINNYHHAHDAYLNAVVGTALIKKYPKLESEFVYGDYKVYDVRKMIAKSEQEIGKATAKYFFYSNIMNFFKTEITLANGEIRKRPLIETNGETGEIVWDKGRDFATVRKVLSMPQVNIVKKTEVQTGGFSKESILPKRNSDKLIARKKDWDPKKYGGFDSPTVAYSVLVVAKVEKGKSKKLKSVKELLGITIMERSSFEKNPIDFLEAKGYKEVKKDLIIKLPKYSLFELENGRKRMLASAGELQKGNELALPSKYVNFLYLASHYEKLKGSPEDNEQKQLFVEQHKHYLDEIIEQISEFSKRVILADANLDKVLSAYNKHRDKPIREQAENIIHLFTLTNLGAPAAFKYFDTTIDRKRYTSTKEVLDATLIHQSITGLYETRIDLSQLGGDGGGGGEAAAKGGTLGIEDEYRLHETSTEPDVSLGSTWLSDFPQAWAETGGMGLAVRQAPLIIPLKATSTPVSIQQYPMSHEARLGIKPHIQRLLDQGILVPCQSPWNTPLLPVKKPGTNDYRPVQDLREVNKRVEDIHPTVPNPYNLLSGLPPSHQWYTVLDLKDAFFCLRLHPTSQPLFAFEWRDPGMGISGQLTWTRLPQGFKNSPTLFNEALHRDLADFRIQHPDLILLQYVDDILLAATSELDCQQGTRALLQTLGDLGYRASAKKAQICQKQVKYLGYLLREGQRWLTEARKETVMGQPVPKTPRQLREFLGTAGFCRLWIPGFAEMAAPLYPLTKPGTLFSWGPDQQKAYQEIKQALLTAPALGLPDLTKPFELFVDEKQGYAKGVLTQKLGPWRRPVAYLSKKLDPVAAGWPPCLRMVAAIAVLTKDAGKLTMGQPLVILAPHAVEALVKQPPDRWLSNARMTHYQAMLLDTDRVQFGPVVALNPATLLPLPEEGAPHDCLEILAETHGTRPDLTDQPIPDADHTWYTDGSSFLQEGQRKAGAAVTTETEVIWAGALPAGTSAQRAELIALTQALKMAEGKRLNVYTDSRYAFATAHIHGEIYRRRGWLTSEGREIKNKSEILALLKALFLPKRLSIIHCLGHQKGDSAEARGNRLADQAAREAAIKTPPDTSTLLAGKRTADGSEFEKRTADGSEFESPKKKAKVE

SEQ ID NO: 2209 - protein, 2096 aa, synthetic construct
MPAAKRVKLDGGDKKYSIGLDIGTNSVGWAVITDEYKVPSKKFKVLGNTDRHSIKKNLIGALLFDSGETAEATRLKRTARRRYTRRKNRICYLQEIFSNEMAKVDDSFFHRLEESFLVEEDKKHERHPIFGNIVDEVAYHEKYPTIYHLRKKLVDSTDKADLRLIYLALAHMIKFRGHFLIEGDLNPDNSDVDKLFIQLVQTYNQLFEENPINASGVDAKAILSARLSKSRRLENLIAQLPGEKKNGLFGNLIALSLGLTPNFKSNFDLAEDAKLQLSKDTYDDDLDNLLAQIGDQYADLFLAAKNLSDAILLSDILRVNTEITKAPLSASMIKRYDEHHQDLTLLKALVRQQLPEKYKEIFFDQSKNGYAGYIDGGASQEEFYKFIKPILEKMDGTEELLVKLNREDLLRKQRTFDNGSIPHQIHLGELHAILRRQEDFYPFLKDNREKIEKILTFRIPYYVGPLARGNSRFAWMTRKSEETITPWNFEEVVDKGASAQSFIERMTNFDKNLPNEKVLPKHSLLYEYFTVYNELTKVKYVTEGMRKPAFLSGEQKKAIVDLLFKTNRKVTVKQLKEDYFKKIECFDSVEISGVEDRFNASLGTYHDLLKIIKDKDFLDNEENEDILEDIVLTLTLFEDREMIEERLKTYAHLFDDKVMKQLKRRRYTGWGRLSRKLINGIRDKQSGKTILDFLKSDGFANRNFMQLIHDDSLTFKEDIQKAQVSGQGDSLHEHIANLAGSPAIKKGILQTVKVVDELVKVMGRHKPENIVIEMARENQTTQKGQKNSRERMKRIEEGIKELGSQILKEHPVENTQLQNEKLYLYYLQNGRDMYVDQELDINRLSDYDVDHIVPQSFLKDDSIDNKVLTRSDKARGKSDNVPSEEVVKKMKNYWRQLLNAKLITQRKFDNLTKAERGGLSELDKAGFIKRQLVETRQITKHVAQILDSRMNTKYDENDKLIREVKVITLKSKLVSDFRKDFQFYKVREINNYHHAHDAYLNAVVGTALIKKYPKLESEFVYGDYKVYDVRKMIAKSEQEIGKATAKYFFYSNIMNFFKTEITLANGEIRKRPLIETNGETGEIVWDKGRDFATVRKVLSMPQVNIVKKTEVQTGGFSKESILPKRNSDKLIARKKDWDPKKYGGFDSPTVAYSVLVVAKVEKGKSKKLKSVKELLGITIMERSSFEKNPIDFLEAKGYKEVKKDLIIKLPKYSLFELENGRKRMLASAGELQKGNELALPSKYVNFLYLASHYEKLKGSPEDNEQKQLFVEQHKHYLDEIIEQISEFSKRVILADANLDKVLSAYNKHRDKPIREQAENIIHLFTLTNLGAPAAFKYFDTTIDRKRYTSTKEVLDATLIHQSITGLYETRIDLSQLGGDGGEAAAKGGGGGSGGTLGIEDEYRLHETSTEPDVSLGSTWLSDFPQAWAETGGMGLAVRQAPLIIPLKATSTPVSIQQYPMSHEARLGIKPHIQRLLDQGILVPCQSPWNTPLLPVKKPGTNDYRPVQDLREVNKRVEDIHPTVPNPYNLLSGLPPSHQWYTVLDLKDAFFCLRLHPTSQPLFAFEWRDPGMGISGQLTWTRLPQGFKNSPTLFNEALHRDLADFRIQHPDLILLQYVDDILLAATSELDCQQGTRALLQTLGDLGYRASAKKAQICQKQVKYLGYLLREGQRWLTEARKETVMGQPVPKTPRQLREFLGTAGFCRLWIPGFAEMAAPLYPLTKPGTLFSWGPDQQKAYQEIKQALLTAPALGLPDLTKPFELFVDEKQGYAKGVLTQKLGPWRRPVAYLSKKLDPVAAGWPPCLRMVAAIAVLTKDAGKLTMGQPLVILAPHAVEALVKQPPDRWLSNARMTHYQAMLLDTDRVQFGPVVALNPATLLPLPEEGAPHDCLEILAETHGTRPDLTDQPIPDADHTWYTDGSSFLQEGQRKAGAAVTTETEVIWAGALPAGTSAQRAELIALTQALKMAEGKRLNVYTDSRYAFATAHIHGEIYRRRGWLTSEGREIKNKSEILALLKALFLPKRLSIIHCLGHQKGDSAEARGNRLADQAAREAAIKTPPDTSTLLAGKRTADGSEFEKRTADGSEFESPKKKAKVE

SEQ ID NO: 2210 - protein, 2110 aa, synthetic construct
MPAAKRVKLDGGDKKYSIGLDIGTNSVGWAVITDEYKVPSKKFKVLGNTDRHSIKKNLIGALLFDSGETAEATRLKRTARRRYTRRKNRICYLQEIFSNEMAKVDDSFFHRLEESFLVEEDKKHERHPIFGNIVDEVAYHEKYPTIYHLRKKLVDSTDKADLRLIYLALAHMIKFRGHFLIEGDLNPDNSDVDKLFIQLVQTYNQLFEENPINASGVDAKAILSARLSKSRRLENLIAQLPGEKKNGLFGNLIALSLGLTPNFKSNFDLAEDAKLQLSKDTYDDDLDNLLAQIGDQYADLFLAAKNLSDAILLSDILRVNTEITKAPLSASMIKRYDEHHQDLTLLKALVRQQLPEKYKEIFFDQSKNGYAGYIDGGASQEEFYKFIKPILEKMDGTEELLVKLNREDLLRKQRTFDNGSIPHQIHLGELHAILRRQEDFYPFLKDNREKIEKILTFRIPYYVGPLARGNSRFAWMTRKSEETITPWNFEEVVDKGASAQSFIERMTNFDKNLPNEKVLPKHSLLYEYFTVYNELTKVKYVTEGMRKPAFLSGEQKKAIVDLLFKTNRKVTVKQLKEDYFKKIECFDSVEISGVEDRFNASLGTYHDLLKIIKDKDFLDNEENEDILEDIVLTLTLFEDREMIEERLKTYAHLFDDKVMKQLKRRRYTGWGRLSRKLINGIRDKQSGKTILDFLKSDGFANRNFMQLIHDDSLTFKEDIQKAQVSGQGDSLHEHIANLAGSPAIKKGILQTVKVVDELVKVMGRHKPENIVIEMARENQTTQKGQKNSRERMKRIEEGIKELGSQILKEHPVENTQLQNEKLYLYYLQNGRDMYVDQELDINRLSDYDVDHIVPQSFLKDDSIDNKVLTRSDKARGKSDNVPSEEVVKKMKNYWRQLLNAKLITQRKFDNLTKAERGGLSELDKAGFIKRQLVETRQITKHVAQILDSRMNTKYDENDKLIREVKVITLKSKLVSDFRKDFQFYKVREINNYHHAHDAYLNAVVGTALIKKYPKLESEFVYGDYKVYDVRKMIAKSEQEIGKATAKYFFYSNIMNFFKTEITLANGEIRKRPLIETNGETGEIVWDKGRDFATVRKVLSMPQVNIVKKTEVQTGGFSKESILPKRNSDKLIARKKDWDPKKYGGFDSPTVAYSVLVVAKVEKGKSKKLKSVKELLGITIMERSSFEKNPIDFLEAKGYKEVKKDLIIKLPKYSLFELENGRKRMLASAGELQKGNELALPSKYVNFLYLASHYEKLKGSPEDNEQKQLFVEQHKHYLDEIIEQISEFSKRVILADANLDKVLSAYNKHRDKPIREQAENIIHLFTLTNLGAPAAFKYFDTTIDRKRYTSTKEVLDATLIHQSITGLYETRIDLSQLGGDGGGGGGSGGGGSGGGGSGGGGSGGGGSGGTLGIEDEYRLHETSTEPDVSLGSTWLSDFPQAWAETGGMGLAVRQAPLIIPLKATSTPVSIQQYPMSHEARLGIKPHIQRLLDQGILVPCQSPWNTPLLPVKKPGTNDYRPVQDLREVNKRVEDIHPTVPNPYNLLSGLPPSHQWYTVLDLKDAFFCLRLHPTSQPLFAFEWRDPGMGISGQLTWTRLPQGFKNSPTLFNEALHRDLADFRIQHPDLILLQYVDDILLAATSELDCQQGTRALLQTLGDLGYRASAKKAQICQKQVKYLGYLLREGQRWLTEARKETVMGQPVPKTPRQLREFLGTAGFCRLWIPGFAEMAAPLYPLTKPGTLFSWGPDQQKAYQEIKQALLTAPALGLPDLTKPFELFVDEKQGYAKGVLTQKLGPWRRPVAYLSKKLDPVAAGWPPCLRMVAAIAVLTKDAGKLTMGQPLVILAPHAVEALVKQPPDRWLSNARMTHYQAMLLDTDRVQFGPVVALNPATLLPLPEEGAPHDCLEILAETHGTRPDLTDQPIPDADHTWYTDGSSFLQEGQRKAGAAVTTETEVIWAGALPAGTSAQRAELIALTQALKMAEGKRLNVYTDSRYAFATAHIHGEIYRRRGWLTSEGREIKNKSEILALLKALFLPKRLSIIHCLGHQKGDSAEARGNRLADQAAREAAIKTPPDTSTLLAGKRTADGSEFEKRTADGSEFESPKKKAKVE

SEQ ID NO: 2211 - protein, 2096 aa, synthetic construct
MPAAKRVKLDGGDKKYSIGLDIGTNSVGWAVITDEYKVPSKKFKVLGNTDRHSIKKNLIGALLFDSGETAEATRLKRTARRRYTRRKNRICYLQEIFSNEMAKVDDSFFHRLEESFLVEEDKKHERHPIFGNIVDEVAYHEKYPTIYHLRKKLVDSTDKADLRLIYLALAHMIKFRGHFLIEGDLNPDNSDVDKLFIQLVQTYNQLFEENPINASGVDAKAILSARLSKSRRLENLIAQLPGEKKNGLFGNLIALSLGLTPNFKSNFDLAEDAKLQLSKDTYDDDLDNLLAQIGDQYADLFLAAKNLSDAILLSDILRVNTEITKAPLSASMIKRYDEHHQDLTLLKALVRQQLPEKYKEIFFDQSKNGYAGYIDGGASQEEFYKFIKPILEKMDGTEELLVKLNREDLLRKQRTFDNGSIPHQIHLGELHAILRRQEDFYPFLKDNREKIEKILTFRIPYYVGPLARGNSRFAWMTRKSEETITPWNFEEVVDKGASAQSFIERMTNFDKNLPNEKVLPKHSLLYEYFTVYNELTKVKYVTEGMRKPAFLSGEQKKAIVDLLFKTNRKVTVKQLKEDYFKKIECFDSVEISGVEDRFNASLGTYHDLLKIIKDKDFLDNEENEDILEDIVLTLTLFEDREMIEERLKTYAHLFDDKVMKQLKRRRYTGWGRLSRKLINGIRDKQSGKTILDFLKSDGFANRNFMQLIHDDSLTFKEDIQKAQVSGQGDSLHEHIANLAGSPAIKKGILQTVKVVDELVKVMGRHKPENIVIEMARENQTTQKGQKNSRERMKRIEEGIKELGSQILKEHPVENTQLQNEKLYLYYLQNGRDMYVDQELDINRLSDYDVDHIVPQSFLKDDSIDNKVLTRSDKARGKSDNVPSEEVVKKMKNYWRQLLNAKLITQRKFDNLTKAERGGLSELDKAGFIKRQLVETRQITKHVAQILDSRMNTKYDENDKLIREVKVITLKSKLVSDFRKDFQFYKVREINNYHHAHDAYLNAVVGTALIKKYPKLESEFVYGDYKVYDVRKMIAKSEQEIGKATAKYFFYSNIMNFFKTEITLANGEIRKRPLIETNGETGEIVWDKGRDFATVRKVLSMPQVNIVKKTEVQTGGFSKESILPKRNSDKLIARKKDWDPKKYGGFDSPTVAYSVLVVAKVEKGKSKKLKSVKELLGITIMERSSFEKNPIDFLEAKGYKEVKKDLIIKLPKYSLFELENGRKRMLASAGELQKGNELALPSKYVNFLYLASHYEKLKGSPEDNEQKQLFVEQHKHYLDEIIEQISEFSKRVILADANLDKVLSAYNKHRDKPIREQAENIIHLFTLTNLGAPAAFKYFDTTIDRKRYTSTKEVLDATLIHQSITGLYETRIDLSQLGGDGGEAAAKGSSPAPGGTLGIEDEYRLHETSTEPDVSLGSTWLSDFPQAWAETGGMGLAVRQAPLIIPLKATSTPVSIQQYPMSHEARLGIKPHIQRLLDQGILVPCQSPWNTPLLPVKKPGTNDYRPVQDLREVNKRVEDIHPTVPNPYNLLSGLPPSHQWYTVLDLKDAFFCLRLHPTSQPLFAFEWRDPGMGISGQLTWTRLPQGFKNSPTLFNEALHRDLADFRIQHPDLILLQYVDDILLAATSELDCQQGTRALLQTLGDLGYRASAKKAQICQKQVKYLGYLLREGQRWLTEARKETVMGQPVPKTPRQLREFLGTAGFCRLWIPGFAEMAAPLYPLTKPGTLFSWGPDQQKAYQEIKQALLTAPALGLPDLTKPFELFVDEKQGYAKGVLTQKLGPWRRPVAYLSKKLDPVAAGWPPCLRMVAAIAVLTKDAGKLTMGQPLVILAPHAVEALVKQPPDRWLSNARMTHYQAMLLDTDRVQFGPVVALNPATLLPLPEEGAPHDCLEILAETHGTRPDLTDQPIPDADHTWYTDGSSFLQEGQRKAGAAVTTETEVIWAGALPAGTSAQRAELIALTQALKMAEGKRLNVYTDSRYAFATAHIHGEIYRRRGWLTSEGREIKNKSEILALLKALFLPKRLSIIHCLGHQKGDSAEARGNRLADQAAREAAIKTPPDTSTLLAGKRTADGSEFEKRTADGSEFESPKKKAKVE

SEQ ID NO: 2212 - protein, 2094 aa, synthetic construct; identical to SEQ ID NO: 2079

SEQ ID NO: 2213 - protein, 2096 aa, synthetic construct
MPAAKRVKLDGGDKKYSIGLDIGTNSVGWAVITDEYKVPSKKFKVLGNTDRHSIKKNLIGALLFDSGETAEATRLKRTARRRYTRRKNRICYLQEIFSNEMAKVDDSFFHRLEESFLVEEDKKHERHPIFGNIVDEVAYHEKYPTIYHLRKKLVDSTDKADLRLIYLALAHMIKFRGHFLIEGDLNPDNSDVDKLFIQLVQTYNQLFEENPINASGVDAKAILSARLSKSRRLENLIAQLPGEKKNGLFGNLIALSLGLTPNFKSNFDLAEDAKLQLSKDTYDDDLDNLLAQIGDQYADLFLAAKNLSDAILLSDILRVNTEITKAPLSASMIKRYDEHHQDLTLLKALVRQQLPEKYKEIFFDQSKNGYAGYIDGGASQEEFYKFIKPILEKMDGTEELLVKLNREDLLRKQRTFDNGSIPHQIHLGELHAILRRQEDFYPFLKDNREKIEKILTFRIPYYVGPLARGNSRFAWMTRKSEETITPWNFEEVVDKGASAQSFIERMTNFDKNLPNEKVLPKHSLLYEYFTVYNELTKVKYVTEGMRKPAFLSGEQKKAIVDLLFKTNRKVTVKQLKEDYFKKIECFDSVEISGVEDRFNASLGTYHDLLKIIKDKDFLDNEENEDILEDIVLTLTLFEDREMIEERLKTYAHLFDDKVMKQLKRRRYTGWGRLSRKLINGIRDKQSGKTILDFLKSDGFANRNFMQLIHDDSLTFKEDIQKAQVSGQGDSLHEHIANLAGSPAIKKGILQTVKVVDELVKVMGRHKPENIVIEMARENQTTQKGQKNSRERMKRIEEGIKELGSQILKEHPVENTQLQNEKLYLYYLQNGRDMYVDQELDINRLSDYDVDHIVPQSFLKDDSIDNKVLTRSDKARGKSDNVPSEEVVKKMKNYWRQLLNAKLITQRKFDNLTKAERGGLSELDKAGFIKRQLVETRQITKHVAQILDSRMNTKYDENDKLIREVKVITLKSKLVSDFRKDFQFYKVREINNYHHAHDAYLNAVVGTALIKKYPKLESEFVYGDYKVYDVRKMIAKSEQEIGKATAKYFFYSNIMNFFKTEITLANGEIRKRPLIETNGETGEIVWDKGRDFATVRKVLSMPQVNIVKKTEVQTGGFSKESILPKRNSDKLIARKKDWDPKKYGGFDSPTVAYSVLVVAKVEKGKSKKLKSVKELLGITIMERSSFEKNPIDFLEAKGYKEVKKDLIIKLPKYSLFELENGRKRMLASAGELQKGNELALPSKYVNFLYLASHYEKLKGSPEDNEQKQLFVEQHKHYLDEIIEQISEFSKRVILADANLDKVLSAYNKHRDKPIREQAENIIHLFTLTNLGAPAAFKYFDTTIDRKRYTSTKEVLDATLIHQSITGLYETRIDLSQLGGDGGEAAAKPAPGSSGGTLGIEDEYRLHETSTEPDVSLGSTWLSDFPQAWAETGGMGLAVRQAPLIIPLKATSTPVSIQQYPMSHEARLGIKPHIQRLLDQGILVPCQSPWNTPLLPVKKPGTNDYRPVQDLREVNKRVEDIHPTVPNPYNLLSGLPPSHQWYTVLDLKDAFFCLRLHPTSQPLFAFEWRDPGMGISGQLTWTRLPQGFKNSPTLFNEALHRDLADFRIQHPDLILLQYVDDILLAATSELDCQQGTRALLQTLGDLGYRASAKKAQICQKQVKYLGYLLREGQRWLTEARKETVMGQPVPKTPRQLREFLGTAGFCRLWIPGFAEMAAPLYPLTKPGTLFSWGPDQQKAYQEIKQALLTAPALGLPDLTKPFELFVDEKQGYAKGVLTQKLGPWRRPVAYLSKKLDPVAAGWPPCLRMVAAIAVLTKDAGKLTMGQPLVILAPHAVEALVKQPPDRWLSNARMTHYQAMLLDTDRVQFGPVVALNPATLLPLPEEGAPHDCLEILAETHGTRPDLTDQPIPDADHTWYTDGSSFLQEGQRKAGAAVTTETEVIWAGALPAGTSAQRAELIALTQALKMAEGKRLNVYTDSRYAFATAHIHGEIYRRRGWLTSEGREIKNKSEILALLKALFLPKRLSIIHCLGHQKGDSAEARGNRLADQAAREAAIKTPPDTSTLLAGKRTADGSEFEKRTADGSEFESPKKKAKVE

SEQ ID NO: 2214 - protein, 2096 aa, synthetic construct
MPAAKRVKLDGGDKKYSIGLDIGTNSVGWAVITDEYKVPSKKFKVLGNTDRHSIKKNLIGALLFDSGETAEATRLKRTARRRYTRRKNRICYLQEIFSNEMAKVDDSFFHRLEESFLVEEDKKHERHPIFGNIVDEVAYHEKYPTIYHLRKKLVDSTDKADLRLIYLALAHMIKFRGHFLIEGDLNPDNSDVDKLFIQLVQTYNQLFEENPINASGVDAKAILSARLSKSRRLENLIAQLPGEKKNGLFGNLIALSLGLTPNFKSNFDLAEDAKLQLSKDTYDDDLDNLLAQIGDQYADLFLAAKNLSDAILLSDILRVNTEITKAPLSASMIKRYDEHHQDLTLLKALVRQQLPEKYKEIFFDQSKNGYAGYIDGGASQEEFYKFIKPILEKMDGTEELLVKLNREDLLRKQRTFDNGSIPHQIHLGELHAILRRQEDFYPFLKDNREKIEKILTFRIPYYVGPLARGNSRFAWMTRKSEETITPWNFEEVVDKGASAQSFIERMTNFDKNLPNEKVLPKHSLLYEYFTVYNELTKVKYVTEGMRKPAFLSGEQKKAIVDLLFKTNRKVTVKQLKEDYFKKIECFDSVEISGVEDRFNASLGTYHDLLKIIKDKDFLDNEENEDILEDIVLTLTLFEDREMIEERLKTYAHLFDDKVMKQLKRRRYTGWGRLSRKLINGIRDKQSGKTILDFLKSDGFANRNFMQLIHDDSLTFKEDIQKAQVSGQGDSLHEHIANLAGSPAIKKGILQTVKVVDELVKVMGRHKPENIVIEMARENQTTQKGQKNSRERMKRIEEGIKELGSQILKEHPVENTQLQNEKLYLYYLQNGRDMYVDQELDINRLSDYDVDHIVPQSFLKDDSIDNKVLTRSDKARGKSDNVPSEEVVKKMKNYWRQLLNAKLITQRKFDNLTKAERGGLSELDKAGFIKRQLVETRQITKHVAQILDSRMNTKYDENDKLIREVKVITLKSKLVSDFRKDFQFYKVREINNYHHAHDAYLNAVVGTALIKKYPKLESEFVYGDYKVYDVRKMIAKSEQEIGKATAKYFFYSNIMNFFKTEITLANGEIRKRPLIETNGETGEIVWDKGRDFATVRKVLSMPQVNIVKKTEVQTGGFSKESILPKRNSDKLIARKKDWDPKKYGGFDSPTVAYSVLVVAKVEKGKSKKLKSVKELLGITIMERSSFEKNPIDFLEAKGYKEVKKDLIIKLPKYSLFELENGRKRMLASAGELQKGNELALPSKYVNFLYLASHYEKLKGSPEDNEQKQLFVEQHKHYLDEIIEQISEFSKRVILADANLDKVLSAYNKHRDKPIREQAENIIHLFTLTNLGAPAAFKYFDTTIDRKRYTSTKEVLDATLIHQSITGLYETRIDLSQLGGDGGGSSGGGEAAAKGGTLGIEDEYRLHETSTEPDVSLGSTWLSDFPQAWAETGGMGLAVRQAPLIIPLKATSTPVSIQQYPMSHEARLGIKPHIQRLLDQGILVPCQSPWNTPLLPVKKPGTNDYRPVQDLREVNKRVEDIHPTVPNPYNLLSGLPPSHQWYTVLDLKDAFFCLRLHPTSQPLFAFEWRDPGMGISGQLTWTRLPQGFKNSPTLFNEALHRDLADFRIQHPDLILLQYVDDILLAATSELDCQQGTRALLQTLGDLGYRASAKKAQICQKQVKYLGYLLREGQRWLTEARKETVMGQPVPKTPRQLREFLGTAGFCRLWIPGFAEMAAPLYPLTKPGTLFSWGPDQQKAYQEIKQALLTAPALGLPDLTKPFELFVDEKQGYAKGVLTQKLGPWRRPVAYLSKKLDPVAAGWPPCLRMVAAIAVLTKDAGKLTMGQPLVILAPHAVEALVKQPPDRWLSNARMTHYQAMLLDTDRVQFGPVVALNPATLLPLPEEGAPHDCLEILAETHGTRPDLTDQPIPDADHTWYTDGSSFLQEGQRKAGAAVTTETEVIWAGALPAGTSAQRAELIALTQALKMAEGKRLNVYTDSRYAFATAHIHGEIYRRRGWLTSEGREIKNKSEILALLKALFLPKRLSIIHCLGHQKGDSAEARGNRLADQAAREAAIKTPPDTSTLLAGKRTADGSEFEKRTADGSEFESPKKKAKVE

SEQ ID NO: 2215 - protein, 2096 aa, synthetic construct
MPAAKRVKLDGGDKKYSIGLDIGTNSVGWAVITDEYKVPSKKFKVLGNTDRHSIKKNLIGALLFDSGETAEATRLKRTARRRYTRRKNRICYLQEIFSNEMAKVDDSFFHRLEESFLVEEDKKHERHPIFGNIVDEVAYHEKYPTIYHLRKKLVDSTDKADLRLIYLALAHMIKFRGHFLIEGDLNPDNSDVDKLFIQLVQTYNQLFEENPINASGVDAKAILSARLSKSRRLENLIAQLPGEKKNGLFGNLIALSLGLTPNFKSNFDLAEDAKLQLSKDTYDDDLDNLLAQIGDQYADLFLAAKNLSDAILLSDILRVNTEITKAPLSASMIKRYDEHHQDLTLLKALVRQQLPEKYKEIFFDQSKNGYAGYIDGGASQEEFYKFIKPILEKMDGTEELLVKLNREDLLRKQRTFDNGSIPHQIHLGELHAILRRQEDFYPFLKDNREKIEKILTFRIPYYVGPLARGNSRFAWMTRKSEETITPWNFEEVVDKGASAQSFIERMTNFDKNLPNEKVLPKHSLLYEYFTVYNELTKVKYVTEGMRKPAFLSGEQKKAIVDLLFKTNRKVTVKQLKEDYFKKIECFDSVEISGVEDRFNASLGTYHDLLKIIKDKDFLDNEENEDILEDIVLTLTLFEDREMIEERLKTYAHLFDDKVMKQLKRRRYTGWGRLSRKLINGIRDKQSGKTILDFLKSDGFANRNFMQLIHDDSLTFKEDIQKAQVSGQGDSLHEHIANLAGSPAIKKGILQTVKVVDELVKVMGRHKPENIVIEMARENQTTQKGQKNSRERMKRIEEGIKELGSQILKEHPVENTQLQNEKLYLYYLQNGRDMYVDQELDINRLSDYDVDHIVPQSFLKDDSIDNKVLTRSDKARGKSDNVPSEEVVKKMKNYWRQLLNAKLITQRKFDNLTKAERGGLSELDKAGFIKRQLVETRQITKHVAQILDSRMNTKYDENDKLIREVKVITLKSKLVSDFRKDFQFYKVREINNYHHAHDAYLNAVVGTALIKKYPKLESEFVYGDYKVYDVRKMIAKSEQEIGKATAKYFFYSNIMNFFKTEITLANGEIRKRPLIETNGETGEIVWDKGRDFATVRKVLSMPQVNIVKKTEVQTGGFSKESILPKRNSDKLIARKKDWDPKKYGGFDSPTVAYSVLVVAKVEKGKSKKLKSVKELLGITIMERSSFEKNPIDFLEAKGYKEVKKDLIIKLPKYSLFELENGRKRMLASAGELQKGNELALPSKYVNFLYLASHYEKLKGSPEDNEQKQLFVEQHKHYLDEIIEQISEFSKRVILADANLDKVLSAYNKHRDKPIREQAENIIHLFTLTNLGAPAAFKYFDTTIDRKRYTSTKEVLDATLIHQSITGLYETRIDLSQLGGDGGGSSEAAAKPAPGGTLGIEDEYRLHETSTEPDVSLGSTWLSDFPQAWAETGGMGLAVRQAPLIIPLKATSTPVSIQQYPMSHEARLGIKPHIQRLLDQGILVPCQSPWNTPLLPVKKPGTNDYRPVQDLREVNKRVEDIHPTVPNPYNLLSGLPPSHQWYTVLDLKDAFFCLRLHPTSQPLFAFEWRDPGMGISGQLTWTRLPQGFKNSPTLFNEALHRDLADFRIQHPDLILLQYVDDILLAATSELDCQQGTRALLQTLGDLGYRASAKKAQICQKQVKYLGYLLREGQRWLTEARKETVMGQPVPKTPRQLREFLGTAGFCRLWIPGFAEMAAPLYPLTKPGTLFSWGPDQQKAYQEIKQALLTAPALGLPDLTKPFELFVDEKQGYAKGVLTQKLGPWRRPVAYLSKKLDPVAAGWPPCLRMVAAIAVLTKDAGKLTMGQPLVILAPHAVEALVKQPPDRWLSNARMTHYQAMLLDTDRVQFGPVVALNPATLLPLPEEGAPHDCLEILAETHGTRPDLTDQPIPDADHTWYTDGSSFLQEGQRKAGAAVTTETEVIWAGALPAGTSAQRAELIALTQALKMAEGKRLNVYTDSRYAFATAHIHGEIYRRRGWLTSEGREIKNKSEILALLKALFLPKRLSIIHCLGHQKGDSAEARGNRLADQAAREAAIKTPPDTSTLLAGKRTADGSEFEKRTADGSEFESPKKKAKVE

SEQ ID NO: 2216 - protein, 2091 aa, synthetic construct
MPAAKRVKLDGGDKKYSIGLDIGTNSVGWAVITDEYKVPSKKFKVLGNTDRHSIKKNLIGALLFDSGETAEATRLKRTARRRYTRRKNRICYLQEIFSNEMAKVDDSFFHRLEESFLVEEDKKHERHPIFGNIVDEVAYHEKYPTIYHLRKKLVDSTDKADLRLIYLALAHMIKFRGHFLIEGDLNPDNSDVDKLFIQLVQTYNQLFEENPINASGVDAKAILSARLSKSRRLENLIAQLPGEKKNGLFGNLIALSLGLTPNFKSNFDLAEDAKLQLSKDTYDDDLDNLLAQIGDQYADLFLAAKNLSDAILLSDILRVNTEITKAPLSASMIKRYDEHHQDLTLLKALVRQQLPEKYKEIFFDQSKNGYAGYIDGGASQEEFYKFIKPILEKMDGTEELLVKLNREDLLRKQRTFDNGSIPHQIHLGELHAILRRQEDFYPFLKDNREKIEKILTFRIPYYVGPLARGNSRFAWMTRKSEETITPWNFEEVVDKGASAQSFIERMTNFDKNLPNEKVLPKHSLLYEYFTVYNELTKVKYVTEGMRKPAFLSGEQKKAIVDLLFKTNRKVTVKQLKEDYFKKIECFDSVEISGVEDRFNASLGTYHDLLKIIKDKDFLDNEENEDILEDIVLTLTLFEDREMIEERLKTYAHLFDDKVMKQLKRRRYTGWGRLSRKLINGIRDKQSGKTILDFLKSDGFANRNFMQLIHDDSLTFKEDIQKAQVSGQGDSLHEHIANLAGSPAIKKGILQTVKVVDELVKVMGRHKPENIVIEMARENQTTQKGQKNSRERMKRIEEGIKELGSQILKEHPVENTQLQNEKLYLYYLQNGRDMYVDQELDINRLSDYDVDHIVPQSFLKDDSIDNKVLTRSDKARGKSDNVPSEEVVKKMKNYWRQLLNAKLITQRKFDNLTKAERGGLSELDKAGFIKRQLVETRQITKHVAQILDSRMNTKYDENDKLIREVKVITLKSKLVSDFRKDFQFYKVREINNYHHAHDAYLNAVVGTALIKKYPKLESEFVYGDYKVYDVRKMIAKSEQEIGKATAKYFFYSNIMNFFKTEITLANGEIRKRPLIETNGETGEIVWDKGRDFATVRKVLSMPQVNIVKKTEVQTGGFSKESILPKRNSDKLIARKKDWDPKKYGGFDSPTVAYSVLVVAKVEKGKSKKLKSVKELLGITIMERSSFEKNPIDFLEAKGYKEVKKDLIIKLPKYSLFELENGRKRMLASAGELQKGNELALPSKYVNFLYLASHYEKLKGSPEDNEQKQLFVEQHKHYLDEIIEQISEFSKRVILADANLDKVLSAYNKHRDKPIREQAENIIHLFTLTNLGAPAAFKYFDTTIDRKRYTSTKEVLDATLIHQSITGLYETRIDLSQLGGDGGGGGGGGGGTLGIEDEYRLHETSTEPDVSLGSTWLSDFPQAWAETGGMGLAVRQAPLIIPLKATSTPVSIQQYPMSHEARLGIKPHIQRLLDQGILVPCQSPWNTPLLPVKKPGTNDYRPVQDLREVNKRVEDIHPTVPNPYNLLSGLPPSHQWYTVLDLKDAFFCLRLHPTSQPLFAFEWRDPGMGISGQLTWTRLPQGFKNSPTLFNEALHRDLADFRIQHPDLILLQYVDDILLAATSELDCQQGTRALLQTLGDLGYRASAKKAQICQKQVKYLGYLLREGQRWLTEARKETVMGQPVPKTPRQLREFLGTAGFCRLWIPGFAEMAAPLYPLTKPGTLFSWGPDQQKAYQEIKQALLTAPALGLPDLTKPFELFVDEKQGYAKGVLTQKLGPWRRPVAYLSKKLDPVAAGWPPCLRMVAAIAVLTKDAGKLTMGQPLVILAPHAVEALVKQPPDRWLSNARMTHYQAMLLDTDRVQFGPVVALNPATLLPLPEEGAPHDCLEILAETHGTRPDLTDQPIPDADHTWYTDGSSFLQEGQRKAGAAVTTETEVIWAGALPAGTSAQRAELIALTQALKMAEGKRLNVYTDSRYAFATAHIHGEIYRRRGWLTSEGREIKNKSEILALLKALFLPKRLSIIHCLGHQKGDSAEARGNRLADQAAREAAIKTPPDTSTLLAGKRTADGSEFEKRTADGSEFESPKKKAKVE

SEQ ID NO: 2217 - protein, 2094 aa, synthetic construct
MPAAKRVKLDGGDKKYSIGLDIGTNSVGWAVITDEYKVPSKKFKVLGNTDRHSIKKNLIGALLFDSGETAEATRLKRTARRRYTRRKNRICYLQEIFSNEMAKVDDSFFHRLEESFLVEEDKKHERHPIFGNIVDEVAYHEKYPTIYHLRKKLVDSTDKADLRLIYLALAHMIKFRGHFLIEGDLNPDNSDVDKLFIQLVQTYNQLFEENPINASGVDAKAILSARLSKSRRLENLIAQLPGEKKNGLFGNLIALSLGLTPNFKSNFDLAEDAKLQLSKDTYDDDLDNLLAQIGDQYADLFLAAKNLSDAILLSDILRVNTEITKAPLSASMIKRYDEHHQDLTLLKALVRQQLPEKYKEIFFDQSKNGYAGYIDGGASQEEFYKFIKPILEKMDGTEELLVKLNREDLLRKQRTFDNGSIPHQIHLGELHAILRRQEDFYPFLKDNREKIEKILTFRIPYYVGPLARGNSRFAWMTRKSEETITPWNFEEVVDKGASAQSFIERMTNFDKNLPNEKVLPKHSLLYEYFTVYNELTKVKYVTEGMRKPAFLSGEQKKAIVDLLFKTNRKVTVKQLKEDYFKKIECFDSVEISGVEDRFNASLGTYHDLLKIIKDKDFLDNEENEDILEDIVLTLTLFEDREMIEERLKTYAHLFDDKVMKQLKRRRYTGWGRLSRKLINGIRDKQSGKTILDFLKSDGFANRNFMQLIHDDSLTFKEDIQKAQVSGQGDSLHEHIANLAGSPAIKKGILQTVKVVDELVKVMGRHKPENIVIEMARENQTTQKGQKNSRERMKRIEEGIKELGSQILKEHPVENTQLQNEKLYLYYLQNGRDMYVDQELDINRLSDYDVDHIVPQSFLKDDSIDNKVLTRSDKARGKSDNVPSEEVVKKMKNYWRQLLNAKLITQRKFDNLTKAERGGLSELDKAGFIKRQLVETRQITKHVAQILDSRMNTKYDENDKLIREVKVITLKSKLVSDFRKDFQFYKVREINNYHHAHDAYLNAVVGTALIKKYPKLESEFVYGDYKVYDVRKMIAKSEQEIGKATAKYFFYSNIMNFFKTEITLANGEIRKRPLIETNGETGEIVWDKGRDFATVRKVLSMPQVNIVKKTEVQTGGFSKESILPKRNSDKLIARKKDWDPKKYGGFDSPTVAYSVLVVAKVEKGKSKKLKSVKELLGITIMERSSFEKNPIDFLEAKGYKEVKKDLIIKLPKYSLFELENGRKRMLASAGELQKGNELALPSKYVNFLYLASHYEKLKGSPEDNEQKQLFVEQHKHYLDEIIEQISEFSKRVILADANLDKVLSAYNKHRDKPIREQAENIIHLFTLTNLGAPAAFKYFDTTIDRKRYTSTKEVLDATLIHQSITGLYETRIDLSQLGGDGGGGSGSSPAPGGTLGIEDEYRLHETSTEPDVSLGSTWLSDFPQAWAETGGMGLAVRQAPLIIPLKATSTPVSIQQYPMSHEARLGIKPHIQRLLDQGILVPCQSPWNTPLLPVKKPGTNDYRPVQDLREVNKRVEDIHPTVPNPYNLLSGLPPSHQWYTVLDLKDAFFCLRLHPTSQPLFAFEWRDPGMGISGQLTWTRLPQGFKNSPTLFNEALHRDLADFRIQHPDLILLQYVDDILLAATSELDCQQGTRALLQTLGDLGYRASAKKAQICQKQVKYLGYLLREGQRWLTEARKETVMGQPVPKTPRQLREFLGTAGFCRLWIPGFAEMAAPLYPLTKPGTLFSWGPDQQKAYQEIKQALLTAPALGLPDLTKPFELFVDEKQGYAKGVLTQKLGPWRRPVAYLSKKLDPVAAGWPPCLRMVAAIAVLTKDAGKLTMGQPLVILAPHAVEALVKQPPDRWLSNARMTHYQAMLLDTDRVQFGPVVALNPATLLPLPEEGAPHDCLEILAETHGTRPDLTDQPIPDADHTWYTDGSSFLQEGQRKAGAAVTTETEVIWAGALPAGTSAQRAELIALTQALKMAEGKRLNVYTDSRYAFATAHIHGEIYRRRGWLTSEGREIKNKSEILALLKALFLPKRLSIIHCLGHQKGDSAEARGNRLADQAAREAAIKTPPDTSTLLAGKRTADGSEFEKRTADGSEFESPKKKAKVE

SEQ ID NO: 2218 - protein, 2096 aa, synthetic construct
MPAAKRVKLDGGDKKYSIGLDIGTNSVGWAVITDEYKVPSKKFKVLGNTDRHSIKKNLIGALLFDSGETAEATRLKRTARRRYTRRKNRICYLQEIFSNEMAKVDDSFFHRLEESFLVEEDKKHERHPIFGNIVDEVAYHEKYPTIYHLRKKLVDSTDKADLRLIYLALAHMIKFRGHFLIEGDLNPDNSDVDKLFIQLVQTYNQLFEENPINASGVDAKAILSARLSKSRRLENLIAQLPGEKKNGLFGNLIALSLGLTPNFKSNFDLAEDAKLQLSKDTYDDDLDNLLAQIGDQYADLFLAAKNLSDAILLSDILRVNTEITKAPLSASMIKRYDEHHQDLTLLKALVRQQLPEKYKEIFFDQSKNGYAGYIDGGASQEEFYKFIKPILEKMDGTEELLVKLNREDLLRKQRTFDNGSIPHQIHLGELHAILRRQEDFYPFLKDNREKIEKILTFRIPYYVGPLARGNSRFAWMTRKSEETITPWNFEEVVDKGASAQSFIERMTNFDKNLPNEKVLPKHSLLYEYFTVYNELTKVKYVTEGMRKPAFLSGEQKKAIVDLLFKTNRKVTVKQLKEDYFKKIECFDSVEISGVEDRFNASLGTYHDLLKIIKDKDFLDNEENEDILEDIVLTLTLFEDREMIEERLKTYAHLFDDKVMKQLKRRRYTGWGRLSRKLINGIRDKQSGKTILDFLKSDGFANRNFMQLIHDDSLTFKEDIQKAQVSGQGDSLHEHIANLAGSPAIKKGILQTVKVVDELVKVMGRHKPENIVIEMARENQTTQKGQKNSRERMKRIEEGIKELGSQILKEHPVENTQLQNEKLYLYYLQNGRDMYVDQELDINRLSDYDVDHIVPQSFLKDDSIDNKVLTRSDKARGKSDNVPSEEVVKKMKNYWRQLLNAKLITQRKFDNLTKAERGGLSELDKAGFIKRQLVETRQITKHVAQILDSRMNTKYDENDKLIREVKVITLKSKLVSDFRKDFQFYKVREINNYHHAHDAYLNAVVGTALIKKYPKLESEFVYGDYKVYDVRKMIAKSEQEIGKATAKYFFYSNIMNFFKTEITLANGEIRKRPLIETNGETGEIVWDKGRDFATVRKVLSMPQVNIVKKTEVQTGGFSKESILPKRNSDKLIARKKDWDPKKYGGFDSPTVAYSVLVVAKVEKGKSKKLKSVKELLGITIMERSSFEKNPIDFLEAKGYKEVKKDLIIKLPKYSLFELENGRKRMLASAGELQKGNELALPSKYVNFLYLASHYEKLKGSPEDNEQKQLFVEQHKHYLDEIIEQISEFSKRVILADANLDKVLSAYNKHRDKPIREQAENIIHLFTLTNLGAPAAFKYFDTTIDRKRYTSTKEVLDATLIHQSITGLYETRIDLSQLGGDGGEAAAKGGSGGGGGTLGIEDEYRLHETSTEPDVSLGSTWLSDFPQAWAETGGMGLAVRQAPLIIPLKATSTPVSIQQYPMSHEARLGIKPHIQRLLDQGILVPCQSPWNTPLLPVKKPGTNDYRPVQDLREVNKRVEDIHPTVPNPYNLLSGLPPSHQWYTVLDLKDAFFCLRLHPTSQPLFAFEWRDPGMGISGQLTWTRLPQGFKNSPTLFNEALHRDLADFRIQHPDLILLQYVDDILLAATSELDCQQGTRALLQTLGDLGYRASAKKAQICQKQVKYLGYLLREGQRWLTEARKETVMGQPVPKTPRQLREFLGTAGFCRLWIPGFAEMAAPLYPLTKPGTLFSWGPDQQKAYQEIKQALLTAPALGLPDLTKPFELFVDEKQGYAKGVLTQKLGPWRRPVAYLSKKLDPVAAGWPPCLRMVAAIAVLTKDAGKLTMGQPLVILAPHAVEALVKQPPDRWLSNARMTHYQAMLLDTDRVQFGPVVALNPATLLPLPEEGAPHDCLEILAETHGTRPDLTDQPIPDADHTWYTDGSSFLQEGQRKAGAAVTTETEVIWAGALPAGTSAQRAELIALTQALKMAEGKRLNVYTDSRYAFATAHIHGEIYRRRGWLTSEGREIKNKSEILALLKALFLPKRLSIIHCLGHQKGDSAEARGNRLADQAAREAAIKTPPDTSTLLAGKRTADGSEFEKRTADGSEFESPKKKAKVE

SEQ ID NO: 2219 - protein, 2094 aa, synthetic construct
MPAAKRVKLDGGDKKYSIGLDIGTNSVGWAVITDEYKVPSKKFKVLGNTDRHSIKKNLIGALLFDSGETAEATRLKRTARRRYTRRKNRICYLQEIFSNEMAKVDDSFFHRLEESFLVEEDKKHERHPIFGNIVDEVAYHEKYPTIYHLRKKLVDSTDKADLRLIYLALAHMIKFRGHFLIEGDLNPDNSDVDKLFIQLVQTYNQLFEENPINASGVDAKAILSARLSKSRRLENLIAQLPGEKKNGLFGNLIALSLGLTPNFKSNFDLAEDAKLQLSKDTYDDDLDNLLAQIGDQYADLFLAAKNLSDAILLSDILRVNTEITKAPLSASMIKRYDEHHQDLTLLKALVRQQLPEKYKEIFFDQSKNGYAGYIDGGASQEEFYKFIKPILEKMDGTEELLVKLNREDLLRKQRTFDNGSIPHQIHLGELHAILRRQEDFYPFLKDNREKIEKILTFRIPYYVGPLARGNSRFAWMTRKSEETITPWNFEEVVDKGASAQSFIERMTNFDKNLPNEKVLPKHSLLYEYFTVYNELTKVKYVTEGMRKPAFLSGEQKKAIVDLLFKTNRKVTVKQLKEDYFKKIECFDSVEISGVEDRFNASLGTYHDLLKIIKDKDFLDNEENEDILEDIVLTLTLFEDREMIEERLKTYAHLFDDKVMKQLKRRRYTGWGRLSRKLINGIRDKQSGKTILDFLKSDGFANRNFMQLIHDDSLTFKEDIQKAQVSGQGDSLHEHIANLAGSPAIKKGILQTVKVVDELVKVMGRHKPENIVIEMARENQTTQKGQKNSRERMKRIEEGIKELGSQILKEHPVENTQLQNEKLYLYYLQNGRDMYVDQELDINRLSDYDVDHIVPQSFLKDDSIDNKVLTRSDKARGKSDNVPSEEVVKKMKNYWRQLLNAKLITQRKFDNLTKAERGGLSELDKAGFIKRQLVETRQITKHVAQILDSRMNTKYDENDKLIREVKVITLKSKLVSDFRKDFQFYKVREINNYHHAHDAYLNAVVGTALIKKYPKLESEFVYGDYKVYDVRKMIAKSEQEIGKATAKYFFYSNIMNFFKTEITLANGEIRKRPLIETNGETGEIVWDKGRDFATVRKVLSMPQVNIVKKTEVQTGGFSKESILPKRNSDKLIARKKDWDPKKYGGFDSPTVAYSVLVVAKVEKGKSKKLKSVKELLGITIMERSSFEKNPIDFLEAKGYKEVKKDLIIKLPKYSLFELENGRKRMLASAGELQKGNELALPSKYVNFLYLASHYEKLKGSPEDNEQKQLFVEQHKHYLDEIIEQISEFSKRVILADANLDKVLSAYNKHRDKPIREQAENIIHLFTLTNLGAPAAFKYFDTTIDRKRYTSTKEVLDATLIHQSITGLYETRIDLSQLGGDGGGSSGSSGSSGGTLGIEDEYRLHETSTEPDVSLGSTWLSDFPQAWAETGGMGLAVRQAPLIIPLKATSTPVSIQQYPMSHEARLGIKPHIQRLLDQGILVPCQSPWNTPLLPVKKPGTNDYRPVQDLREVNKRVEDIHPTVPNPYNLLSGLPPSHQWYTVLDLKDAFFCLRLHPTSQPLFAFEWRDPGMGISGQLTWTRLPQGFKNSPTLFNEALHRDLADFRIQHPDLILLQYVDDILLAATSELDCQQGTRALLQTLGDLGYRASAKKAQICQKQVKYLGYLLREGQRWLTEARKETVMGQPVPKTPRQLREFLGTAGFCRLWIPGFAEMAAPLYPLTKPGTLFSWGPDQQKAYQEIKQALLTAPALGLPDLTKPFELFVDEKQGYAKGVLTQKLGPWRRPVAYLSKKLDPVAAGWPPCLRMVAAIAVLTKDAGKLTMGQPLVILAPHAVEALVKQPPDRWLSNARMTHYQAMLLDTDRVQFGPVVALNPATLLPLPEEGAPHDCLEILAETHGTRPDLTDQPIPDADHTWYTDGSSFLQEGQRKAGAAVTTETEVIWAGALPAGTSAQRAELIALTQALKMAEGKRLNVYTDSRYAFATAHIHGEIYRRRGWLTSEGREIKNKSEILALLKALFLPKRLSIIHCLGHQKGDSAEARGNRLADQAAREAAIKTPPDTSTLLAGKRTADGSEFEKRTADGSEFESPKKKAKVE

SEQ ID NO: 2220 - protein, 2097 aa, synthetic construct
MPAAKRVKLDGGDKKYSIGLDIGTNSVGWAVITDEYKVPSKKFKVLGNTDRHSIKKNLIGALLFDSGETAEATRLKRTARRRYTRRKNRICYLQEIFSNEMAKVDDSFFHRLEESFLVEEDKKHERHPIFGNIVDEVAYHEKYPTIYHLRKKLVDSTDKADLRLIYLALAHMIKFRGHFLIEGDLNPDNSDVDKLFIQLVQTYNQLFEENPINASGVDAKAILSARLSKSRRLENLIAQLPGEKKNGLFGNLIALSLGLTPNFKSNFDLAEDAKLQLSKDTYDDDLDNLLAQIGDQYADLFLAAKNLSDAILLSDILRVNTEITKAPLSASMIKRYDEHHQDLTLLKALVRQQLPEKYKEIFFDQSKNGYAGYIDGGASQEEFYKFIKPILEKMDGTEELLVKLNREDLLRKQRTFDNGSIPHQIHLGELHAILRRQEDFYPFLKDNREKIEKILTFRIPYYVGPLARGNSRFAWMTRKSEETITPWNFEEVVDKGASAQSFIERMTNFDKNLPNEKVLPKHSLLYEYFTVYNELTKVKYVTEGMRKPAFLSGEQKKAIVDLLFKTNRKVTVKQLKEDYFKKIECFDSVEISGVEDRFNASLGTYHDLLKIIKDKDFLDNEENEDILEDIVLTLTLFEDREMIEERLKTYAHLFDDKVMKQLKRRRYTGWGRLSRKLINGIRDKQSGKTILDFLKSDGFANRNFMQLIHDDSLTFKEDIQKAQVSGQGDSLHEHIANLAGSPAIKKGILQTVKVVDELVKVMGRHKPENIVIEMARENQTTQKGQKNSRERMKRIEEGIKELGSQILKEHPVENTQLQNEKLYLYYLQNGRDMYVDQELDINRLSDYDVDHIVPQSFLKDDSIDNKVLTRSDKARGKSDNVPSEEVVKKMKNYWRQLLNAKLITQRKFDNLTKAERGGLSELDKAGFIKRQLVETRQITKHVAQILDSRMNTKYDENDKLIREVKVITLKSKLVSDFRKDFQFYKVREINNYHHAHDAYLNAVVGTALIKKYPKLESEFVYGDYKVYDVRKMIAKSEQEIGKATAKYFFYSNIMNFFKTEITLANGEIRKRPLIETNGETGEIVWDKGRDFATVRKVLSMPQVNIVKKTEVQTGGFSKESILPKRNSDKLIARKKDWDPKKYGGFDSPTVAYSVLVVAKVEKGKSKKLKSVKELLGITIMERSSFEKNPIDFLEAKGYKEVKKDLIIKLPKYSLFELENGRKRMLASAGELQKGNELALPSKYVNFLYLASHYEKLKGSPEDNEQKQLFVEQHKHYLDEIIEQISEFSKRVILADANLDKVLSAYNKHRDKPIREQAENIIHLFTLTNLGAPAAFKYFDTTIDRKRYTSTKEVLDATLIHQSITGLYETRIDLSQLGGDGGGSAGSAAGSGEFGGTLGIEDEYRLHETSTEPDVSLGSTWLSDFPQAWAETGGMGLAVRQAPLIIPLKATSTPVSIQQYPMSHEARLGIKPHIQRLLDQGILVPCQSPWNTPLLPVKKPGTNDYRPVQDLREVNKRVEDIHPTVPNPYNLLSGLPPSHQWYTVLDLKDAFFCLRLHPTSQPLFAFEWRDPGMGISGQLTWTRLPQGFKNSPTLFNEALHRDLADFRIQHPDLILLQYVDDILLAATSELDCQQGTRALLQTLGDLGYRASAKKAQICQKQVKYLGYLLREGQRWLTEARKETVMGQPVPKTPRQLREFLGTAGFCRLWIPGFAEMAAPLYPLTKPGTLFSWGPDQQKAYQEIKQALLTAPALGLPDLTKPFELFVDEKQGYAKGVLTQKLGPWRRPVAYLSKKLDPVAAGWPPCLRMVAAIAVLTKDAGKLTMGQPLVILAPHAVEALVKQPPDRWLSNARMTHYQAMLLDTDRVQFGPVVALNPATLLPLPEEGAPHDCLEILAETHGTRPDLTDQPIPDADHTWYTDGSSFLQEGQRKAGAAVTTETEVIWAGALPAGTSAQRAELIALTQALKMAEGKRLNVYTDSRYAFATAHIHGEIYRRRGWLTSEGREIKNKSEILALLKALFLPKRLSIIHCLGHQKGDSAEARGNRLADQAAREAAIKTPPDTSTLLAGKRTADGSEFEKRTADGSEFESPKKKAKVE

SEQ ID NO: 2221 - protein, 2090 aa, synthetic construct
MPAAKRVKLDGGDKKYSIGLDIGTNSVGWAVITDEYKVPSKKFKVLGNTDRHSIKKNLIGALLFDSGETAEATRLKRTARRRYTRRKNRICYLQEIFSNEMAKVDDSFFHRLEESFLVEEDKKHERHPIFGNIVDEVAYHEKYPTIYHLRKKLVDSTDKADLRLIYLALAHMIKFRGHFLIEGDLNPDNSDVDKLFIQLVQTYNQLFEENPINASGVDAKAILSARLSKSRRLENLIAQLPGEKKNGLFGNLIALSLGLTPNFKSNFDLAEDAKLQLSKDTYDDDLDNLLAQIGDQYADLFLAAKNLSDAILLSDILRVNTEITKAPLSASMIKRYDEHHQDLTLLKALVRQQLPEKYKEIFFDQSKNGYAGYIDGGASQEEFYKFIKPILEKMDGTEELLVKLNREDLLRKQRTFDNGSIPHQIHLGELHAILRRQEDFYPFLKDNREKIEKILTFRIPYYVGPLARGNSRFAWMTRKSEETITPWNFEEVVDKGASAQSFIERMTNFDKNLPNEKVLPKHSLLYEYFTVYNELTKVKYVTEGMRKPAFLSGEQKKAIVDLLFKTNRKVTVKQLKEDYFKKIECFDSVEISGVEDRFNASLGTYHDLLKIIKDKDFLDNEENEDILEDIVLTLTLFEDREMIEERLKTYAHLFDDKVMKQLKRRRYTGWGRLSRKLINGIRDKQSGKTILDFLKSDGFANRNFMQLIHDDSLTFKEDIQKAQVSGQGDSLHEHIANLAGSPAIKKGILQTVKVVDELVKVMGRHKPENIVIEMARENQTTQKGQKNSRERMKRIEEGIKELGSQILKEHPVENTQLQNEKLYLYYLQNGRDMYVDQELDINRLSDYDVDHIVPQSFLKDDSIDNKVLTRSDKARGKSDNVPSEEVVKKMKNYWRQLLNAKLITQRKFDNLTKAERGGLSELDKAGFIKRQLVETRQITKHVAQILDSRMNTKYDENDKLIREVKVITLKSKLVSDFRKDFQFYKVREINNYHHAHDAYLNAVVGTALIKKYPKLESEFVYGDYKVYDVRKMIAKSEQEIGKATAKYFFYSNIMNFFKTEITLANGEIRKRPLIETNGETGEIVWDKGRDFATVRKVLSMPQVNIVKKTEVQTGGFSKESILPKRNSDKLIARKKDWDPKKYGGFDSPTVAYSVLVVAKVEKGKSKKLKSVKELLGITIMERSSFEKNPIDFLEAKGYKEVKKDLIIKLPKYSLFELENGRKRMLASAGELQKGNELALPSKYVNFLYLASHYEKLKGSPEDNEQKQLFVEQHKHYLDEIIEQISEFSKRVILADANLDKVLSAYNKHRDKPIREQAENIIHLFTLTNLGAPAAFKYFDTTIDRKRYTSTKEVLDATLIHQSITGLYETRIDLSQLGGDGGGGGGGGGTLGIEDEYRLHETSTEPDVSLGSTWLSDFPQAWAETGGMGLAVRQAPLIIPLKATSTPVSIQQYPMSHEARLGIKPHIQRLLDQGILVPCQSPWNTPLLPVKKPGTNDYRPVQDLREVNKRVEDIHPTVPNPYNLLSGLPPSHQWYTVLDLKDAFFCLRLHPTSQPLFAFEWRDPGMGISGQLTWTRLPQGFKNSPTLFNEALHRDLADFRIQHPDLILLQYVDDILLAATSELDCQQGTRALLQTLGDLGYRASAKKAQICQKQVKYLGYLLREGQRWLTEARKETVMGQPVPKTPRQLREFLGTAGFCRLWIPGFAEMAAPLYPLTKPGTLFSWGPDQQKAYQEIKQALLTAPALGLPDLTKPFELFVDEKQGYAKGVLTQKLGPWRRPVAYLSKKLDPVAAGWPPCLRMVAAIAVLTKDAGKLTMGQPLVILAPHAVEALVKQPPDRWLSNARMTHYQAMLLDTDRVQFGPVVALNPATLLPLPEEGAPHDCLEILAETHGTRPDLTDQPIPDADHTWYTDGSSFLQEGQRKAGAAVTTETEVIWAGALPAGTSAQRAELIALTQALKMAEGKRLNVYTDSRYAFATAHIHGEIYRRRGWLTSEGREIKNKSEILALLKALFLPKRLSIIHCLGHQKGDSAEARGNRLADQAAREAAIKTPPDTSTLLAGKRTADGSEFEKRTADGSEFESPKKKAKVE

SEQ ID NO: 2222 - protein, 2094 aa, synthetic construct
MPAAKRVKLDGGDKKYSIGLDIGTNSVGWAVITDEYKVPSKKFKVLGNTDRHSIKKNLIGALLFDSGETAEATRLKRTARRRYTRRKNRICYLQEIFSNEMAKVDDSFFHRLEESFLVEEDKKHERHPIFGNIVDEVAYHEKYPTIYHLRKKLVDSTDKADLRLIYLALAHMIKFRGHFLIEGDLNPDNSDVDKLFIQLVQTYNQLFEENPINASGVDAKAILSARLSKSRRLENLIAQLPGEKKNGLFGNLIALSLGLTPNFKSNFDLAEDAKLQLSKDTYDDDLDNLLAQIGDQYADLFLAAKNLSDAILLSDILRVNTEITKAPLSASMIKRYDEHHQDLTLLKALVRQQLPEKYKEIFFDQSKNGYAGYIDGGASQEEFYKFIKPILEKMDGTEELLVKLNREDLLRKQRTFDNGSIPHQIHLGELHAILRRQEDFYPFLKDNREKIEKILTFRIPYYVGPLARGNSRFAWMTRKSEETITPWNFEEVVDKGASAQSFIERMTNFDKNLPNEKVLPKHSLLYEYFTVYNELTKVKYVTEGMRKPAFLSGEQKKAIVDLLFKTNRKVTVKQLKEDYFKKIECFDSVEISGVEDRFNASLGTYHDLLKIIKDKDFLDNEENEDILEDIVLTLTLFEDREMIEERLKTYAHLFDDKVMKQLKRRRYTGWGRLSRKLINGIRDKQSGKTILDFLKSDGFANRNFMQLIHDDSLTFKEDIQKAQVSGQGDSLHEHIANLAGSPAIKKGILQTVKVVDELVKVMGRHKPENIVIEMARENQTTQKGQKNSRERMKRIEEGIKELGSQILKEHPVENTQLQNEKLYLYYLQNGRDMYVDQELDINRLSDYDVDHIVPQSFLKDDSIDNKVLTRSDKARGKSDNVPSEEVVKKMKNYWRQLLNAKLITQRKFDNLTKAERGGLSELDKAGFIKRQLVETRQITKHVAQILDSRMNTKYDENDKLIREVKVITLKSKLVSDFRKDFQFYKVREINNYHHAHDAYLNAVVGTALIKKYPKLESEFVYGDYKVYDVRKMIAKSEQEIGKATAKYFFYSNIMNFFKTEITLANGEIRKRPLIETNGETGEIVWDKGRDFATVRKVLSMPQVNIVKKTEVQTGGFSKESILPKRNSDKLIARKKDWDPKKYGGFDSPTVAYSVLVVAKVEKGKSKKLKSVKELLGITIMERSSFEKNPIDFLEAKGYKEVKKDLIIKLPKYSLFELENGRKRMLASAGELQKGNELALPSKYVNFLYLASHYEKLKGSPEDNEQKQLFVEQHKHYLDEIIEQISEFSKRVILADANLDKVLSAYNKHRDKPIREQAENIIHLFTLTNLGAPAAFKYFDTTIDRKRYTSTKEVLDATLIHQSITGLYETRIDLSQLGGDGGGSSGGSPAPGGTLGIEDEYRLHETSTEPDVSLGSTWLSDFPQAWAETGGMGLAVRQAPLIIPLKATSTPVSIQQYPMSHEARLGIKPHIQRLLDQGILVPCQSPWNTPLLPVKKPGTNDYRPVQDLREVNKRVEDIHPTVPNPYNLLSGLPPSHQWYTVLDLKDAFFCLRLHPTSQPLFAFEWRDPGMGISGQLTWTRLPQGFKNSPTLFNEALHRDLADFRIQHPDLILLQYVDDILLAATSELDCQQGTRALLQTLGDLGYRASAKKAQICQKQVKYLGYLLREGQRWLTEARKETVMGQPVPKTPRQLREFLGTAGFCRLWIPGFAEMAAPLYPLTKPGTLFSWGPDQQKAYQEIKQALLTAPALGLPDLTKPFELFVDEKQGYAKGVLTQKLGPWRRPVAYLSKKLDPVAAGWPPCLRMVAAIAVLTKDAGKLTMGQPLVILAPHAVEALVKQPPDRWLSNARMTHYQAMLLDTDRVQFGPVVALNPATLLPLPEEGAPHDCLEILAETHGTRPDLTDQPIPDADHTWYTDGSSFLQEGQRKAGAAVTTETEVIWAGALPAGTSAQRAELIALTQALKMAEGKRLNVYTDSRYAFATAHIHGEIYRRRGWLTSEGREIKNKSEILALLKALFLPKRLSIIHCLGHQKGDSAEARGNRLADQAAREAAIKTPPDTSTLLAGKRTADGSEFEKRTADGSEFESPKKKAKVE

SEQ ID NO: 2223 - protein, 2096 aa, synthetic construct
MPAAKRVKLDGGDKKYSIGLDIGTNSVGWAVITDEYKVPSKKFKVLGNTDRHSIKKNLIGALLFDSGETAEATRLKRTARRRYTRRKNRICYLQEIFSNEMAKVDDSFFHRLEESFLVEEDKKHERHPIFGNIVDEVAYHEKYPTIYHLRKKLVDSTDKADLRLIYLALAHMIKFRGHFLIEGDLNPDNSDVDKLFIQLVQTYNQLFEENPINASGVDAKAILSARLSKSRRLENLIAQLPGEKKNGLFGNLIALSLGLTPNFKSNFDLAEDAKLQLSKDTYDDDLDNLLAQIGDQYADLFLAAKNLSDAILLSDILRVNTEITKAPLSASMIKRYDEHHQDLTLLKALVRQQLPEKYKEIFFDQSKNGYAGYIDGGASQEEFYKFIKPILEKMDGTEELLVKLNREDLLRKQRTFDNGSIPHQIHLGELHAILRRQEDFYPFLKDNREKIEKILTFRIPYYVGPLARGNSRFAWMTRKSEETITPWNFEEVVDKGASAQSFIERMTNFDKNLPNEKVLPKHSLLYEYFTVYNELTKVKYVTEGMRKPAFLSGEQKKAIVDLLFKTNRKVTVKQLKEDYFKKIECFDSVEISGVEDRFNASLGTYHDLLKIIKDKDFLDNEENEDILEDIVLTLTLFEDREMIEERLKTYAHLFDDKVMKQLKRRRYTGWGRLSRKLINGIRDKQSGKTILDFLKSDGFANRNFMQLIHDDSLTFKEDIQKAQVSGQGDSLHEHIANLAGSPAIKKGILQTVKVVDELVKVMGRHKPENIVIEMARENQTTQKGQKNSRERMKRIEEGIKELGSQILKEHPVENTQLQNEKLYLYYLQNGRDMYVDQELDINRLSDYDVDHIVPQSFLKDDSIDNKVLTRSDKARGKSDNVPSEEVVKKMKNYWRQLLNAKLITQRKFDNLTKAERGGLSELDKAGFIKRQLVETRQITKHVAQILDSRMNTKYDENDKLIREVKVITLKSKLVSDFRKDFQFYKVREINNYHHAHDAYLNAVVGTALIKKYPKLESEFVYGDYKVYDVRKMIAKSEQEIGKATAKYFFYSNIMNFFKTEITLANGEIRKRPLIETNGETGEIVWDKGRDFATVRKVLSMPQVNIVKKTEVQTGGFSKESILPKRNSDKLIARKKDWDPKKYGGFDSPTVAYSVLVVAKVEKGKSKKLKSVKELLGITIMERSSFEKNPIDFLEAKGYKEVKKDLIIKLPKYSLFELENGRKRMLASAGELQKGNELALPSKYVNFLYLASHYEKLKGSPEDNEQKQLFVEQHKHYLDEIIEQISEFSKRVILADANLDKVLSAYNKHRDKPIREQAENIIHLFTLTNLGAPAAFKYFDTTIDRKRYTSTKEVLDATLIHQSITGLYETRIDLSQLGGDGGEAAAKPAPGGGGGTLNIEDEYRLHETSKEPDVSLGSTWLSDFPQAWAETGGMGLAVRQAPLIIPLKATSTPVSIKQYPMSQEARLGIKPHIQRLLDQGILVPCQSPWNTPLLPVKKPGTNDYRPVQDLREVNKRVEDIHPTVPNPYNLLSGLPPSHQWYTVLDLKDAFFCLRLHPTSQPLFAFEWRDPEMGISGQLTWTRLPQGFKNSPTLFDEALHRDLAGFRIQHPDLILLQYVDDLLLAATSELDCQQGTRALLQTLGDLGYRASAKKAQICQKQVKYLGYLLKEGQRWLTEARKETVMGQPIPKTPRQLREFLGTAGFCRLWIPGFAEMAAPLYPLTKTGTLFNWGPDQQKAFQEIKQALLTAPALGLPDLTKPFELFVDEKQGYAKGVLTQKLGPWRRPVAYLSKKLDPVAAGWPPCLRMVAAIAVLTKDAGKLTMGQPLVILAPHAVEALVKQPPDRWLSNARMTHYQALLLDTDRVQFGPVVALNPATLLPLPEEGLQHDCLDILAEAHGTRSDLMDQPLPDADHTWYTDGSSFLQEGQRKAGAAVTTETEVIWARALPAGTSAQRAELIALTQALKMAEGKKLNVYTDSRYAFATAHIHGEIYRRRGLLTSEGKEIKNKDEILALLKALFLPKRLSIIHCPGHQKGNSAEARGNRMADQAAREVATRETPETSTLLAGKRTADGSEFEKRTADGSEFESPKKKAKVE

SEQ ID NO: 2224 - protein, 2115 aa, synthetic construct
MPAAKRVKLDGGDKKYSIGLDIGTNSVGWAVITDEYKVPSKKFKVLGNTDRHSIKKNLIGALLFDSGETAEATRLKRTARRRYTRRKNRICYLQEIFSNEMAKVDDSFFHRLEESFLVEEDKKHERHPIFGNIVDEVAYHEKYPTIYHLRKKLVDSTDKADLRLIYLALAHMIKFRGHFLIEGDLNPDNSDVDKLFIQLVQTYNQLFEENPINASGVDAKAILSARLSKSRRLENLIAQLPGEKKNGLFGNLIALSLGLTPNFKSNFDLAEDAKLQLSKDTYDDDLDNLLAQIGDQYADLFLAAKNLSDAILLSDILRVNTEITKAPLSASMIKRYDEHHQDLTLLKALVRQQLPEKYKEIFFDQSKNGYAGYIDGGASQEEFYKFIKPILEKMDGTEELLVKLNREDLLRKQRTFDNGSIPHQIHLGELHAILRRQEDFYPFLKDNREKIEKILTFRIPYYVGPLARGNSRFAWMTRKSEETITPWNFEEVVDKGASAQSFIERMTNFDKNLPNEKVLPKHSLLYEYFTVYNELTKVKYVTEGMRKPAFLSGEQKKAIVDLLFKTNRKVTVKQLKEDYFKKIECFDSVEISGVEDRFNASLGTYHDLLKIIKDKDFLDNEENEDILEDIVLTLTLFEDREMIEERLKTYAHLFDDKVMKQLKRRRYTGWGRLSRKLINGIRDKQSGKTILDFLKSDGFANRNFMQLIHDDSLTFKEDIQKAQVSGQGDSLHEHIANLAGSPAIKKGILQTVKVVDELVKVMGRHKPENIVIEMARENQTTQKGQKNSRERMKRIEEGIKELGSQILKEHPVENTQLQNEKLYLYYLQNGRDMYVDQELDINRLSDYDVDHIVPQSFLKDDSIDNKVLTRSDKARGKSDNVPSEEVVKKMKNYWRQLLNAKLITQRKFDNLTKAERGGLSELDKAGFIKRQLVETRQITKHVAQILDSRMNTKYDENDKLIREVKVITLKSKLVSDFRKDFQFYKVREINNYHHAHDAYLNAVVGTALIKKYPKLESEFVYGDYKVYDVRKMIAKSEQEIGKATAKYFFYSNIMNFFKTEITLANGEIRKRPLIETNGETGEIVWDKGRDFATVRKVLSMPQVNIVKKTEVQTGGFSKESILPKRNSDKLIARKKDWDPKKYGGFDSPTVAYSVLVVAKVEKGKSKKLKSVKELLGITIMERSSFEKNPIDFLEAKGYKEVKKDLIIKLPKYSLFELENGRKRMLASAGELQKGNELALPSKYVNFLYLASHYEKLKGSPEDNEQKQLFVEQHKHYLDEIIEQISEFSKRVILADANLDKVLSAYNKHRDKPIREQAENIIHLFTLTNLGAPAAFKYFDTTIDRKRYTSTKEVLDATLIHQSITGLYETRIDLSQLGGDGGGGGGSGGGGSGGGGSGGGGSGGGGSGGGGSGGTLNIEDEYRLHETSKEPDVSLGSTWLSDFPQAWAETGGMGLAVRQAPLIIPLKATSTPVSIKQYPMSQEARLGIKPHIQRLLDQGILVPCQSPWNTPLLPVKKPGTNDYRPVQDLREVNKRVEDIHPTVPNPYNLLSGLPPSHQWYTVLDLKDAFFCLRLHPTSQPLFAFEWRDPEMGISGQLTWTRLPQGFKNSPTLFNEALHRDLAGFRIQHPDLILLQYVDDLLLAATSELDCQQGTRALLQTLGDLGYRASAKKAQICQKQVKYLGYLLKEGQRWLTEARKETVMGQPIPKTPRQLREFLGTAGFCRLWIPGFAEMAAPLYPLTKPGTLFNWGPDQQKAFQEIKQALLTAPALGLPDLTKPFELFVDEKQGYAKGVLTQKLGPWRRPVAYLSKKLDPVAAGWPPCLRMVAAIAVLTKDAGKLTMGQPLVILAPHAVEALVKQPPDRWLSNARMTHYQALLLDTDRVQFGPVVALNPATLLPLPEEGLQHDCLDILAEAHGTRSDLMDQPLPDADHTWYTDGSSFLQEGQRKAGAAVTTETEVIWARALPAGTSAQRAELIALTQALKMAEGKKLNVYTDSRYAFATAHIHGEIYRRRGWLTSEGKEIKNKDEILALLKALFLPKRLSIIHCPGHQKGNSAEARGNRMADQAAREVATRETPETSTLLAGKRTADGSEFEKRTADGSEFESPKKKAKVE

SEQ ID NO: 2225 - protein, 2096 aa, synthetic construct
MPAAKRVKLDGGDKKYSIGLDIGTNSVGWAVITDEYKVPSKKFKVLGNTDRHSIKKNLIGALLFDSGETAEATRLKRTARRRYTRRKNRICYLQEIFSNEMAKVDDSFFHRLEESFLVEEDKKHERHPIFGNIVDEVAYHEKYPTIYHLRKKLVDSTDKADLRLIYLALAHMIKFRGHFLIEGDLNPDNSDVDKLFIQLVQTYNQLFEENPINASGVDAKAILSARLSKSRRLENLIAQLPGEKKNGLFGNLIALSLGLTPNFKSNFDLAEDAKLQLSKDTYDDDLDNLLAQIGDQYADLFLAAKNLSDAILLSDILRVNTEITKAPLSASMIKRYDEHHQDLTLLKALVRQQLPEKYKEIFFDQSKNGYAGYIDGGASQEEFYKFIKPILEKMDGTEELLVKLNREDLLRKQRTFDNGSIPHQIHLGELHAILRRQEDFYPFLKDNREKIEKILTFRIPYYVGPLARGNSRFAWMTRKSEETITPWNFEEVVDKGASAQSFIERMTNFDKNLPNEKVLPKHSLLYEYFTVYNELTKVKYVTEGMRKPAFLSGEQKKAIVDLLFKTNRKVTVKQLKEDYFKKIECFDSVEISGVEDRFNASLGTYHDLLKIIKDKDFLDNEENEDILEDIVLTLTLFEDREMIEERLKTYAHLFDDKVMKQLKRRRYTGWGRLSRKLINGIRDKQSGKTILDFLKSDGFANRNFMQLIHDDSLTFKEDIQKAQVSGQGDSLHEHIANLAGSPAIKKGILQTVKVVDELVKVMGRHKPENIVIEMARENQTTQKGQKNSRERMKRIEEGIKELGSQILKEHPVENTQLQNEKLYLYYLQNGRDMYVDQELDINRLSDYDVDHIVPQSFLKDDSIDNKVLTRSDKARGKSDNVPSEEVVKKMKNYWRQLLNAKLITQRKFDNLTKAERGGLSELDKAGFIKRQLVETRQITKHVAQILDSRMNTKYDENDKLIREVKVITLKSKLVSDFRKDFQFYKVREINNYHHAHDAYLNAVVGTALIKKYPKLESEFVYGDYKVYDVRKMIAKSEQEIGKATAKYFFYSNIMNFFKTEITLANGEIRKRPLIETNGETGEIVWDKGRDFATVRKVLSMPQVNIVKKTEVQTGGFSKESILPKRNSDKLIARKKDWDPKKYGGFDSPTVAYSVLVVAKVEKGKSKKLKSVKELLGITIMERSSFEKNPIDFLEAKGYKEVKKDLIIKLPKYSLFELENGRKRMLASAGELQKGNELALPSKYVNFLYLASHYEKLKGSPEDNEQKQLFVEQHKHYLDEIIEQISEFSKRVILADANLDKVLSAYNKHRDKPIREQAENIIHLFTLTNLGAPAAFKYFDTTIDRKRYTSTKEVLDATLIHQSITGLYETRIDLSQLGGDGGPAPGSSEAAAKGGTLNIEDEYRLHETSKEPDVSLGSTWLSDFPQAWAETGGMGLAVRQAPLIIPLKATSTPVSIKQYPMSQEARLGIKPHIQRLLDQGILVPCQSPWNTPLLPVKKPGTNDYRPVQDLREVNKRVEDIHPTVPNPYNLLSGLPPSHQWYTVLDLKDAFFCLRLHPTSQPLFAFEWRDPEMGISGQLTWTRLPQGFKNSPTLFNEALHRDLAGFRIQHPDLILLQYVDDLLLAATSELDCQQGTRALLQTLGDLGYRASAKKAQICQKQVKYLGYLLKEGQRWLTEARKETVMGQPIPKTPRQLREFLGTAGFCRLWIPGFAEMAAPLYPLTKPGTLFNWGPDQQKAFQEIKQALLTAPALGLPDLTKPFELFVDEKQGYAKGVLTQKLGPWRRPVAYLSKKLDPVAAGWPPCLRMVAAIAVLTKDAGKLTMGQPLVILAPHAVEALVKQPPDRWLSNARMTHYQALLLDTDRVQFGPVVALNPATLLPLPEEGLQHDCLDILAEAHGTRSDLMDQPLPDADHTWYTDGSSFLQEGQRKAGAAVTTETEVIWARALPAGTSAQRAELIALTQALKMAEGKKLNVYTDSRYAFATAHIHGEIYRRRGWLTSEGKEIKNKDEILALLKALFLPKRLSIIHCPGHQKGNSAEARGNRMADQAAREVATRETPETSTLLAGKRTADGSEFEKRTADGSEFESPKKKAKVE

SEQ ID NO: 2226 - protein, 2100 aa, synthetic construct
MPAAKRVKLDGGDKKYSIGLDIGTNSVGWAVITDEYKVPSKKFKVLGNTDRHSIKKNLIGALLFDSGETAEATRLKRTARRRYTRRKNRICYLQEIFSNEMAKVDDSFFHRLEESFLVEEDKKHERHPIFGNIVDEVAYHEKYPTIYHLRKKLVDSTDKADLRLIYLALAHMIKFRGHFLIEGDLNPDNSDVDKLFIQLVQTYNQLFEENPINASGVDAKAILSARLSKSRRLENLIAQLPGEKKNGLFGNLIALSLGLTPNFKSNFDLAEDAKLQLSKDTYDDDLDNLLAQIGDQYADLFLAAKNLSDAILLSDILRVNTEITKAPLSASMIKRYDEHHQDLTLLKALVRQQLPEKYKEIFFDQSKNGYAGYIDGGASQEEFYKFIKPILEKMDGTEELLVKLNREDLLRKQRTFDNGSIPHQIHLGELHAILRRQEDFYPFLKDNREKIEKILTFRIPYYVGPLARGNSRFAWMTRKSEETITPWNFEEVVDKGASAQSFIERMTNFDKNLPNEKVLPKHSLLYEYFTVYNELTKVKYVTEGMRKPAFLSGEQKKAIVDLLFKTNRKVTVKQLKEDYFKKIECFDSVEISGVEDRFNASLGTYHDLLKIIKDKDFLDNEENEDILEDIVLTLTLFEDREMIEERLKTYAHLFDDKVMKQLKRRRYTGWGRLSRKLINGIRDKQSGKTILDFLKSDGFANRNFMQLIHDDSLTFKEDIQKAQVSGQGDSLHEHIANLAGSPAIKKGILQTVKVVDELVKVMGRHKPENIVIEMARENQTTQKGQKNSRERMKRIEEGIKELGSQILKEHPVENTQLQNEKLYLYYLQNGRDMYVDQELDINRLSDYDVDHIVPQSFLKDDSIDNKVLTRSDKARGKSDNVPSEEVVKKMKNYWRQLLNAKLITQRKFDNLTKAERGGLSELDKAGFIKRQLVETRQITKHVAQILDSRMNTKYDENDKLIREVKVITLKSKLVSDFRKDFQFYKVREINNYHHAHDAYLNAVVGTALIKKYPKLESEFVYGDYKVYDVRKMIAKSEQEIGKATAKYFFYSNIMNFFKTEITLANGEIRKRPLIETNGETGEIVWDKGRDFATVRKVLSMPQVNIVKKTEVQTGGFSKESILPKRNSDKLIARKKDWDPKKYGGFDSPTVAYSVLVVAKVEKGKSKKLKSVKELLGITIMERSSFEKNPIDFLEAKGYKEVKKDLIIKLPKYSLFELENGRKRMLASAGELQKGNELALPSKYVNFLYLASHYEKLKGSPEDNEQKQLFVEQHKHYLDEIIEQISEFSKRVILADANLDKVLSAYNKHRDKPIREQAENIIHLFTLTNLGAPAAFKYFDTTIDRKRYTSTKEVLDATLIHQSITGLYETRIDLSQLGGDGGEAAAKGGGGSEAAAKGGTLNIEDEYRLHETSKEPDVSLGSTWLSDFPQAWAETGGMGLAVRQAPLIIPLKATSTPVSIKQYPMSQEARLGIKPHIQRLLDQGILVPCQSPWNTPLLPVKKPGTNDYRPVQDLREVNKRVEDIHPTVPNPYNLLSGLPPSHQWYTVLDLKDAFFCLRLHPTSQPLFAFEWRDPEMGISGQLTWTRLPQGFKNSPTLFNEALHRDLAGFRIQHPDLILLQYVDDLLLAATSELDCQQGTRALLQTLGDLGYRASAKKAQICQKQVKYLGYLLKEGQRWLTEARKETVMGQPIPKTPRQLREFLGTAGFCRLWIPGFAEMAAPLYPLTKPGTLFNWGPDQQKAFQEIKQALLTAPALGLPDLTKPFELFVDEKQGYAKGVLTQKLGPWRRPVAYLSKKLDPVAAGWPPCLRMVAAIAVLTKDAGKLTMGQPLVILAPHAVEALVKQPPDRWLSNARMTHYQALLLDTDRVQFGPVVALNPATLLPLPEEGLQHDCLDILAEAHGTRSDLMDQPLPDADHTWYTDGSSFLQEGQRKAGAAVTTETEVIWARALPAGTSAQRAELIALTQALKMAEGKKLNVYTDSRYAFATAHIHGEIYRRRGWLTSEGKEIKNKDEILALLKALFLPKRLSIIHCPGHQKGNSAEARGNRMADQAAREVATRETPETSTLLAGKRTADGSEFEKRTADGSEFESPKKKAKVE

SEQ ID NO: 2227 - protein, 2091 aa, synthetic construct
MPAAKRVKLDGGDKKYSIGLDIGTNSVGWAVITDEYKVPSKKFKVLGNTDRHSIKKNLIGALLFDSGETAEATRLKRTARRRYTRRKNRICYLQEIFSNEMAKVDDSFFHRLEESFLVEEDKKHERHPIFGNIVDEVAYHEKYPTIYHLRKKLVDSTDKADLRLIYLALAHMIKFRGHFLIEGDLNPDNSDVDKLFIQLVQTYNQLFEENPINASGVDAKAILSARLSKSRRLENLIAQLPGEKKNGLFGNLIALSLGLTPNFKSNFDLAEDAKLQLSKDTYDDDLDNLLAQIGDQYADLFLAAKNLSDAILLSDILRVNTEITKAPLSASMIKRYDEHHQDLTLLKALVRQQLPEKYKEIFFDQSKNGYAGYIDGGASQEEFYKFIKPILEKMDGTEELLVKLNREDLLRKQRTFDNGSIPHQIHLGELHAILRRQEDFYPFLKDNREKIEKILTFRIPYYVGPLARGNSRFAWMTRKSEETITPWNFEEVVDKGASAQSFIERMTNFDKNLPNEKVLPKHSLLYEYFTVYNELTKVKYVTEGMRKPAFLSGEQKKAIVDLLFKTNRKVTVKQLKEDYFKKIECFDSVEISGVEDRFNASLGTYHDLLKIIKDKDFLDNEENEDILEDIVLTLTLFEDREMIEERLKTYAHLFDDKVMKQLKRRRYTGWGRLSRKLINGIRDKQSGKTILDFLKSDGFANRNFMQLIHDDSLTFKEDIQKAQVSGQGDSLHEHIANLAGSPAIKKGILQTVKVVDELVKVMGRHKPENIVIEMARENQTTQKGQKNSRERMKRIEEGIKELGSQILKEHPVENTQLQNEKLYLYYLQNGRDMYVDQELDINRLSDYDVDHIVPQSFLKDDSIDNKVLTRSDKARGKSDNVPSEEVVKKMKNYWRQLLNAKLITQRKFDNLTKAERGGLSELDKAGFIKRQLVETRQITKHVAQILDSRMNTKYDENDKLIREVKVITLKSKLVSDFRKDFQFYKVREINNYHHAHDAYLNAVVGTALIKKYPKLESEFVYGDYKVYDVRKMIAKSEQEIGKATAKYFFYSNIMNFFKTEITLANGEIRKRPLIETNGETGEIVWDKGRDFATVRKVLSMPQVNIVKKTEVQTGGFSKESILPKRNSDKLIARKKDWDPKKYGGFDSPTVAYSVLVVAKVEKGKSKKLKSVKELLGITIMERSSFEKNPIDFLEAKGYKEVKKDLIIKLPKYSLFELENGRKRMLASAGELQKGNELALPSKYVNFLYLASHYEKLKGSPEDNEQKQLFVEQHKHYLDEIIEQISEFSKRVILADANLDKVLSAYNKHRDKPIREQAENIIHLFTLTNLGAPAAFKYFDTTIDRKRYTSTKEVLDATLIHQSITGLYETRIDLSQLGGDGGGSSGSSGGTLNIEDEYRLHETSKEPDVSLGSTWLSDFPQAWAETGGMGLAVRQAPLIIPLKATSTPVSIKQYPMSQEARLGIKPHIQRLLDQGILVPCQSPWNTPLLPVKKPGTNDYRPVQDLREVNKRVEDIHPTVPNPYNLLSGLPPSHQWYTVLDLKDAFFCLRLHPTSQPLFAFEWRDPEMGISGQLTWTRLPQGFKNSPTLFNEALHRDLAGFRIQHPDLILLQYVDDLLLAATSELDCQQGTRALLQTLGDLGYRASAKKAQICQKQVKYLGYLLKEGQRWLTEARKETVMGQPIPKTPRQLREFLGTAGFCRLWIPGFAEMAAPLYPLTKPGTLFNWGPDQQKAFQEIKQALLTAPALGLPDLTKPFELFVDEKQGYAKGVLTQKLGPWRRPVAYLSKKLDPVAAGWPPCLRMVAAIAVLTKDAGKLTMGQPLVILAPHAVEALVKQPPDRWLSNARMTHYQALLLDTDRVQFGPVVALNPATLLPLPEEGLQHDCLDILAEAHGTRSDLMDQPLPDADHTWYTDGSSFLQEGQRKAGAAVTTETEVIWARALPAGTSAQRAELIALTQALKMAEGKKLNVYTDSRYAFATAHIHGEIYRRRGWLTSEGKEIKNKDEILALLKALFLPKRLSIIHCPGHQKGNSAEARGNRMADQAAREVATRETPETSTLLAGKRTADGSEFEKRTADGSEFESPKKKAKVE

SEQ ID NO: 2228 - protein, 2097 aa, synthetic construct
MPAAKRVKLDGGDKKYSIGLDIGTNSVGWAVITDEYKVPSKKFKVLGNTDRHSIKKNLIGALLFDSGETAEATRLKRTARRRYTRRKNRICYLQEIFSNEMAKVDDSFFHRLEESFLVEEDKKHERHPIFGNIVDEVAYHEKYPTIYHLRKKLVDSTDKADLRLIYLALAHMIKFRGHFLIEGDLNPDNSDVDKLFIQLVQTYNQLFEENPINASGVDAKAILSARLSKSRRLENLIAQLPGEKKNGLFGNLIALSLGLTPNFKSNFDLAEDAKLQLSKDTYDDDLDNLLAQIGDQYADLFLAAKNLSDAILLSDILRVNTEITKAPLSASMIKRYDEHHQDLTLLKALVRQQLPEKYKEIFFDQSKNGYAGYIDGGASQEEFYKFIKPILEKMDGTEELLVKLNREDLLRKQRTFDNGSIPHQIHLGELHAILRRQEDFYPFLKDNREKIEKILTFRIPYYVGPLARGNSRFAWMTRKSEETITPWNFEEVVDKGASAQSFIERMTNFDKNLPNEKVLPKHSLLYEYFTVYNELTKVKYVTEGMRKPAFLSGEQKKAIVDLLFKTNRKVTVKQLKEDYFKKIECFDSVEISGVEDRFNASLGTYHDLLKIIKDKDFLDNEENEDILEDIVLTLTLFEDREMIEERLKTYAHLFDDKVMKQLKRRRYTGWGRLSRKLINGIRDKQSGKTILDFLKSDGFANRNFMQLIHDDSLTFKEDIQKAQVSGQGDSLHEHIANLAGSPAIKKGILQTVKVVDELVKVMGRHKPENIVIEMARENQTTQKGQKNSRERMKRIEEGIKELGSQILKEHPVENTQLQNEKLYLYYLQNGRDMYVDQELDINRLSDYDVDHIVPQSFLKDDSIDNKVLTRSDKARGKSDNVPSEEVVKKMKNYWRQLLNAKLITQRKFDNLTKAERGGLSELDKAGFIKRQLVETRQITKHVAQILDSRMNTKYDENDKLIREVKVITLKSKLVSDFRKDFQFYKVREINNYHHAHDAYLNAVVGTALIKKYPKLESEFVYGDYKVYDVRKMIAKSEQEIGKATAKYFFYSNIMNFFKTEITLANGEIRKRPLIETNGETGEIVWDKGRDFATVRKVLSMPQVNIVKKTEVQTGGFSKESILPKRNSDKLIARKKDWDPKKYGGFDSPTVAYSVLVVAKVEKGKSKKLKSVKELLGITIMERSSFEKNPIDFLEAKGYKEVKKDLIIKLPKYSLFELENGRKRMLASAGELQKGNELALPSKYVNFLYLASHYEKLKGSPEDNEQKQLFVEQHKHYLDEIIEQISEFSKRVILADANLDKVLSAYNKHRDKPIREQAENIIHLFTLTNLGAPAAFKYFDTTIDRKRYTSTKEVLDATLIHQSITGLYETRIDLSQLGGDGGGSAGSAAGSGEFGGTLNIEDEYRLHETSKEPDVSLGSTWLSDFPQAWAETGGMGLAVRQAPLIIPLKATSTPVSIKQYPMSQEARLGIKPHIQRLLDQGILVPCQSPWNTPLLPVKKPGTNDYRPVQDLREVNKRVEDIHPTVPNPYNLLSGLPPSHQWYTVLDLKDAFFCLRLHPTSQPLFAFEWRDPEMGISGQLTWTRLPQGFKNSPTLFNEALHRDLAGFRIQHPDLILLQYVDDLLLAATSELDCQQGTRALLQTLGDLGYRASAKKAQICQKQVKYLGYLLKEGQRWLTEARKETVMGQPIPKTPRQLREFLGTAGFCRLWIPGFAEMAAPLYPLTKPGTLFNWGPDQQKAFQEIKQALLTAPALGLPDLTKPFELFVDEKQGYAKGVLTQKLGPWRRPVAYLSKKLDPVAAGWPPCLRMVAAIAVLTKDAGKLTMGQPLVILAPHAVEALVKQPPDRWLSNARMTHYQALLLDTDRVQFGPVVALNPATLLPLPEEGLQHDCLDILAEAHGTRSDLMDQPLPDADHTWYTDGSSFLQEGQRKAGAAVTTETEVIWARALPAGTSAQRAELIALTQALKMAEGKKLNVYTDSRYAFATAHIHGEIYRRRGWLTSEGKEIKNKDEILALLKALFLPKRLSIIHCPGHQKGNSAEARGNRMADQAAREVATRETPETSTLLAGKRTADGSEFEKRTADGSEFESPKKKAKVE

SEQ ID NO: 2229 - protein, 2088 aa, synthetic construct
MPAAKRVKLDGGDKKYSIGLDIGTNSVGWAVITDEYKVPSKKFKVLGNTDRHSIKKNLIGALLFDSGETAEATRLKRTARRRYTRRKNRICYLQEIFSNEMAKVDDSFFHRLEESFLVEEDKKHERHPIFGNIVDEVAYHEKYPTIYHLRKKLVDSTDKADLRLIYLALAHMIKFRGHFLIEGDLNPDNSDVDKLFIQLVQTYNQLFEENPINASGVDAKAILSARLSKSRRLENLIAQLPGEKKNGLFGNLIALSLGLTPNFKSNFDLAEDAKLQLSKDTYDDDLDNLLAQIGDQYADLFLAAKNLSDAILLSDILRVNTEITKAPLSASMIKRYDEHHQDLTLLKALVRQQLPEKYKEIFFDQSKNGYAGYIDGGASQEEFYKFIKPILEKMDGTEELLVKLNREDLLRKQRTFDNGSIPHQIHLGELHAILRRQEDFYPFLKDNREKIEKILTFRIPYYVGPLARGNSRFAWMTRKSEETITPWNFEEVVDKGASAQSFIERMTNFDKNLPNEKVLPKHSLLYEYFTVYNELTKVKYVTEGMRKPAFLSGEQKKAIVDLLFKTNRKVTVKQLKEDYFKKIECFDSVEISGVEDRFNASLGTYHDLLKIIKDKDFLDNEENEDILEDIVLTLTLFEDREMIEERLKTYAHLFDDKVMKQLKRRRYTGWGRLSRKLINGIRDKQSGKTILDFLKSDGFANRNFMQLIHDDSLTFKEDIQKAQVSGQGDSLHEHIANLAGSPAIKKGILQTVKVVDELVKVMGRHKPENIVIEMARENQTTQKGQKNSRERMKRIEEGIKELGSQILKEHPVENTQLQNEKLYLYYLQNGRDMYVDQELDINRLSDYDVDHIVPQSFLKDDSIDNKVLTRSDKARGKSDNVPSEEVVKKMKNYWRQLLNAKLITQRKFDNLTKAERGGLSELDKAGFIKRQLVETRQITKHVAQILDSRMNTKYDENDKLIREVKVITLKSKLVSDFRKDFQFYKVREINNYHHAHDAYLNAVVGTALIKKYPKLESEFVYGDYKVYDVRKMIAKSEQEIGKATAKYFFYSNIMNFFKTEITLANGEIRKRPLIETNGETGEIVWDKGRDFATVRKVLSMPQVNIVKKTEVQTGGFSKESILPKRNSDKLIARKKDWDPKKYGGFDSPTVAYSVLVVAKVEKGKSKKLKSVKELLGITIMERSSFEKNPIDFLEAKGYKEVKKDLIIKLPKYSLFELENGRKRMLASAGELQKGNELALPSKYVNFLYLASHYEKLKGSPEDNEQKQLFVEQHKHYLDEIIEQISEFSKRVILADANLDKVLSAYNKHRDKPIREQAENIIHLFTLTNLGAPAAFKYFDTTIDRKRYTSTKEVLDATLIHQSITGLYETRIDLSQLGGDGGGGGGGTLNIEDEYRLHETSKEPDVSLGSTWLSDFPQAWAETGGMGLAVRQAPLIIPLKATSTPVSIKQYPMSQEARLGIKPHIQRLLDQGILVPCQSPWNTPLLPVKKPGTNDYRPVQDLREVNKRVEDIHPTVPNPYNLLSGLPPSHQWYTVLDLKDAFFCLRLHPTSQPLFAFEWRDPEMGISGQLTWTRLPQGFKNSPTLFNEALHRDLAGFRIQHPDLILLQYVDDLLLAATSELDCQQGTRALLQTLGDLGYRASAKKAQICQKQVKYLGYLLKEGQRWLTEARKETVMGQPIPKTPRQLREFLGTAGFCRLWIPGFAEMAAPLYPLTKPGTLFNWGPDQQKAFQEIKQALLTAPALGLPDLTKPFELFVDEKQGYAKGVLTQKLGPWRRPVAYLSKKLDPVAAGWPPCLRMVAAIAVLTKDAGKLTMGQPLVILAPHAVEALVKQPPDRWLSNARMTHYQALLLDTDRVQFGPVVALNPATLLPLPEEGLQHDCLDILAEAHGTRSDLMDQPLPDADHTWYTDGSSFLQEGQRKAGAAVTTETEVIWARALPAGTSAQRAELIALTQALKMAEGKKLNVYTDSRYAFATAHIHGEIYRRRGWLTSEGKEIKNKDEILALLKALFLPKRLSIIHCPGHQKGNSAEARGNRMADQAAREVATRETPETSTLLAGKRTADGSEFEKRTADGSEFESPKKKAKVE

SEQ ID NO: 2230 - protein, 2096 aa, synthetic construct
MPAAKRVKLDGGDKKYSIGLDIGTNSVGWAVITDEYKVPSKKFKVLGNTDRHSIKKNLIGALLFDSGETAEATRLKRTARRRYTRRKNRICYLQEIFSNEMAKVDDSFFHRLEESFLVEEDKKHERHPIFGNIVDEVAYHEKYPTIYHLRKKLVDSTDKADLRLIYLALAHMIKFRGHFLIEGDLNPDNSDVDKLFIQLVQTYNQLFEENPINASGVDAKAILSARLSKSRRLENLIAQLPGEKKNGLFGNLIALSLGLTPNFKSNFDLAEDAKLQLSKDTYDDDLDNLLAQIGDQYADLFLAAKNLSDAILLSDILRVNTEITKAPLSASMIKRYDEHHQDLTLLKALVRQQLPEKYKEIFFDQSKNGYAGYIDGGASQEEFYKFIKPILEKMDGTEELLVKLNREDLLRKQRTFDNGSIPHQIHLGELHAILRRQEDFYPFLKDNREKIEKILTFRIPYYVGPLARGNSRFAWMTRKSEETITPWNFEEVVDKGASAQSFIERMTNFDKNLPNEKVLPKHSLLYEYFTVYNELTKVKYVTEGMRKPAFLSGEQKKAIVDLLFKTNRKVTVKQLKEDYFKKIECFDSVEISGVEDRFNASLGTYHDLLKIIKDKDFLDNEENEDILEDIVLTLTLFEDREMIEERLKTYAHLFDDKVMKQLKRRRYTGWGRLSRKLINGIRDKQSGKTILDFLKSDGFANRNFMQLIHDDSLTFKEDIQKAQVSGQGDSLHEHIANLAGSPAIKKGILQTVKVVDELVKVMGRHKPENIVIEMARENQTTQKGQKNSRERMKRIEEGIKELGSQILKEHPVENTQLQNEKLYLYYLQNGRDMYVDQELDINRLSDYDVDHIVPQSFLKDDSIDNKVLTRSDKARGKSDNVPSEEVVKKMKNYWRQLLNAKLITQRKFDNLTKAERGGLSELDKAGFIKRQLVETRQITKHVAQILDSRMNTKYDENDKLIREVKVITLKSKLVSDFRKDFQFYKVREINNYHHAHDAYLNAVVGTALIKKYPKLESEFVYGDYKVYDVRKMIAKSEQEIGKATAKYFFYSNIMNFFKTEITLANGEIRKRPLIETNGETGEIVWDKGRDFATVRKVLSMPQVNIVKKTEVQTGGFSKESILPKRNSDKLIARKKDWDPKKYGGFDSPTVAYSVLVVAKVEKGKSKKLKSVKELLGITIMERSSFEKNPIDFLEAKGYKEVKKDLIIKLPKYSLFELENGRKRMLASAGELQKGNELALPSKYVNFLYLASHYEKLKGSPEDNEQKQLFVEQHKHYLDEIIEQISEFSKRVILADANLDKVLSAYNKHRDKPIREQAENIIHLFTLTNLGAPAAFKYFDTTIDRKRYTSTKEVLDATLIHQSITGLYETRIDLSQLGGDGGEAAAKPAPGGGGGTLNIEDEYRLHETSKEPDVSLGSTWLSDFPQAWAETGGMGLAVRQAPLIIPLKATSTPVSIKQYPMSQEARLGIKPHIQRLLDQGILVPCQSPWNTPLLPVKKPGTNDYRPVQDLREVNKRVEDIHPTVPNPYNLLSGLPPSHQWYTVLDLKDAFFCLRLHPTSQPLFAFEWRDPEMGISGQLTWTRLPQGFKNSPTLFNEALHRDLAGFRIQHPDLILLQYVDDLLLAATSELDCQQGTRALLQTLGDLGYRASAKKAQICQKQVKYLGYLLKEGQRWLTEARKETVMGQPIPKTPRQLREFLGTAGFCRLWIPGFAEMAAPLYPLTKPGTLFNWGPDQQKAFQEIKQALLTAPALGLPDLTKPFELFVDEKQGYAKGVLTQKLGPWRRPVAYLSKKLDPVAAGWPPCLRMVAAIAVLTKDAGKLTMGQPLVILAPHAVEALVKQPPDRWLSNARMTHYQALLLDTDRVQFGPVVALNPATLLPLPEEGLQHDCLDILAEAHGTRSDLMDQPLPDADHTWYTDGSSFLQEGQRKAGAAVTTETEVIWARALPAGTSAQRAELIALTQALKMAEGKKLNVYTDSRYAFATAHIHGEIYRRRGWLTSEGKEIKNKDEILALLKALFLPKRLSIIHCPGHQKGNSAEARGNRMADQAAREVATRETPETSTLLAGKRTADGSEFEKRTADGSEFESPKKKAKVE

SEQ ID NO: 2231 - protein, 2094 aa, synthetic construct
MPAAKRVKLDGGDKKYSIGLDIGTNSVGWAVITDEYKVPSKKFKVLGNTDRHSIKKNLIGALLFDSGETAEATRLKRTARRRYTRRKNRICYLQEIFSNEMAKVDDSFFHRLEESFLVEEDKKHERHPIFGNIVDEVAYHEKYPTIYHLRKKLVDSTDKADLRLIYLALAHMIKFRGHFLIEGDLNPDNSDVDKLFIQLVQTYNQLFEENPINASGVDAKAILSARLSKSRRLENLIAQLPGEKKNGLFGNLIALSLGLTPNFKSNFDLAEDAKLQLSKDTYDDDLDNLLAQIGDQYADLFLAAKNLSDAILLSDILRVNTEITKAPLSASMIKRYDEHHQDLTLLKALVRQQLPEKYKEIFFDQSKNGYAGYIDGGASQEEFYKFIKPILEKMDGTEELLVKLNREDLLRKQRTFDNGSIPHQIHLGELHAILRRQEDFYPFLKDNREKIEKILTFRIPYYVGPLARGNSRFAWMTRKSEETITPWNFEEVVDKGASAQSFIERMTNFDKNLPNEKVLPKHSLLYEYFTVYNELTKVKYVTEGMRKPAFLSGEQKKAIVDLLFKTNRKVTVKQLKEDYFKKIECFDSVEISGVEDRFNASLGTYHDLLKIIKDKDFLDNEENEDILEDIVLTLTLFEDREMIEERLKTYAHLFDDKVMKQLKRRRYTGWGRLSRKLINGIRDKQSGKTILDFLKSDGFANRNFMQLIHDDSLTFKEDIQKAQVSGQGDSLHEHIANLAGSPAIKKGILQTVKVVDELVKVMGRHKPENIVIEMARENQTTQKGQKNSRERMKRIEEGIKELGSQILKEHPVENTQLQNEKLYLYYLQNGRDMYVDQELDINRLSDYDVDHIVPQSFLKDDSIDNKVLTRSDKARGKSDNVPSEEVVKKMKNYWRQLLNAKLITQRKFDNLTKAERGGLSELDKAGFIKRQLVETRQITKHVAQILDSRMNTKYDENDKLIREVKVITLKSKLVSDFRKDFQFYKVREINNYHHAHDAYLNAVVGTALIKKYPKLESEFVYGDYKVYDVRKMIAKSEQEIGKATAKYFFYSNIMNFFKTEITLANGEIRKRPLIETNGETGEIVWDKGRDFATVRKVLSMPQVNIVKKTEVQTGGFSKESILPKRNSDKLIARKKDWDPKKYGGFDSPTVAYSVLVVAKVEKGKSKKLKSVKELLGITIMERSSFEKNPIDFLEAKGYKEVKKDLIIKLPKYSLFELENGRKRMLASAGELQKGNELALPSKYVNFLYLASHYEKLKGSPEDNEQKQLFVEQHKHYLDEIIEQISEFSKRVILADANLDKVLSAYNKHRDKPIREQAENIIHLFTLTNLGAPAAFKYFDTTIDRKRYTSTKEVLDATLIHQSITGLYETRIDLSQLGGDGGGGGGGSGSSGGTLNIEDEYRLHETSKEPDVSLGSTWLSDFPQAWAETGGMGLAVRQAPLIIPLKATSTPVSIKQYPMSQEARLGIKPHIQRLLDQGILVPCQSPWNTPLLPVKKPGTNDYRPVQDLREVNKRVEDIHPTVPNPYNLLSGLPPSHQWYTVLDLKDAFFCLRLHPTSQPLFAFEWRDPEMGISGQLTWTRLPQGFKNSPTLFNEALHRDLAGFRIQHPDLILLQYVDDLLLAATSELDCQQGTRALLQTLGDLGYRASAKKAQICQKQVKYLGYLLKEGQRWLTEARKETVMGQPIPKTPRQLREFLGTAGFCRLWIPGFAEMAAPLYPLTKPGTLFNWGPDQQKAFQEIKQALLTAPALGLPDLTKPFELFVDEKQGYAKGVLTQKLGPWRRPVAYLSKKLDPVAAGWPPCLRMVAAIAVLTKDAGKLTMGQPLVILAPHAVEALVKQPPDRWLSNARMTHYQALLLDTDRVQFGPVVALNPATLLPLPEEGLQHDCLDILAEAHGTRSDLMDQPLPDADHTWYTDGSSFLQEGQRKAGAAVTTETEVIWARALPAGTSAQRAELIALTQALKMAEGKKLNVYTDSRYAFATAHIHGEIYRRRGWLTSEGKEIKNKDEILALLKALFLPKRLSIIHCPGHQKGNSAEARGNRMADQAAREVATRETPETSTLLAGKRTADGSEFEKRTADGSEFESPKKKAKVE

SEQ ID NO: 2232 - protein, 2096 aa, synthetic construct
MPAAKRVKLDGGDKKYSIGLDIGTNSVGWAVITDEYKVPSKKFKVLGNTDRHSIKKNLIGALLFDSGETAEATRLKRTARRRYTRRKNRICYLQEIFSNEMAKVDDSFFHRLEESFLVEEDKKHERHPIFGNIVDEVAYHEKYPTIYHLRKKLVDSTDKADLRLIYLALAHMIKFRGHFLIEGDLNPDNSDVDKLFIQLVQTYNQLFEENPINASGVDAKAILSARLSKSRRLENLIAQLPGEKKNGLFGNLIALSLGLTPNFKSNFDLAEDAKLQLSKDTYDDDLDNLLAQIGDQYADLFLAAKNLSDAILLSDILRVNTEITKAPLSASMIKRYDEHHQDLTLLKALVRQQLPEKYKEIFFDQSKNGYAGYIDGGASQEEFYKFIKPILEKMDGTEELLVKLNREDLLRKQRTFDNGSIPHQIHLGELHAILRRQEDFYPFLKDNREKIEKILTFRIPYYVGPLARGNSRFAWMTRKSEETITPWNFEEVVDKGASAQSFIERMTNFDKNLPNEKVLPKHSLLYEYFTVYNELTKVKYVTEGMRKPAFLSGEQKKAIVDLLFKTNRKVTVKQLKEDYFKKIECFDSVEISGVEDRFNASLGTYHDLLKIIKDKDFLDNEENEDILEDIVLTLTLFEDREMIEERLKTYAHLFDDKVMKQLKRRRYTGWGRLSRKLINGIRDKQSGKTILDFLKSDGFANRNFMQLIHDDSLTFKEDIQKAQVSGQGDSLHEHIANLAGSPAIKKGILQTVKVVDELVKVMGRHKPENIVIEMARENQTTQKGQKNSRERMKRIEEGIKELGSQILKEHPVENTQLQNEKLYLYYLQNGRDMYVDQELDINRLSDYDVDHIVPQSFLKDDSIDNKVLTRSDKARGKSDNVPSEEVVKKMKNYWRQLLNAKLITQRKFDNLTKAERGGLSELDKAGFIKRQLVETRQITKHVAQILDSRMNTKYDENDKLIREVKVITLKSKLVSDFRKDFQFYKVREINNYHHAHDAYLNAVVGTALIKKYPKLESEFVYGDYKVYDVRKMIAKSEQEIGKATAKYFFYSNIMNFFKTEITLANGEIRKRPLIETNGETGEIVWDKGRDFATVRKVLSMPQVNIVKKTEVQTGGFSKESILPKRNSDKLIARKKDWDPKKYGGFDSPTVAYSVLVVAKVEKGKSKKLKSVKELLGITIMERSSFEKNPIDFLEAKGYKEVKKDLIIKLPKYSLFELENGRKRMLASAGELQKGNELALPSKYVNFLYLASHYEKLKGSPEDNEQKQLFVEQHKHYLDEIIEQISEFSKRVILADANLDKVLSAYNKHRDKPIREQAENIIHLFTLTNLGAPAAFKYFDTTIDRKRYTSTKEVLDATLIHQSITGLYETRIDLSQLGGDGGPAPEAAAKGGSGGTLNIEDEYRLHETSKEPDVSLGSTWLSDFPQAWAETGGMGLAVRQAPLIIPLKATSTPVSIKQYPMSQEARLGIKPHIQRLLDQGILVPCQSPWNTPLLPVKKPGTNDYRPVQDLREVNKRVEDIHPTVPNPYNLLSGLPPSHQWYTVLDLKDAFFCLRLHPTSQPLFAFEWRDPEMGISGQLTWTRLPQGFKNSPTLFNEALHRDLAGFRIQHPDLILLQYVDDLLLAATSELDCQQGTRALLQTLGDLGYRASAKKAQICQKQVKYLGYLLKEGQRWLTEARKETVMGQPIPKTPRQLREFLGTAGFCRLWIPGFAEMAAPLYPLTKPGTLFNWGPDQQKAFQEIKQALLTAPALGLPDLTKPFELFVDEKQGYAKGVLTQKLGPWRRPVAYLSKKLDPVAAGWPPCLRMVAAIAVLTKDAGKLTMGQPLVILAPHAVEALVKQPPDRWLSNARMTHYQALLLDTDRVQFGPVVALNPATLLPLPEEGLQHDCLDILAEAHGTRSDLMDQPLPDADHTWYTDGSSFLQEGQRKAGAAVTTETEVIWARALPAGTSAQRAELIALTQALKMAEGKKLNVYTDSRYAFATAHIHGEIYRRRGWLTSEGKEIKNKDEILALLKALFLPKRLSIIHCPGHQKGNSAEARGNRMADQAAREVATRETPETSTLLAGKRTADGSEFEKRTADGSEFESPKKKAKVE

SEQ ID NO: 2233 - protein, 2093 aa, synthetic construct
MPAAKRVKLDGGDKKYSIGLDIGTNSVGWAVITDEYKVPSKKFKVLGNTDRHSIKKNLIGALLFDSGETAEATRLKRTARRRYTRRKNRICYLQEIFSNEMAKVDDSFFHRLEESFLVEEDKKHERHPIFGNIVDEVAYHEKYPTIYHLRKKLVDSTDKADLRLIYLALAHMIKFRGHFLIEGDLNPDNSDVDKLFIQLVQTYNQLFEENPINASGVDAKAILSARLSKSRRLENLIAQLPGEKKNGLFGNLIALSLGLTPNFKSNFDLAEDAKLQLSKDTYDDDLDNLLAQIGDQYADLFLAAKNLSDAILLSDILRVNTEITKAPLSASMIKRYDEHHQDLTLLKALVRQQLPEKYKEIFFDQSKNGYAGYIDGGASQEEFYKFIKPILEKMDGTEELLVKLNREDLLRKQRTFDNGSIPHQIHLGELHAILRRQEDFYPFLKDNREKIEKILTFRIPYYVGPLARGNSRFAWMTRKSEETITPWNFEEVVDKGASAQSFIERMTNFDKNLPNEKVLPKHSLLYEYFTVYNELTKVKYVTEGMRKPAFLSGEQKKAIVDLLFKTNRKVTVKQLKEDYFKKIECFDSVEISGVEDRFNASLGTYHDLLKIIKDKDFLDNEENEDILEDIVLTLTLFEDREMIEERLKTYAHLFDDKVMKQLKRRRYTGWGRLSRKLINGIRDKQSGKTILDFLKSDGFANRNFMQLIHDDSLTFKEDIQKAQVSGQGDSLHEHIANLAGSPAIKKGILQTVKVVDELVKVMGRHKPENIVIEMARENQTTQKGQKNSRERMKRIEEGIKELGSQILKEHPVENTQLQNEKLYLYYLQNGRDMYVDQELDINRLSDYDVDHIVPQSFLKDDSIDNKVLTRSDKARGKSDNVPSEEVVKKMKNYWRQLLNAKLITQRKFDNLTKAERGGLSELDKAGFIKRQLVETRQITKHVAQILDSRMNTKYDENDKLIREVKVITLKSKLVSDFRKDFQFYKVREINNYHHAHDAYLNAVVGTALIKKYPKLESEFVYGDYKVYDVRKMIAKSEQEIGKATAKYFFYSNIMNFFKTEITLANGEIRKRPLIETNGETGEIVWDKGRDFATVRKVLSMPQVNIVKKTEVQTGGFSKESILPKRNSDKLIARKKDWDPKKYGGFDSPTVAYSVLVVAKVEKGKSKKLKSVKELLGITIMERSSFEKNPIDFLEAKGYKEVKKDLIIKLPKYSLFELENGRKRMLASAGELQKGNELALPSKYVNFLYLASHYEKLKGSPEDNEQKQLFVEQHKHYLDEIIEQISEFSKRVILADANLDKVLSAYNKHRDKPIREQAENIIHLFTLTNLGAPAAFKYFDTTIDRKRYTSTKEVLDATLIHQSITGLYETRIDLSQLGGDGGGSSEAAAKGGTLNIEDEYRLHETSKEPDVSLGSTWLSDFPQAWAETGGMGLAVRQAPLIIPLKATSTPVSIKQYPMSQEARLGIKPHIQRLLDQGILVPCQSPWNTPLLPVKKPGTNDYRPVQDLREVNKRVEDIHPTVPNPYNLLSGLPPSHQWYTVLDLKDAFFCLRLHPTSQPLFAFEWRDPEMGISGQLTWTRLPQGFKNSPTLFNEALHRDLAGFRIQHPDLILLQYVDDLLLAATSELDCQQGTRALLQTLGDLGYRASAKKAQICQKQVKYLGYLLKEGQRWLTEARKETVMGQPIPKTPRQLREFLGTAGFCRLWIPGFAEMAAPLYPLTKPGTLFNWGPDQQKAFQEIKQALLTAPALGLPDLTKPFELFVDEKQGYAKGVLTQKLGPWRRPVAYLSKKLDPVAAGWPPCLRMVAAIAVLTKDAGKLTMGQPLVILAPHAVEALVKQPPDRWLSNARMTHYQALLLDTDRVQFGPVVALNPATLLPLPEEGLQHDCLDILAEAHGTRSDLMDQPLPDADHTWYTDGSSFLQEGQRKAGAAVTTETEVIWARALPAGTSAQRAELIALTQALKMAEGKKLNVYTDSRYAFATAHIHGEIYRRRGWLTSEGKEIKNKDEILALLKALFLPKRLSIIHCPGHQKGNSAEARGNRMADQAAREVATRETPETSTLLAGKRTADGSEFEKRTADGSEFESPKKKAKVE

SEQ ID NO: 2234 - protein, 2094 aa, synthetic construct
MPAAKRVKLDGGDKKYSIGLDIGTNSVGWAVITDEYKVPSKKFKVLGNTDRHSIKKNLIGALLFDSGETAEATRLKRTARRRYTRRKNRICYLQEIFSNEMAKVDDSFFHRLEESFLVEEDKKHERHPIFGNIVDEVAYHEKYPTIYHLRKKLVDSTDKADLRLIYLALAHMIKFRGHFLIEGDLNPDNSDVDKLFIQLVQTYNQLFEENPINASGVDAKAILSARLSKSRRLENLIAQLPGEKKNGLFGNLIALSLGLTPNFKSNFDLAEDAKLQLSKDTYDDDLDNLLAQIGDQYADLFLAAKNLSDAILLSDILRVNTEITKAPLSASMIKRYDEHHQDLTLLKALVRQQLPEKYKEIFFDQSKNGYAGYIDGGASQEEFYKFIKPILEKMDGTEELLVKLNREDLLRKQRTFDNGSIPHQIHLGELHAILRRQEDFYPFLKDNREKIEKILTFRIPYYVGPLARGNSRFAWMTRKSEETITPWNFEEVVDKGASAQSFIERMTNFDKNLPNEKVLPKHSLLYEYFTVYNELTKVKYVTEGMRKPAFLSGEQKKAIVDLLFKTNRKVTVKQLKEDYFKKIECFDSVEISGVEDRFNASLGTYHDLLKIIKDKDFLDNEENEDILEDIVLTLTLFEDREMIEERLKTYAHLFDDKVMKQLKRRRYTGWGRLSRKLINGIRDKQSGKTILDFLKSDGFANRNFMQLIHDDSLTFKEDIQKAQVSGQGDSLHEHIANLAGSPAIKKGILQTVKVVDELVKVMGRHKPENIVIEMARENQTTQKGQKNSRERMKRIEEGIKELGSQILKEHPVENTQLQNEKLYLYYLQNGRDMYVDQELDINRLSDYDVDHIVPQSFLKDDSIDNKVLTRSDKARGKSDNVPSEEVVKKMKNYWRQLLNAKLITQRKFDNLTKAERGGLSELDKAGFIKRQLVETRQITKHVAQILDSRMNTKYDENDKLIREVKVITLKSKLVSDFRKDFQFYKVREINNYHHAHDAYLNAVVGTALIKKYPKLESEFVYGDYKVYDVRKMIAKSEQEIGKATAKYFFYSNIMNFFKTEITLANGEIRKRPLIETNGETGEIVWDKGRDFATVRKVLSMPQVNIVKKTEVQTGGFSKESILPKRNSDKLIARKKDWDPKKYGGFDSPTVAYSVLVVAKVEKGKSKKLKSVKELLGITIMERSSFEKNPIDFLEAKGYKEVKKDLIIKLPKYSLFELENGRKRMLASAGELQKGNELALPSKYVNFLYLASHYEKLKGSPEDNEQKQLFVEQHKHYLDEIIEQISEFSKRVILADANLDKVLSAYNKHRDKPIREQAENIIHLFTLTNLGAPAAFKYFDTTIDRKRYTSTKEVLDATLIHQSITGLYETRIDLSQLGGDGGPAPGGGGSSGGTLNIEDEYRLHETSKEPDVSLGSTWLSDFPQAWAETGGMGLAVRQAPLIIPLKATSTPVSIKQYPMSQEARLGIKPHIQRLLDQGILVPCQSPWNTPLLPVKKPGTNDYRPVQDLREVNKRVEDIHPTVPNPYNLLSGLPPSHQWYTVLDLKDAFFCLRLHPTSQPLFAFEWRDPEMGISGQLTWTRLPQGFKNSPTLFNEALHRDLAGFRIQHPDLILLQYVDDLLLAATSELDCQQGTRALLQTLGDLGYRASAKKAQICQKQVKYLGYLLKEGQRWLTEARKETVMGQPIPKTPRQLREFLGTAGFCRLWIPGFAEMAAPLYPLTKPGTLFNWGPDQQKAFQEIKQALLTAPALGLPDLTKPFELFVDEKQGYAKGVLTQKLGPWRRPVAYLSKKLDPVAAGWPPCLRMVAAIAVLTKDAGKLTMGQPLVILAPHAVEALVKQPPDRWLSNARMTHYQALLLDTDRVQFGPVVALNPATLLPLPEEGLQHDCLDILAEAHGTRSDLMDQPLPDADHTWYTDGSSFLQEGQRKAGAAVTTETEVIWARALPAGTSAQRAELIALTQALKMAEGKKLNVYTDSRYAFATAHIHGEIYRRRGWLTSEGKEIKNKDEILALLKALFLPKRLSIIHCPGHQKGNSAEARGNRMADQAAREVATRETPETSTLLAGKRTADGSEFEKRTADGSEFESPKKKAKVE

SEQ ID NO: 2235 - protein, 2096 aa, synthetic construct
MPAAKRVKLDGGDKKYSIGLDIGTNSVGWAVITDEYKVPSKKFKVLGNTDRHSIKKNLIGALLFDSGETAEATRLKRTARRRYTRRKNRICYLQEIFSNEMAKVDDSFFHRLEESFLVEEDKKHERHPIFGNIVDEVAYHEKYPTIYHLRKKLVDSTDKADLRLIYLALAHMIKFRGHFLIEGDLNPDNSDVDKLFIQLVQTYNQLFEENPINASGVDAKAILSARLSKSRRLENLIAQLPGEKKNGLFGNLIALSLGLTPNFKSNFDLAEDAKLQLSKDTYDDDLDNLLAQIGDQYADLFLAAKNLSDAILLSDILRVNTEITKAPLSASMIKRYDEHHQDLTLLKALVRQQLPEKYKEIFFDQSKNGYAGYIDGGASQEEFYKFIKPILEKMDGTEELLVKLNREDLLRKQRTFDNGSIPHQIHLGELHAILRRQEDFYPFLKDNREKIEKILTFRIPYYVGPLARGNSRFAWMTRKSEETITPWNFEEVVDKGASAQSFIERMTNFDKNLPNEKVLPKHSLLYEYFTVYNELTKVKYVTEGMRKPAFLSGEQKKAIVDLLFKTNRKVTVKQLKEDYFKKIECFDSVEISGVEDRFNASLGTYHDLLKIIKDKDFLDNEENEDILEDIVLTLTLFEDREMIEERLKTYAHLFDDKVMKQLKRRRYTGWGRLSRKLINGIRDKQSGKTILDFLKSDGFANRNFMQLIHDDSLTFKEDIQKAQVSGQGDSLHEHIANLAGSPAIKKGILQTVKVVDELVKVMGRHKPENIVIEMARENQTTQKGQKNSRERMKRIEEGIKELGSQILKEHPVENTQLQNEKLYLYYLQNGRDMYVDQELDINRLSDYDVDHIVPQSFLKDDSIDNKVLTRSDKARGKSDNVPSEEVVKKMKNYWRQLLNAKLITQRKFDNLTKAERGGLSELDKAGFIKRQLVETRQITKHVAQILDSRMNTKYDENDKLIREVKVITLKSKLVSDFRKDFQFYKVREINNYHHAHDAYLNAVVGTALIKKYPKLESEFVYGDYKVYDVRKMIAKSEQEIGKATAKYFFYSNIMNFFKTEITLANGEIRKRPLIETNGETGEIVWDKGRDFATVRKVLSMPQVNIVKKTEVQTGGFSKESILPKRNSDKLIARKKDWDPKKYGGFDSPTVAYSVLVVAKVEKGKSKKLKSVKELLGITIMERSSFEKNPIDFLEAKGYKEVKKDLIIKLPKYSLFELENGRKRMLASAGELQKGNELALPSKYVNFLYLASHYEKLKGSPEDNEQKQLFVEQHKHYLDEIIEQISEFSKRVILADANLDKVLSAYNKHRDKPIREQAENIIHLFTLTNLGAPAAFKYFDTTIDRKRYTSTKEVLDATLIHQSITGLYETRIDLSQLGGDGGEAAAKGSSPAPGGTLNIEDEYRLHETSKEPDVSLGSTWLSDFPQAWAETGGMGLAVRQAPLIIPLKATSTPVSIKQYPMSQEARLGIKPHIQRLLDQGILVPCQSPWNTPLLPVKKPGTNDYRPVQDLREVNKRVEDIHPTVPNPYNLLSGLPPSHQWYTVLDLKDAFFCLRLHPTSQPLFAFEWRDPEMGISGQLTWTRLPQGFKNSPTLFNEALHRDLAGFRIQHPDLILLQYVDDLLLAATSELDCQQGTRALLQTLGDLGYRASAKKAQICQKQVKYLGYLLKEGQRWLTEARKETVMGQPIPKTPRQLREFLGTAGFCRLWIPGFAEMAAPLYPLTKPGTLFNWGPDQQKAFQEIKQALLTAPALGLPDLTKPFELFVDEKQGYAKGVLTQKLGPWRRPVAYLSKKLDPVAAGWPPCLRMVAAIAVLTKDAGKLTMGQPLVILAPHAVEALVKQPPDRWLSNARMTHYQALLLDTDRVQFGPVVALNPATLLPLPEEGLQHDCLDILAEAHGTRSDLMDQPLPDADHTWYTDGSSFLQEGQRKAGAAVTTETEVIWARALPAGTSAQRAELIALTQALKMAEGKKLNVYTDSRYAFATAHIHGEIYRRRGWLTSEGKEIKNKDEILALLKALFLPKRLSIIHCPGHQKGNSAEARGNRMADQAAREVATRETPETSTLLAGKRTADGSEFEKRTADGSEFESPKKKAKVE

SEQ ID NO: 2236 - protein, 2095 aa, synthetic construct
MPAAKRVKLDGGDKKYSIGLDIGTNSVGWAVITDEYKVPSKKFKVLGNTDRHSIKKNLIGALLFDSGETAEATRLKRTARRRYTRRKNRICYLQEIFSNEMAKVDDSFFHRLEESFLVEEDKKHERHPIFGNIVDEVAYHEKYPTIYHLRKKLVDSTDKADLRLIYLALAHMIKFRGHFLIEGDLNPDNSDVDKLFIQLVQTYNQLFEENPINASGVDAKAILSARLSKSRRLENLIAQLPGEKKNGLFGNLIALSLGLTPNFKSNFDLAEDAKLQLSKDTYDDDLDNLLAQIGDQYADLFLAAKNLSDAILLSDILRVNTEITKAPLSASMIKRYDEHHQDLTLLKALVRQQLPEKYKEIFFDQSKNGYAGYIDGGASQEEFYKFIKPILEKMDGTEELLVKLNREDLLRKQRTFDNGSIPHQIHLGELHAILRRQEDFYPFLKDNREKIEKILTFRIPYYVGPLARGNSRFAWMTRKSEETITPWNFEEVVDKGASAQSFIERMTNFDKNLPNEKVLPKHSLLYEYFTVYNELTKVKYVTEGMRKPAFLSGEQKKAIVDLLFKTNRKVTVKQLKEDYFKKIECFDSVEISGVEDRFNASLGTYHDLLKIIKDKDFLDNEENEDILEDIVLTLTLFEDREMIEERLKTYAHLFDDKVMKQLKRRRYTGWGRLSRKLINGIRDKQSGKTILDFLKSDGFANRNFMQLIHDDSLTFKEDIQKAQVSGQGDSLHEHIANLAGSPAIKKGILQTVKVVDELVKVMGRHKPENIVIEMARENQTTQKGQKNSRERMKRIEEGIKELGSQILKEHPVENTQLQNEKLYLYYLQNGRDMYVDQELDINRLSDYDVDHIVPQSFLKDDSIDNKVLTRSDKARGKSDNVPSEEVVKKMKNYWRQLLNAKLITQRKFDNLTKAERGGLSELDKAGFIKRQLVETRQITKHVAQILDSRMNTKYDENDKLIREVKVITLKSKLVSDFRKDFQFYKVREINNYHHAHDAYLNAVVGTALIKKYPKLESEFVYGDYKVYDVRKMIAKSEQEIGKATAKYFFYSNIMNFFKTEITLANGEIRKRPLIETNGETGEIVWDKGRDFATVRKVLSMPQVNIVKKTEVQTGGFSKESILPKRNSDKLIARKKDWDPKKYGGFDSPTVAYSVLVVAKVEKGKSKKLKSVKELLGITIMERSSFEKNPIDFLEAKGYKEVKKDLIIKLPKYSLFELENGRKRMLASAGELQKGNELALPSKYVNFLYLASHYEKLKGSPEDNEQKQLFVEQHKHYLDEIIEQISEFSKRVILADANLDKVLSAYNKHRDKPIREQAENIIHLFTLTNLGAPAAFKYFDTTIDRKRYTSTKEVLDATLIHQSITGLYETRIDLSQLGGDGGEAAAKEAAAKGGTLNIEDEYRLHETSKEPDVSLGSTWLSDFPQAWAETGGMGLAVRQAPLIIPLKATSTPVSIKQYPMSQEARLGIKPHIQRLLDQGILVPCQSPWNTPLLPVKKPGTNDYRPVQDLREVNKRVEDIHPTVPNPYNLLSGLPPSHQWYTVLDLKDAFFCLRLHPTSQPLFAFEWRDPEMGISGQLTWTRLPQGFKNSPTLFNEALHRDLAGFRIQHPDLILLQYVDDLLLAATSELDCQQGTRALLQTLGDLGYRASAKKAQICQKQVKYLGYLLKEGQRWLTEARKETVMGQPIPKTPRQLREFLGTAGFCRLWIPGFAEMAAPLYPLTKPGTLFNWGPDQQKAFQEIKQALLTAPALGLPDLTKPFELFVDEKQGYAKGVLTQKLGPWRRPVAYLSKKLDPVAAGWPPCLRMVAAIAVLTKDAGKLTMGQPLVILAPHAVEALVKQPPDRWLSNARMTHYQALLLDTDRVQFGPVVALNPATLLPLPEEGLQHDCLDILAEAHGTRSDLMDQPLPDADHTWYTDGSSFLQEGQRKAGAAVTTETEVIWARALPAGTSAQRAELIALTQALKMAEGKKLNVYTDSRYAFATAHIHGEIYRRRGWLTSEGKEIKNKDEILALLKALFLPKRLSIIHCPGHQKGNSAEARGNRMADQAAREVATRETPETSTLLAGKRTADGSEFEKRTADGSEFESPKKKAKVE

SEQ ID NO: 2237 - protein, 2105 aa, synthetic construct
MPAAKRVKLDGGDKKYSIGLDIGTNSVGWAVITDEYKVPSKKFKVLGNTDRHSIKKNLIGALLFDSGETAEATRLKRTARRRYTRRKNRICYLQEIFSNEMAKVDDSFFHRLEESFLVEEDKKHERHPIFGNIVDEVAYHEKYPTIYHLRKKLVDSTDKADLRLIYLALAHMIKFRGHFLIEGDLNPDNSDVDKLFIQLVQTYNQLFEENPINASGVDAKAILSARLSKSRRLENLIAQLPGEKKNGLFGNLIALSLGLTPNFKSNFDLAEDAKLQLSKDTYDDDLDNLLAQIGDQYADLFLAAKNLSDAILLSDILRVNTEITKAPLSASMIKRYDEHHQDLTLLKALVRQQLPEKYKEIFFDQSKNGYAGYIDGGASQEEFYKFIKPILEKMDGTEELLVKLNREDLLRKQRTFDNGSIPHQIHLGELHAILRRQEDFYPFLKDNREKIEKILTFRIPYYVGPLARGNSRFAWMTRKSEETITPWNFEEVVDKGASAQSFIERMTNFDKNLPNEKVLPKHSLLYEYFTVYNELTKVKYVTEGMRKPAFLSGEQKKAIVDLLFKTNRKVTVKQLKEDYFKKIECFDSVEISGVEDRFNASLGTYHDLLKIIKDKDFLDNEENEDILEDIVLTLTLFEDREMIEERLKTYAHLFDDKVMKQLKRRRYTGWGRLSRKLINGIRDKQSGKTILDFLKSDGFANRNFMQLIHDDSLTFKEDIQKAQVSGQGDSLHEHIANLAGSPAIKKGILQTVKVVDELVKVMGRHKPENIVIEMARENQTTQKGQKNSRERMKRIEEGIKELGSQILKEHPVENTQLQNEKLYLYYLQNGRDMYVDQELDINRLSDYDVDHIVPQSFLKDDSIDNKVLTRSDKARGKSDNVPSEEVVKKMKNYWRQLLNAKLITQRKFDNLTKAERGGLSELDKAGFIKRQLVETRQITKHVAQILDSRMNTKYDENDKLIREVKVITLKSKLVSDFRKDFQFYKVREINNYHHAHDAYLNAVVGTALIKKYPKLESEFVYGDYKVYDVRKMIAKSEQEIGKATAKYFFYSNIMNFFKTEITLANGEIRKRPLIETNGETGEIVWDKGRDFATVRKVLSMPQVNIVKKTEVQTGGFSKESILPKRNSDKLIARKKDWDPKKYGGFDSPTVAYSVLVVAKVEKGKSKKLKSVKELLGITIMERSSFEKNPIDFLEAKGYKEVKKDLIIKLPKYSLFELENGRKRMLASAGELQKGNELALPSKYVNFLYLASHYEKLKGSPEDNEQKQLFVEQHKHYLDEIIEQISEFSKRVILADANLDKVLSAYNKHRDKPIREQAENIIHLFTLTNLGAPAAFKYFDTTIDRKRYTSTKEVLDATLIHQSITGLYETRIDLSQLGGDGGEAAAKEAAAKEAAAKEAAAKGGTLNIEDEYRLHETSKEPDVSLGSTWLSDFPQAWAETGGMGLAVRQAPLIIPLKATSTPVSIKQYPMSQEARLGIKPHIQRLLDQGILVPCQSPWNTPLLPVKKPGTNDYRPVQDLREVNKRVEDIHPTVPNPYNLLSGLPPSHQWYTVLDLKDAFFCLRLHPTSQPLFAFEWRDPEMGISGQLTWTRLPQGFKNSPTLFNEALHRDLAGFRIQHPDLILLQYVDDLLLAATSELDCQQGTRALLQTLGDLGYRASAKKAQICQKQVKYLGYLLKEGQRWLTEARKETVMGQPIPKTPRQLREFLGTAGFCRLWIPGFAEMAAPLYPLTKPGTLFNWGPDQQKAFQEIKQALLTAPALGLPDLTKPFELFVDEKQGYAKGVLTQKLGPWRRPVAYLSKKLDPVAAGWPPCLRMVAAIAVLTKDAGKLTMGQPLVILAPHAVEALVKQPPDRWLSNARMTHYQALLLDTDRVQFGPVVALNPATLLPLPEEGLQHDCLDILAEAHGTRSDLMDQPLPDADHTWYTDGSSFLQEGQRKAGAAVTTETEVIWARALPAGTSAQRAELIALTQALKMAEGKKLNVYTDSRYAFATAHIHGEIYRRRGWLTSEGKEIKNKDEILALLKALFLPKRLSIIHCPGHQKGNSAEARGNRMADQAAREVATRETPETSTLLAGKRTADGSEFEKRTADGSEFESPKKKAKVE

SEQ ID NO: 2238 - protein, 2093 aa, synthetic construct
MPAAKRVKLDGGDKKYSIGLDIGTNSVGWAVITDEYKVPSKKFKVLGNTDRHSIKKNLIGALLFDSGETAEATRLKRTARRRYTRRKNRICYLQEIFSNEMAKVDDSFFHRLEESFLVEEDKKHERHPIFGNIVDEVAYHEKYPTIYHLRKKLVDSTDKADLRLIYLALAHMIKFRGHFLIEGDLNPDNSDVDKLFIQLVQTYNQLFEENPINASGVDAKAILSARLSKSRRLENLIAQLPGEKKNGLFGNLIALSLGLTPNFKSNFDLAEDAKLQLSKDTYDDDLDNLLAQIGDQYADLFLAAKNLSDAILLSDILRVNTEITKAPLSASMIKRYDEHHQDLTLLKALVRQQLPEKYKEIFFDQSKNGYAGYIDGGASQEEFYKFIKPILEKMDGTEELLVKLNREDLLRKQRTFDNGSIPHQIHLGELHAILRRQEDFYPFLKDNREKIEKILTFRIPYYVGPLARGNSRFAWMTRKSEETITPWNFEEVVDKGASAQSFIERMTNFDKNLPNEKVLPKHSLLYEYFTVYNELTKVKYVTEGMRKPAFLSGEQKKAIVDLLFKTNRKVTVKQLKEDYFKKIECFDSVEISGVEDRFNASLGTYHDLLKIIKDKDFLDNEENEDILEDIVLTLTLFEDREMIEERLKTYAHLFDDKVMKQLKRRRYTGWGRLSRKLINGIRDKQSGKTILDFLKSDGFANRNFMQLIHDDSLTFKEDIQKAQVSGQGDSLHEHIANLAGSPAIKKGILQTVKVVDELVKVMGRHKPENIVIEMARENQTTQKGQKNSRERMKRIEEGIKELGSQILKEHPVENTQLQNEKLYLYYLQNGRDMYVDQELDINRLSDYDVDHIVPQSFLKDDSIDNKVLTRSDKARGKSDNVPSEEVVKKMKNYWRQLLNAKLITQRKFDNLTKAERGGLSELDKAGFIKRQLVETRQITKHVAQILDSRMNTKYDENDKLIREVKVITLKSKLVSDFRKDFQFYKVREINNYHHAHDAYLNAVVGTALIKKYPKLESEFVYGDYKVYDVRKMIAKSEQEIGKATAKYFFYSNIMNFFKTEITLANGEIRKRPLIETNGETGEIVWDKGRDFATVRKVLSMPQVNIVKKTEVQTGGFSKESILPKRNSDKLIARKKDWDPKKYGGFDSPTVAYSVLVVAKVEKGKSKKLKSVKELLGITIMERSSFEKNPIDFLEAKGYKEVKKDLIIKLPKYSLFELENGRKRMLASAGELQKGNELALPSKYVNFLYLASHYEKLKGSPEDNEQKQLFVEQHKHYLDEIIEQISEFSKRVILADANLDKVLSAYNKHRDKPIREQAENIIHLFTLTNLGAPAAFKYFDTTIDRKRYTSTKEVLDATLIHQSITGLYETRIDLSQLGGDGGEAAAKGGSGGTLNIEDEYRLHETSKEPDVSLGSTWLSDFPQAWAETGGMGLAVRQAPLIIPLKATSTPVSIKQYPMSQEARLGIKPHIQRLLDQGILVPCQSPWNTPLLPVKKPGTNDYRPVQDLREVNKRVEDIHPTVPNPYNLLSGLPPSHQWYTVLDLKDAFFCLRLHPTSQPLFAFEWRDPEMGISGQLTWTRLPQGFKNSPTLFNEALHRDLAGFRIQHPDLILLQYVDDLLLAATSELDCQQGTRALLQTLGDLGYRASAKKAQICQKQVKYLGYLLKEGQRWLTEARKETVMGQPIPKTPRQLREFLGTAGFCRLWIPGFAEMAAPLYPLTKPGTLFNWGPDQQKAFQEIKQALLTAPALGLPDLTKPFELFVDEKQGYAKGVLTQKLGPWRRPVAYLSKKLDPVAAGWPPCLRMVAAIAVLTKDAGKLTMGQPLVILAPHAVEALVKQPPDRWLSNARMTHYQALLLDTDRVQFGPVVALNPATLLPLPEEGLQHDCLDILAEAHGTRSDLMDQPLPDADHTWYTDGSSFLQEGQRKAGAAVTTETEVIWARALPAGTSAQRAELIALTQALKMAEGKKLNVYTDSRYAFATAHIHGEIYRRRGWLTSEGKEIKNKDEILALLKALFLPKRLSIIHCPGHQKGNSAEARGNRMADQAAREVATRETPETSTLLAGKRTADGSEFEKRTADGSEFESPKKKAKVE

SEQ ID NO: 2239 - protein, 2096 aa, synthetic construct
MPAAKRVKLDGGDKKYSIGLDIGTNSVGWAVITDEYKVPSKKFKVLGNTDRHSIKKNLIGALLFDSGETAEATRLKRTARRRYTRRKNRICYLQEIFSNEMAKVDDSFFHRLEESFLVEEDKKHERHPIFGNIVDEVAYHEKYPTIYHLRKKLVDSTDKADLRLIYLALAHMIKFRGHFLIEGDLNPDNSDVDKLFIQLVQTYNQLFEENPINASGVDAKAILSARLSKSRRLENLIAQLPGEKKNGLFGNLIALSLGLTPNFKSNFDLAEDAKLQLSKDTYDDDLDNLLAQIGDQYADLFLAAKNLSDAILLSDILRVNTEITKAPLSASMIKRYDEHHQDLTLLKALVRQQLPEKYKEIFFDQSKNGYAGYIDGGASQEEFYKFIKPILEKMDGTEELLVKLNREDLLRKQRTFDNGSIPHQIHLGELHAILRRQEDFYPFLKDNREKIEKILTFRIPYYVGPLARGNSRFAWMTRKSEETITPWNFEEVVDKGASAQSFIERMTNFDKNLPNEKVLPKHSLLYEYFTVYNELTKVKYVTEGMRKPAFLSGEQKKAIVDLLFKTNRKVTVKQLKEDYFKKIECFDSVEISGVEDRFNASLGTYHDLLKIIKDKDFLDNEENEDILEDIVLTLTLFEDREMIEERLKTYAHLFDDKVMKQLKRRRYTGWGRLSRKLINGIRDKQSGKTILDFLKSDGFANRNFMQLIHDDSLTFKEDIQKAQVSGQGDSLHEHIANLAGSPAIKKGILQTVKVVDELVKVMGRHKPENIVIEMARENQTTQKGQKNSRERMKRIEEGIKELGSQILKEHPVENTQLQNEKLYLYYLQNGRDMYVDQELDINRLSDYDVDHIVPQSFLKDDSIDNKVLTRSDKARGKSDNVPSEEVVKKMKNYWRQLLNAKLITQRKFDNLTKAERGGLSELDKAGFIKRQLVETRQITKHVAQILDSRMNTKYDENDKLIREVKVITLKSKLVSDFRKDFQFYKVREINNYHHAHDAYLNAVVGTALIKKYPKLESEFVYGDYKVYDVRKMIAKSEQEIGKATAKYFFYSNIMNFFKTEITLANGEIRKRPLIETNGETGEIVWDKGRDFATVRKVLSMPQVNIVKKTEVQTGGFSKESILPKRNSDKLIARKKDWDPKKYGGFDSPTVAYSVLVVAKVEKGKSKKLKSVKELLGITIMERSSFEKNPIDFLEAKGYKEVKKDLIIKLPKYSLFELENGRKRMLASAGELQKGNELALPSKYVNFLYLASHYEKLKGSPEDNEQKQLFVEQHKHYLDEIIEQISEFSKRVILADANLDKVLSAYNKHRDKPIREQAENIIHLFTLTNLGAPAAFKYFDTTIDRKRYTSTKEVLDATLIHQSITGLYETRIDLSQLGGDGGEAAAKGGSGSSGGTLNIEDEYRLHETSKEPDVSLGSTWLSDFPQAWAETGGMGLAVRQAPLIIPLKATSTPVSIKQYPMSQEARLGIKPHIQRLLDQGILVPCQSPWNTPLLPVKKPGTNDYRPVQDLREVNKRVEDIHPTVPNPYNLLSGLPPSHQWYTVLDLKDAFFCLRLHPTSQPLFAFEWRDPEMGISGQLTWTRLPQGFKNSPTLFNEALHRDLAGFRIQHPDLILLQYVDDLLLAATSELDCQQGTRALLQTLGDLGYRASAKKAQICQKQVKYLGYLLKEGQRWLTEARKETVMGQPIPKTPRQLREFLGTAGFCRLWIPGFAEMAAPLYPLTKPGTLFNWGPDQQKAFQEIKQALLTAPALGLPDLTKPFELFVDEKQGYAKGVLTQKLGPWRRPVAYLSKKLDPVAAGWPPCLRMVAAIAVLTKDAGKLTMGQPLVILAPHAVEALVKQPPDRWLSNARMTHYQALLLDTDRVQFGPVVALNPATLLPLPEEGLQHDCLDILAEAHGTRSDLMDQPLPDADHTWYTDGSSFLQEGQRKAGAAVTTETEVIWARALPAGTSAQRAELIALTQALKMAEGKKLNVYTDSRYAFATAHIHGEIYRRRGWLTSEGKEIKNKDEILALLKALFLPKRLSIIHCPGHQKGNSAEARGNRMADQAAREVATRETPETSTLLAGKRTADGSEFEKRTADGSEFESPKKKAKVE

SEQ ID NO: 2240 - protein, 2100 aa, synthetic construct
MPAAKRVKLDGGDKKYSIGLDIGTNSVGWAVITDEYKVPSKKFKVLGNTDRHSIKKNLIGALLFDSGETAEATRLKRTARRRYTRRKNRICYLQEIFSNEMAKVDDSFFHRLEESFLVEEDKKHERHPIFGNIVDEVAYHEKYPTIYHLRKKLVDSTDKADLRLIYLALAHMIKFRGHFLIEGDLNPDNSDVDKLFIQLVQTYNQLFEENPINASGVDAKAILSARLSKSRRLENLIAQLPGEKKNGLFGNLIALSLGLTPNFKSNFDLAEDAKLQLSKDTYDDDLDNLLAQIGDQYADLFLAAKNLSDAILLSDILRVNTEITKAPLSASMIKRYDEHHQDLTLLKALVRQQLPEKYKEIFFDQSKNGYAGYIDGGASQEEFYKFIKPILEKMDGTEELLVKLNREDLLRKQRTFDNGSIPHQIHLGELHAILRRQEDFYPFLKDNREKIEKILTFRIPYYVGPLARGNSRFAWMTRKSEETITPWNFEEVVDKGASAQSFIERMTNFDKNLPNEKVLPKHSLLYEYFTVYNELTKVKYVTEGMRKPAFLSGEQKKAIVDLLFKTNRKVTVKQLKEDYFKKIECFDSVEISGVEDRFNASLGTYHDLLKIIKDKDFLDNEENEDILEDIVLTLTLFEDREMIEERLKTYAHLFDDKVMKQLKRRRYTGWGRLSRKLINGIRDKQSGKTILDFLKSDGFANRNFMQLIHDDSLTFKEDIQKAQVSGQGDSLHEHIANLAGSPAIKKGILQTVKVVDELVKVMGRHKPENIVIEMARENQTTQKGQKNSRERMKRIEEGIKELGSQILKEHPVENTQLQNEKLYLYYLQNGRDMYVDQELDINRLSDYDVDHIVPQSFLKDDSIDNKVLTRSDKARGKSDNVPSEEVVKKMKNYWRQLLNAKLITQRKFDNLTKAERGGLSELDKAGFIKRQLVETRQITKHVAQILDSRMNTKYDENDKLIREVKVITLKSKLVSDFRKDFQFYKVREINNYHHAHDAYLNAVVGTALIKKYPKLESEFVYGDYKVYDVRKMIAKSEQEIGKATAKYFFYSNIMNFFKTEITLANGEIRKRPLIETNGETGEIVWDKGRDFATVRKVLSMPQVNIVKKTEVQTGGFSKESILPKRNSDKLIARKKDWDPKKYGGFDSPTVAYSVLVVAKVEKGKSKKLKSVKELLGITIMERSSFEKNPIDFLEAKGYKEVKKDLIIKLPKYSLFELENGRKRMLASAGELQKGNELALPSKYVNFLYLASHYEKLKGSPEDNEQKQLFVEQHKHYLDEIIEQISEFSKRVILADANLDKVLSAYNKHRDKPIREQAENIIHLFTLTNLGAPAAFKYFDTTIDRKRYTSTKEVLDATLIHQSITGLYETRIDLSQLGGDGGGGGGSGGGGSGGGGSGGTLNIEDEYRLHETSKEPDVSLGSTWLSDFPQAWAETGGMGLAVRQAPLIIPLKATSTPVSIKQYPMSQEARLGIKPHIQRLLDQGILVPCQSPWNTPLLPVKKPGTNDYRPVQDLREVNKRVEDIHPTVPNPYNLLSGLPPSHQWYTVLDLKDAFFCLRLHPTSQPLFAFEWRDPEMGISGQLTWTRLPQGFKNSPTLFNEALHRDLAGFRIQHPDLILLQYVDDLLLAATSELDCQQGTRALLQTLGDLGYRASAKKAQICQKQVKYLGYLLKEGQRWLTEARKETVMGQPIPKTPRQLREFLGTAGFCRLWIPGFAEMAAPLYPLTKPGTLFNWGPDQQKAFQEIKQALLTAPALGLPDLTKPFELFVDEKQGYAKGVLTQKLGPWRRPVAYLSKKLDPVAAGWPPCLRMVAAIAVLTKDAGKLTMGQPLVILAPHAVEALVKQPPDRWLSNARMTHYQALLLDTDRVQFGPVVALNPATLLPLPEEGLQHDCLDILAEAHGTRSDLMDQPLPDADHTWYTDGSSFLQEGQRKAGAAVTTETEVIWARALPAGTSAQRAELIALTQALKMAEGKKLNVYTDSRYAFATAHIHGEIYRRRGWLTSEGKEIKNKDEILALLKALFLPKRLSIIHCPGHQKGNSAEARGNRMADQAAREVATRETPETSTLLAGKRTADGSEFEKRTADGSEFESPKKKAKVE

SEQ ID NO: 2241 - protein, 2093 aa, synthetic construct
MPAAKRVKLDGGDKKYSIGLDIGTNSVGWAVITDEYKVPSKKFKVLGNTDRHSIKKNLIGALLFDSGETAEATRLKRTARRRYTRRKNRICYLQEIFSNEMAKVDDSFFHRLEESFLVEEDKKHERHPIFGNIVDEVAYHEKYPTIYHLRKKLVDSTDKADLRLIYLALAHMIKFRGHFLIEGDLNPDNSDVDKLFIQLVQTYNQLFEENPINASGVDAKAILSARLSKSRRLENLIAQLPGEKKNGLFGNLIALSLGLTPNFKSNFDLAEDAKLQLSKDTYDDDLDNLLAQIGDQYADLFLAAKNLSDAILLSDILRVNTEITKAPLSASMIKRYDEHHQDLTLLKALVRQQLPEKYKEIFFDQSKNGYAGYIDGGASQEEFYKFIKPILEKMDGTEELLVKLNREDLLRKQRTFDNGSIPHQIHLGELHAILRRQEDFYPFLKDNREKIEKILTFRIPYYVGPLARGNSRFAWMTRKSEETITPWNFEEVVDKGASAQSFIERMTNFDKNLPNEKVLPKHSLLYEYFTVYNELTKVKYVTEGMRKPAFLSGEQKKAIVDLLFKTNRKVTVKQLKEDYFKKIECFDSVEISGVEDRFNASLGTYHDLLKIIKDKDFLDNEENEDILEDIVLTLTLFEDREMIEERLKTYAHLFDDKVMKQLKRRRYTGWGRLSRKLINGIRDKQSGKTILDFLKSDGFANRNFMQLIHDDSLTFKEDIQKAQVSGQGDSLHEHIANLAGSPAIKKGILQTVKVVDELVKVMGRHKPENIVIEMARENQTTQKGQKNSRERMKRIEEGIKELGSQILKEHPVENTQLQNEKLYLYYLQNGRDMYVDQELDINRLSDYDVDHIVPQSFLKDDSIDNKVLTRSDKARGKSDNVPSEEVVKKMKNYWRQLLNAKLITQRKFDNLTKAERGGLSELDKAGFIKRQLVETRQITKHVAQILDSRMNTKYDENDKLIREVKVITLKSKLVSDFRKDFQFYKVREINNYHHAHDAYLNAVVGTALIKKYPKLESEFVYGDYKVYDVRKMIAKSEQEIGKATAKYFFYSNIMNFFKTEITLANGEIRKRPLIETNGETGEIVWDKGRDFATVRKVLSMPQVNIVKKTEVQTGGFSKESILPKRNSDKLIARKKDWDPKKYGGFDSPTVAYSVLVVAKVEKGKSKKLKSVKELLGITIMERSSFEKNPIDFLEAKGYKEVKKDLIIKLPKYSLFELENGRKRMLASAGELQKGNELALPSKYVNFLYLASHYEKLKGSPEDNEQKQLFVEQHKHYLDEIIEQISEFSKRVILADANLDKVLSAYNKHRDKPIREQAENIIHLFTLTNLGAPAAFKYFDTTIDRKRYTSTKEVLDATLIHQSITGLYETRIDLSQLGGDGGGGGEAAAKGGTLNIEDEYRLHETSKEPDVSLGSTWLSDFPQAWAETGGMGLAVRQAPLIIPLKATSTPVSIKQYPMSQEARLGIKPHIQRLLDQGILVPCQSPWNTPLLPVKKPGTNDYRPVQDLREVNKRVEDIHPTVPNPYNLLSGLPPSHQWYTVLDLKDAFFCLRLHPTSQPLFAFEWRDPEMGISGQLTWTRLPQGFKNSPTLFNEALHRDLAGFRIQHPDLILLQYVDDLLLAATSELDCQQGTRALLQTLGDLGYRASAKKAQICQKQVKYLGYLLKEGQRWLTEARKETVMGQPIPKTPRQLREFLGTAGFCRLWIPGFAEMAAPLYPLTKPGTLFNWGPDQQKAFQEIKQALLTAPALGLPDLTKPFELFVDEKQGYAKGVLTQKLGPWRRPVAYLSKKLDPVAAGWPPCLRMVAAIAVLTKDAGKLTMGQPLVILAPHAVEALVKQPPDRWLSNARMTHYQALLLDTDRVQFGPVVALNPATLLPLPEEGLQHDCLDILAEAHGTRSDLMDQPLPDADHTWYTDGSSFLQEGQRKAGAAVTTETEVIWARALPAGTSAQRAELIALTQALKMAEGKKLNVYTDSRYAFATAHIHGEIYRRRGWLTSEGKEIKNKDEILALLKALFLPKRLSIIHCPGHQKGNSAEARGNRMADQAAREVATRETPETSTLLAGKRTADGSEFEKRTADGSEFESPKKKAKVE

SEQ ID NO: 2242 - protein, 2088 aa, synthetic construct
MPAAKRVKLDGGDKKYSIGLDIGTNSVGWAVITDEYKVPSKKFKVLGNTDRHSIKKNLIGALLFDSGETAEATRLKRTARRRYTRRKNRICYLQEIFSNEMAKVDDSFFHRLEESFLVEEDKKHERHPIFGNIVDEVAYHEKYPTIYHLRKKLVDSTDKADLRLIYLALAHMIKFRGHFLIEGDLNPDNSDVDKLFIQLVQTYNQLFEENPINASGVDAKAILSARLSKSRRLENLIAQLPGEKKNGLFGNLIALSLGLTPNFKSNFDLAEDAKLQLSKDTYDDDLDNLLAQIGDQYADLFLAAKNLSDAILLSDILRVNTEITKAPLSASMIKRYDEHHQDLTLLKALVRQQLPEKYKEIFFDQSKNGYAGYIDGGASQEEFYKFIKPILEKMDGTEELLVKLNREDLLRKQRTFDNGSIPHQIHLGELHAILRRQEDFYPFLKDNREKIEKILTFRIPYYVGPLARGNSRFAWMTRKSEETITPWNFEEVVDKGASAQSFIERMTNFDKNLPNEKVLPKHSLLYEYFTVYNELTKVKYVTEGMRKPAFLSGEQKKAIVDLLFKTNRKVTVKQLKEDYFKKIECFDSVEISGVEDRFNASLGTYHDLLKIIKDKDFLDNEENEDILEDIVLTLTLFEDREMIEERLKTYAHLFDDKVMKQLKRRRYTGWGRLSRKLINGIRDKQSGKTILDFLKSDGFANRNFMQLIHDDSLTFKEDIQKAQVSGQGDSLHEHIANLAGSPAIKKGILQTVKVVDELVKVMGRHKPENIVIEMARENQTTQKGQKNSRERMKRIEEGIKELGSQILKEHPVENTQLQNEKLYLYYLQNGRDMYVDQELDINRLSDYDVDHIVPQSFLKDDSIDNKVLTRSDKARGKSDNVPSEEVVKKMKNYWRQLLNAKLITQRKFDNLTKAERGGLSELDKAGFIKRQLVETRQITKHVAQILDSRMNTKYDENDKLIREVKVITLKSKLVSDFRKDFQFYKVREINNYHHAHDAYLNAVVGTALIKKYPKLESEFVYGDYKVYDVRKMIAKSEQEIGKATAKYFFYSNIMNFFKTEITLANGEIRKRPLIETNGETGEIVWDKGRDFATVRKVLSMPQVNIVKKTEVQTGGFSKESILPKRNSDKLIARKKDWDPKKYGGFDSPTVAYSVLVVAKVEKGKSKKLKSVKELLGITIMERSSFEKNPIDFLEAKGYKEVKKDLIIKLPKYSLFELENGRKRMLASAGELQKGNELALPSKYVNFLYLASHYEKLKGSPEDNEQKQLFVEQHKHYLDEIIEQISEFSKRVILADANLDKVLSAYNKHRDKPIREQAENIIHLFTLTNLGAPAAFKYFDTTIDRKRYTSTKEVLDATLIHQSITGLYETRIDLSQLGGDGGGSSGGTLNIEDEYRLHETSKEPDVSLGSTWLSDFPQAWAETGGMGLAVRQAPLIIPLKATSTPVSIKQYPMSQEARLGIKPHIQRLLDQGILVPCQSPWNTPLLPVKKPGTNDYRPVQDLREVNKRVEDIHPTVPNPYNLLSGLPPSHQWYTVLDLKDAFFCLRLHPTSQPLFAFEWRDPEMGISGQLTWTRLPQGFKNSPTLFNEALHRDLAGFRIQHPDLILLQYVDDLLLAATSELDCQQGTRALLQTLGDLGYRASAKKAQICQKQVKYLGYLLKEGQRWLTEARKETVMGQPIPKTPRQLREFLGTAGFCRLWIPGFAEMAAPLYPLTKPGTLFNWGPDQQKAFQEIKQALLTAPALGLPDLTKPFELFVDEKQGYAKGVLTQKLGPWRRPVAYLSKKLDPVAAGWPPCLRMVAAIAVLTKDAGKLTMGQPLVILAPHAVEALVKQPPDRWLSNARMTHYQALLLDTDRVQFGPVVALNPATLLPLPEEGLQHDCLDILAEAHGTRSDLMDQPLPDADHTWYTDGSSFLQEGQRKAGAAVTTETEVIWARALPAGTSAQRAELIALTQALKMAEGKKLNVYTDSRYAFATAHIHGEIYRRRGWLTSEGKEIKNKDEILALLKALFLPKRLSIIHCPGHQKGNSAEARGNRMADQAAREVATRETPETSTLLAGKRTADGSEFEKRTADGSEFESPKKKAKVE

SEQ ID NO: 2243 - protein, 2090 aa, synthetic construct
MPAAKRVKLDGGDKKYSIGLDIGTNSVGWAVITDEYKVPSKKFKVLGNTDRHSIKKNLIGALLFDSGETAEATRLKRTARRRYTRRKNRICYLQEIFSNEMAKVDDSFFHRLEESFLVEEDKKHERHPIFGNIVDEVAYHEKYPTIYHLRKKLVDSTDKADLRLIYLALAHMIKFRGHFLIEGDLNPDNSDVDKLFIQLVQTYNQLFEENPINASGVDAKAILSARLSKSRRLENLIAQLPGEKKNGLFGNLIALSLGLTPNFKSNFDLAEDAKLQLSKDTYDDDLDNLLAQIGDQYADLFLAAKNLSDAILLSDILRVNTEITKAPLSASMIKRYDEHHQDLTLLKALVRQQLPEKYKEIFFDQSKNGYAGYIDGGASQEEFYKFIKPILEKMDGTEELLVKLNREDLLRKQRTFDNGSIPHQIHLGELHAILRRQEDFYPFLKDNREKIEKILTFRIPYYVGPLARGNSRFAWMTRKSEETITPWNFEEVVDKGASAQSFIERMTNFDKNLPNEKVLPKHSLLYEYFTVYNELTKVKYVTEGMRKPAFLSGEQKKAIVDLLFKTNRKVTVKQLKEDYFKKIECFDSVEISGVEDRFNASLGTYHDLLKIIKDKDFLDNEENEDILEDIVLTLTLFEDREMIEERLKTYAHLFDDKVMKQLKRRRYTGWGRLSRKLINGIRDKQSGKTILDFLKSDGFANRNFMQLIHDDSLTFKEDIQKAQVSGQGDSLHEHIANLAGSPAIKKGILQTVKVVDELVKVMGRHKPENIVIEMARENQTTQKGQKNSRERMKRIEEGIKELGSQILKEHPVENTQLQNEKLYLYYLQNGRDMYVDQELDINRLSDYDVDHIVPQSFLKDDSIDNKVLTRSDKARGKSDNVPSEEVVKKMKNYWRQLLNAKLITQRKFDNLTKAERGGLSELDKAGFIKRQLVETRQITKHVAQILDSRMNTKYDENDKLIREVKVITLKSKLVSDFRKDFQFYKVREINNYHHAHDAYLNAVVGTALIKKYPKLESEFVYGDYKVYDVRKMIAKSEQEIGKATAKYFFYSNIMNFFKTEITLANGEIRKRPLIETNGETGEIVWDKGRDFATVRKVLSMPQVNIVKKTEVQTGGFSKESILPKRNSDKLIARKKDWDPKKYGGFDSPTVAYSVLVVAKVEKGKSKKLKSVKELLGITIMERSSFEKNPIDFLEAKGYKEVKKDLIIKLPKYSLFELENGRKRMLASAGELQKGNELALPSKYVNFLYLASHYEKLKGSPEDNEQKQLFVEQHKHYLDEIIEQISEFSKRVILADANLDKVLSAYNKHRDKPIREQAENIIHLFTLTNLGAPAAFKYFDTTIDRKRYTSTKEVLDATLIHQSITGLYETRIDLSQLGGDGGPAPAPGGTLNIEDEYRLHETSKEPDVSLGSTWLSDFPQAWAETGGMGLAVRQAPLIIPLKATSTPVSIKQYPMSQEARLGIKPHIQRLLDQGILVPCQSPWNTPLLPVKKPGTNDYRPVQDLREVNKRVEDIHPTVPNPYNLLSGLPPSHQWYTVLDLKDAFFCLRLHPTSQPLFAFEWRDPEMGISGQLTWTRLPQGFKNSPTLFNEALHRDLAGFRIQHPDLILLQYVDDLLLAATSELDCQQGTRALLQTLGDLGYRASAKKAQICQKQVKYLGYLLKEGQRWLTEARKETVMGQPIPKTPRQLREFLGTAGFCRLWIPGFAEMAAPLYPLTKPGTLFNWGPDQQKAFQEIKQALLTAPALGLPDLTKPFELFVDEKQGYAKGVLTQKLGPWRRPVAYLSKKLDPVAAGWPPCLRMVAAIAVLTKDAGKLTMGQPLVILAPHAVEALVKQPPDRWLSNARMTHYQALLLDTDRVQFGPVVALNPATLLPLPEEGLQHDCLDILAEAHGTRSDLMDQPLPDADHTWYTDGSSFLQEGQRKAGAAVTTETEVIWARALPAGTSAQRAELIALTQALKMAEGKKLNVYTDSRYAFATAHIHGEIYRRRGWLTSEGKEIKNKDEILALLKALFLPKRLSIIHCPGHQKGNSAEARGNRMADQAAREVATRETPETSTLLAGKRTADGSEFEKRTADGSEFESPKKKAKVE

SEQ ID NO: 2244 - protein, 2096 aa, synthetic construct
MPAAKRVKLDGGDKKYSIGLDIGTNSVGWAVITDEYKVPSKKFKVLGNTDRHSIKKNLIGALLFDSGETAEATRLKRTARRRYTRRKNRICYLQEIFSNEMAKVDDSFFHRLEESFLVEEDKKHERHPIFGNIVDEVAYHEKYPTIYHLRKKLVDSTDKADLRLIYLALAHMIKFRGHFLIEGDLNPDNSDVDKLFIQLVQTYNQLFEENPINASGVDAKAILSARLSKSRRLENLIAQLPGEKKNGLFGNLIALSLGLTPNFKSNFDLAEDAKLQLSKDTYDDDLDNLLAQIGDQYADLFLAAKNLSDAILLSDILRVNTEITKAPLSASMIKRYDEHHQDLTLLKALVRQQLPEKYKEIFFDQSKNGYAGYIDGGASQEEFYKFIKPILEKMDGTEELLVKLNREDLLRKQRTFDNGSIPHQIHLGELHAILRRQEDFYPFLKDNREKIEKILTFRIPYYVGPLARGNSRFAWMTRKSEETITPWNFEEVVDKGASAQSFIERMTNFDKNLPNEKVLPKHSLLYEYFTVYNELTKVKYVTEGMRKPAFLSGEQKKAIVDLLFKTNRKVTVKQLKEDYFKKIECFDSVEISGVEDRFNASLGTYHDLLKIIKDKDFLDNEENEDILEDIVLTLTLFEDREMIEERLKTYAHLFDDKVMKQLKRRRYTGWGRLSRKLINGIRDKQSGKTILDFLKSDGFANRNFMQLIHDDSLTFKEDIQKAQVSGQGDSLHEHIANLAGSPAIKKGILQTVKVVDELVKVMGRHKPENIVIEMARENQTTQKGQKNSRERMKRIEEGIKELGSQILKEHPVENTQLQNEKLYLYYLQNGRDMYVDQELDINRLSDYDVDHIVPQSFLKDDSIDNKVLTRSDKARGKSDNVPSEEVVKKMKNYWRQLLNAKLITQRKFDNLTKAERGGLSELDKAGFIKRQLVETRQITKHVAQILDSRMNTKYDENDKLIREVKVITLKSKLVSDFRKDFQFYKVREINNYHHAHDAYLNAVVGTALIKKYPKLESEFVYGDYKVYDVRKMIAKSEQEIGKATAKYFFYSNIMNFFKTEITLANGEIRKRPLIETNGETGEIVWDKGRDFATVRKVLSMPQVNIVKKTEVQTGGFSKESILPKRNSDKLIARKKDWDPKKYGGFDSPTVAYSVLVVAKVEKGKSKKLKSVKELLGITIMERSSFEKNPIDFLEAKGYKEVKKDLIIKLPKYSLFELENGRKRMLASAGELQKGNELALPSKYVNFLYLASHYEKLKGSPEDNEQKQLFVEQHKHYLDEIIEQISEFSKRVILADANLDKVLSAYNKHRDKPIREQAENIIHLFTLTNLGAPAAFKYFDTTIDRKRYTSTKEVLDATLIHQSITGLYETRIDLSQLGGDGGGSSEAAAKGGSGGTLNIEDEYRLHETSKEPDVSLGSTWLSDFPQAWAETGGMGLAVRQAPLIIPLKATSTPVSIKQYPMSQEARLGIKPHIQRLLDQGILVPCQSPWNTPLLPVKKPGTNDYRPVQDLREVNKRVEDIHPTVPNPYNLLSGLPPSHQWYTVLDLKDAFFCLRLHPTSQPLFAFEWRDPEMGISGQLTWTRLPQGFKNSPTLFNEALHRDLAGFRIQHPDLILLQYVDDLLLAATSELDCQQGTRALLQTLGDLGYRASAKKAQICQKQVKYLGYLLKEGQRWLTEARKETVMGQPIPKTPRQLREFLGTAGFCRLWIPGFAEMAAPLYPLTKPGTLFNWGPDQQKAFQEIKQALLTAPALGLPDLTKPFELFVDEKQGYAKGVLTQKLGPWRRPVAYLSKKLDPVAAGWPPCLRMVAAIAVLTKDAGKLTMGQPLVILAPHAVEALVKQPPDRWLSNARMTHYQALLLDTDRVQFGPVVALNPATLLPLPEEGLQHDCLDILAEAHGTRSDLMDQPLPDADHTWYTDGSSFLQEGQRKAGAAVTTETEVIWARALPAGTSAQRAELIALTQALKMAEGKKLNVYTDSRYAFATAHIHGEIYRRRGWLTSEGKEIKNKDEILALLKALFLPKRLSIIHCPGHQKGNSAEARGNRMADQAAREVATRETPETSTLLAGKRTADGSEFEKRTADGSEFESPKKKAKVE

SEQ ID NO: 2245 - protein, 2091 aa, synthetic construct
MPAAKRVKLDGGDKKYSIGLDIGTNSVGWAVITDEYKVPSKKFKVLGNTDRHSIKKNLIGALLFDSGETAEATRLKRTARRRYTRRKNRICYLQEIFSNEMAKVDDSFFHRLEESFLVEEDKKHERHPIFGNIVDEVAYHEKYPTIYHLRKKLVDSTDKADLRLIYLALAHMIKFRGHFLIEGDLNPDNSDVDKLFIQLVQTYNQLFEENPINASGVDAKAILSARLSKSRRLENLIAQLPGEKKNGLFGNLIALSLGLTPNFKSNFDLAEDAKLQLSKDTYDDDLDNLLAQIGDQYADLFLAAKNLSDAILLSDILRVNTEITKAPLSASMIKRYDEHHQDLTLLKALVRQQLPEKYKEIFFDQSKNGYAGYIDGGASQEEFYKFIKPILEKMDGTEELLVKLNREDLLRKQRTFDNGSIPHQIHLGELHAILRRQEDFYPFLKDNREKIEKILTFRIPYYVGPLARGNSRFAWMTRKSEETITPWNFEEVVDKGASAQSFIERMTNFDKNLPNEKVLPKHSLLYEYFTVYNELTKVKYVTEGMRKPAFLSGEQKKAIVDLLFKTNRKVTVKQLKEDYFKKIECFDSVEISGVEDRFNASLGTYHDLLKIIKDKDFLDNEENEDILEDIVLTLTLFEDREMIEERLKTYAHLFDDKVMKQLKRRRYTGWGRLSRKLINGIRDKQSGKTILDFLKSDGFANRNFMQLIHDDSLTFKEDIQKAQVSGQGDSLHEHIANLAGSPAIKKGILQTVKVVDELVKVMGRHKPENIVIEMARENQTTQKGQKNSRERMKRIEEGIKELGSQILKEHPVENTQLQNEKLYLYYLQNGRDMYVDQELDINRLSDYDVDHIVPQSFLKDDSIDNKVLTRSDKARGKSDNVPSEEVVKKMKNYWRQLLNAKLITQRKFDNLTKAERGGLSELDKAGFIKRQLVETRQITKHVAQILDSRMNTKYDENDKLIREVKVITLKSKLVSDFRKDFQFYKVREINNYHHAHDAYLNAVVGTALIKKYPKLESEFVYGDYKVYDVRKMIAKSEQEIGKATAKYFFYSNIMNFFKTEITLANGEIRKRPLIETNGETGEIVWDKGRDFATVRKVLSMPQVNIVKKTEVQTGGFSKESILPKRNSDKLIARKKDWDPKKYGGFDSPTVAYSVLVVAKVEKGKSKKLKSVKELLGITIMERSSFEKNPIDFLEAKGYKEVKKDLIIKLPKYSLFELENGRKRMLASAGELQKGNELALPSKYVNFLYLASHYEKLKGSPEDNEQKQLFVEQHKHYLDEIIEQISEFSKRVILADANLDKVLSAYNKHRDKPIREQAENIIHLFTLTNLGAPAAFKYFDTTIDRKRYTSTKEVLDATLIHQSITGLYETRIDLSQLGGDGGPAPGGSGGTLNIEDEYRLHETSKEPDVSLGSTWLSDFPQAWAETGGMGLAVRQAPLIIPLKATSTPVSIKQYPMSQEARLGIKPHIQRLLDQGILVPCQSPWNTPLLPVKKPGTNDYRPVQDLREVNKRVEDIHPTVPNPYNLLSGLPPSHQWYTVLDLKDAFFCLRLHPTSQPLFAFEWRDPEMGISGQLTWTRLPQGFKNSPTLFNEALHRDLAGFRIQHPDLILLQYVDDLLLAATSELDCQQGTRALLQTLGDLGYRASAKKAQICQKQVKYLGYLLKEGQRWLTEARKETVMGQPIPKTPRQLREFLGTAGFCRLWIPGFAEMAAPLYPLTKPGTLFNWGPDQQKAFQEIKQALLTAPALGLPDLTKPFELFVDEKQGYAKGVLTQKLGPWRRPVAYLSKKLDPVAAGWPPCLRMVAAIAVLTKDAGKLTMGQPLVILAPHAVEALVKQPPDRWLSNARMTHYQALLLDTDRVQFGPVVALNPATLLPLPEEGLQHDCLDILAEAHGTRSDLMDQPLPDADHTWYTDGSSFLQEGQRKAGAAVTTETEVIWARALPAGTSAQRAELIALTQALKMAEGKKLNVYTDSRYAFATAHIHGEIYRRRGWLTSEGKEIKNKDEILALLKALFLPKRLSIIHCPGHQKGNSAEARGNRMADQAAREVATRETPETSTLLAGKRTADGSEFEKRTADGSEFESPKKKAKVE

SEQ ID NO: 2246 - protein, 2096 aa, synthetic construct
MPAAKRVKLDGGDKKYSIGLDIGTNSVGWAVITDEYKVPSKKFKVLGNTDRHSIKKNLIGALLFDSGETAEATRLKRTARRRYTRRKNRICYLQEIFSNEMAKVDDSFFHRLEESFLVEEDKKHERHPIFGNIVDEVAYHEKYPTIYHLRKKLVDSTDKADLRLIYLALAHMIKFRGHFLIEGDLNPDNSDVDKLFIQLVQTYNQLFEENPINASGVDAKAILSARLSKSRRLENLIAQLPGEKKNGLFGNLIALSLGLTPNFKSNFDLAEDAKLQLSKDTYDDDLDNLLAQIGDQYADLFLAAKNLSDAILLSDILRVNTEITKAPLSASMIKRYDEHHQDLTLLKALVRQQLPEKYKEIFFDQSKNGYAGYIDGGASQEEFYKFIKPILEKMDGTEELLVKLNREDLLRKQRTFDNGSIPHQIHLGELHAILRRQEDFYPFLKDNREKIEKILTFRIPYYVGPLARGNSRFAWMTRKSEETITPWNFEEVVDKGASAQSFIERMTNFDKNLPNEKVLPKHSLLYEYFTVYNELTKVKYVTEGMRKPAFLSGEQKKAIVDLLFKTNRKVTVKQLKEDYFKKIECFDSVEISGVEDRFNASLGTYHDLLKIIKDKDFLDNEENEDILEDIVLTLTLFEDREMIEERLKTYAHLFDDKVMKQLKRRRYTGWGRLSRKLINGIRDKQSGKTILDFLKSDGFANRNFMQLIHDDSLTFKEDIQKAQVSGQGDSLHEHIANLAGSPAIKKGILQTVKVVDELVKVMGRHKPENIVIEMARENQTTQKGQKNSRERMKRIEEGIKELGSQILKEHPVENTQLQNEKLYLYYLQNGRDMYVDQELDINRLSDYDVDHIVPQSFLKDDSIDNKVLTRSDKARGKSDNVPSEEVVKKMKNYWRQLLNAKLITQRKFDNLTKAERGGLSELDKAGFIKRQLVETRQITKHVAQILDSRMNTKYDENDKLIREVKVITLKSKLVSDFRKDFQFYKVREINNYHHAHDAYLNAVVGTALIKKYPKLESEFVYGDYKVYDVRKMIAKSEQEIGKATAKYFFYSNIMNFFKTEITLANGEIRKRPLIETNGETGEIVWDKGRDFATVRKVLSMPQVNIVKKTEVQTGGFSKESILPKRNSDKLIARKKDWDPKKYGGFDSPTVAYSVLVVAKVEKGKSKKLKSVKELLGITIMERSSFEKNPIDFLEAKGYKEVKKDLIIKLPKYSLFELENGRKRMLASAGELQKGNELALPSKYVNFLYLASHYEKLKGSPEDNEQKQLFVEQHKHYLDEIIEQISEFSKRVILADANLDKVLSAYNKHRDKPIREQAENIIHLFTLTNLGAPAAFKYFDTTIDRKRYTSTKEVLDATLIHQSITGLYETRIDLSQLGGDGGGGGGGSEAAAKGGTLNIEDEYRLHETSKEPDVSLGSTWLSDFPQAWAETGGMGLAVRQAPLIIPLKATSTPVSIKQYPMSQEARLGIKPHIQRLLDQGILVPCQSPWNTPLLPVKKPGTNDYRPVQDLREVNKRVEDIHPTVPNPYNLLSGLPPSHQWYTVLDLKDAFFCLRLHPTSQPLFAFEWRDPEMGISGQLTWTRLPQGFKNSPTLFNEALHRDLAGFRIQHPDLILLQYVDDLLLAATSELDCQQGTRALLQTLGDLGYRASAKKAQICQKQVKYLGYLLKEGQRWLTEARKETVMGQPIPKTPRQLREFLGTAGFCRLWIPGFAEMAAPLYPLTKPGTLFNWGPDQQKAFQEIKQALLTAPALGLPDLTKPFELFVDEKQGYAKGVLTQKLGPWRRPVAYLSKKLDPVAAGWPPCLRMVAAIAVLTKDAGKLTMGQPLVILAPHAVEALVKQPPDRWLSNARMTHYQALLLDTDRVQFGPVVALNPATLLPLPEEGLQHDCLDILAEAHGTRSDLMDQPLPDADHTWYTDGSSFLQEGQRKAGAAVTTETEVIWARALPAGTSAQRAELIALTQALKMAEGKKLNVYTDSRYAFATAHIHGEIYRRRGWLTSEGKEIKNKDEILALLKALFLPKRLSIIHCPGHQKGNSAEARGNRMADQAAREVATRETPETSTLLAGKRTADGSEFEKRTADGSEFESPKKKAKVE

SEQ ID NO: 2247 - protein, 2096 aa, synthetic construct
MPAAKRVKLDGGDKKYSIGLDIGTNSVGWAVITDEYKVPSKKFKVLGNTDRHSIKKNLIGALLFDSGETAEATRLKRTARRRYTRRKNRICYLQEIFSNEMAKVDDSFFHRLEESFLVEEDKKHERHPIFGNIVDEVAYHEKYPTIYHLRKKLVDSTDKADLRLIYLALAHMIKFRGHFLIEGDLNPDNSDVDKLFIQLVQTYNQLFEENPINASGVDAKAILSARLSKSRRLENLIAQLPGEKKNGLFGNLIALSLGLTPNFKSNFDLAEDAKLQLSKDTYDDDLDNLLAQIGDQYADLFLAAKNLSDAILLSDILRVNTEITKAPLSASMIKRYDEHHQDLTLLKALVRQQLPEKYKEIFFDQSKNGYAGYIDGGASQEEFYKFIKPILEKMDGTEELLVKLNREDLLRKQRTFDNGSIPHQIHLGELHAILRRQEDFYPFLKDNREKIEKILTFRIPYYVGPLARGNSRFAWMTRKSEETITPWNFEEVVDKGASAQSFIERMTNFDKNLPNEKVLPKHSLLYEYFTVYNELTKVKYVTEGMRKPAFLSGEQKKAIVDLLFKTNRKVTVKQLKEDYFKKIECFDSVEISGVEDRFNASLGTYHDLLKIIKDKDFLDNEENEDILEDIVLTLTLFEDREMIEERLKTYAHLFDDKVMKQLKRRRYTGWGRLSRKLINGIRDKQSGKTILDFLKSDGFANRNFMQLIHDDSLTFKEDIQKAQVSGQGDSLHEHIANLAGSPAIKKGILQTVKVVDELVKVMGRHKPENIVIEMARENQTTQKGQKNSRERMKRIEEGIKELGSQILKEHPVENTQLQNEKLYLYYLQNGRDMYVDQELDINRLSDYDVDHIVPQSFLKDDSIDNKVLTRSDKARGKSDNVPSEEVVKKMKNYWRQLLNAKLITQRKFDNLTKAERGGLSELDKAGFIKRQLVETRQITKHVAQILDSRMNTKYDENDKLIREVKVITLKSKLVSDFRKDFQFYKVREINNYHHAHDAYLNAVVGTALIKKYPKLESEFVYGDYKVYDVRKMIAKSEQEIGKATAKYFFYSNIMNFFKTEITLANGEIRKRPLIETNGETGEIVWDKGRDFATVRKVLSMPQVNIVKKTEVQTGGFSKESILPKRNSDKLIARKKDWDPKKYGGFDSPTVAYSVLVVAKVEKGKSKKLKSVKELLGITIMERSSFEKNPIDFLEAKGYKEVKKDLIIKLPKYSLFELENGRKRMLASAGELQKGNELALPSKYVNFLYLASHYEKLKGSPEDNEQKQLFVEQHKHYLDEIIEQISEFSKRVILADANLDKVLSAYNKHRDKPIREQAENIIHLFTLTNLGAPAAFKYFDTTIDRKRYTSTKEVLDATLIHQSITGLYETRIDLSQLGGDGGPAPAPAPAPAPGGTLNIEDEYRLHETSKEPDVSLGSTWLSDFPQAWAETGGMGLAVRQAPLIIPLKATSTPVSIKQYPMSQEARLGIKPHIQRLLDQGILVPCQSPWNTPLLPVKKPGTNDYRPVQDLREVNKRVEDIHPTVPNPYNLLSGLPPSHQWYTVLDLKDAFFCLRLHPTSQPLFAFEWRDPEMGISGQLTWTRLPQGFKNSPTLFNEALHRDLAGFRIQHPDLILLQYVDDLLLAATSELDCQQGTRALLQTLGDLGYRASAKKAQICQKQVKYLGYLLKEGQRWLTEARKETVMGQPIPKTPRQLREFLGTAGFCRLWIPGFAEMAAPLYPLTKPGTLFNWGPDQQKAFQEIKQALLTAPALGLPDLTKPFELFVDEKQGYAKGVLTQKLGPWRRPVAYLSKKLDPVAAGWPPCLRMVAAIAVLTKDAGKLTMGQPLVILAPHAVEALVKQPPDRWLSNARMTHYQALLLDTDRVQFGPVVALNPATLLPLPEEGLQHDCLDILAEAHGTRSDLMDQPLPDADHTWYTDGSSFLQEGQRKAGAAVTTETEVIWARALPAGTSAQRAELIALTQALKMAEGKKLNVYTDSRYAFATAHIHGEIYRRRGWLTSEGKEIKNKDEILALLKALFLPKRLSIIHCPGHQKGNSAEARGNRMADQAAREVATRETPETSTLLAGKRTADGSEFEKRTADGSEFESPKKKAKVE

SEQ ID NO: 2248 - protein, 2096 aa, synthetic construct
MPAAKRVKLDGGDKKYSIGLDIGTNSVGWAVITDEYKVPSKKFKVLGNTDRHSIKKNLIGALLFDSGETAEATRLKRTARRRYTRRKNRICYLQEIFSNEMAKVDDSFFHRLEESFLVEEDKKHERHPIFGNIVDEVAYHEKYPTIYHLRKKLVDSTDKADLRLIYLALAHMIKFRGHFLIEGDLNPDNSDVDKLFIQLVQTYNQLFEENPINASGVDAKAILSARLSKSRRLENLIAQLPGEKKNGLFGNLIALSLGLTPNFKSNFDLAEDAKLQLSKDTYDDDLDNLLAQIGDQYADLFLAAKNLSDAILLSDILRVNTEITKAPLSASMIKRYDEHHQDLTLLKALVRQQLPEKYKEIFFDQSKNGYAGYIDGGASQEEFYKFIKPILEKMDGTEELLVKLNREDLLRKQRTFDNGSIPHQIHLGELHAILRRQEDFYPFLKDNREKIEKILTFRIPYYVGPLARGNSRFAWMTRKSEETITPWNFEEVVDKGASAQSFIERMTNFDKNLPNEKVLPKHSLLYEYFTVYNELTKVKYVTEGMRKPAFLSGEQKKAIVDLLFKTNRKVTVKQLKEDYFKKIECFDSVEISGVEDRFNASLGTYHDLLKIIKDKDFLDNEENEDILEDIVLTLTLFEDREMIEERLKTYAHLFDDKVMKQLKRRRYTGWGRLSRKLINGIRDKQSGKTILDFLKSDGFANRNFMQLIHDDSLTFKEDIQKAQVSGQGDSLHEHIANLAGSPAIKKGILQTVKVVDELVKVMGRHKPENIVIEMARENQTTQKGQKNSRERMKRIEEGIKELGSQILKEHPVENTQLQNEKLYLYYLQNGRDMYVDQELDINRLSDYDVDHIVPQSFLKDDSIDNKVLTRSDKARGKSDNVPSEEVVKKMKNYWRQLLNAKLITQRKFDNLTKAERGGLSELDKAGFIKRQLVETRQITKHVAQILDSRMNTKYDENDKLIREVKVITLKSKLVSDFRKDFQFYKVREINNYHHAHDAYLNAVVGTALIKKYPKLESEFVYGDYKVYDVRKMIAKSEQEIGKATAKYFFYSNIMNFFKTEITLANGEIRKRPLIETNGETGEIVWDKGRDFATVRKVLSMPQVNIVKKTEVQTGGFSKESILPKRNSDKLIARKKDWDPKKYGGFDSPTVAYSVLVVAKVEKGKSKKLKSVKELLGITIMERSSFEKNPIDFLEAKGYKEVKKDLIIKLPKYSLFELENGRKRMLASAGELQKGNELALPSKYVNFLYLASHYEKLKGSPEDNEQKQLFVEQHKHYLDEIIEQISEFSKRVILADANLDKVLSAYNKHRDKPIREQAENIIHLFTLTNLGAPAAFKYFDTTIDRKRYTSTKEVLDATLIHQSITGLYETRIDLSQLGGDGGPAPGGSEAAAKGGTLNIEDEYRLHETSKEPDVSLGSTWLSDFPQAWAETGGMGLAVRQAPLIIPLKATSTPVSIKQYPMSQEARLGIKPHIQRLLDQGILVPCQSPWNTPLLPVKKPGTNDYRPVQDLREVNKRVEDIHPTVPNPYNLLSGLPPSHQWYTVLDLKDAFFCLRLHPTSQPLFAFEWRDPEMGISGQLTWTRLPQGFKNSPTLFNEALHRDLAGFRIQHPDLILLQYVDDLLLAATSELDCQQGTRALLQTLGDLGYRASAKKAQICQKQVKYLGYLLKEGQRWLTEARKETVMGQPIPKTPRQLREFLGTAGFCRLWIPGFAEMAAPLYPLTKPGTLFNWGPDQQKAFQEIKQALLTAPALGLPDLTKPFELFVDEKQGYAKGVLTQKLGPWRRPVAYLSKKLDPVAAGWPPCLRMVAAIAVLTKDAGKLTMGQPLVILAPHAVEALVKQPPDRWLSNARMTHYQALLLDTDRVQFGPVVALNPATLLPLPEEGLQHDCLDILAEAHGTRSDLMDQPLPDADHTWYTDGSSFLQEGQRKAGAAVTTETEVIWARALPAGTSAQRAELIALTQALKMAEGKKLNVYTDSRYAFATAHIHGEIYRRRGWLTSEGKEIKNKDEILALLKALFLPKRLSIIHCPGHQKGNSAEARGNRMADQAAREVATRETPETSTLLAGKRTADGSEFEKRTADGSEFESPKKKAKVE

SEQ ID NO: 2249 - protein, 2115 aa, synthetic construct
MPAAKRVKLDGGDKKYSIGLDIGTNSVGWAVITDEYKVPSKKFKVLGNTDRHSIKKNLIGALLFDSGETAEATRLKRTARRRYTRRKNRICYLQEIFSNEMAKVDDSFFHRLEESFLVEEDKKHERHPIFGNIVDEVAYHEKYPTIYHLRKKLVDSTDKADLRLIYLALAHMIKFRGHFLIEGDLNPDNSDVDKLFIQLVQTYNQLFEENPINASGVDAKAILSARLSKSRRLENLIAQLPGEKKNGLFGNLIALSLGLTPNFKSNFDLAEDAKLQLSKDTYDDDLDNLLAQIGDQYADLFLAAKNLSDAILLSDILRVNTEITKAPLSASMIKRYDEHHQDLTLLKALVRQQLPEKYKEIFFDQSKNGYAGYIDGGASQEEFYKFIKPILEKMDGTEELLVKLNREDLLRKQRTFDNGSIPHQIHLGELHAILRRQEDFYPFLKDNREKIEKILTFRIPYYVGPLARGNSRFAWMTRKSEETITPWNFEEVVDKGASAQSFIERMTNFDKNLPNEKVLPKHSLLYEYFTVYNELTKVKYVTEGMRKPAFLSGEQKKAIVDLLFKTNRKVTVKQLKEDYFKKIECFDSVEISGVEDRFNASLGTYHDLLKIIKDKDFLDNEENEDILEDIVLTLTLFEDREMIEERLKTYAHLFDDKVMKQLKRRRYTGWGRLSRKLINGIRDKQSGKTILDFLKSDGFANRNFMQLIHDDSLTFKEDIQKAQVSGQGDSLHEHIANLAGSPAIKKGILQTVKVVDELVKVMGRHKPENIVIEMARENQTTQKGQKNSRERMKRIEEGIKELGSQILKEHPVENTQLQNEKLYLYYLQNGRDMYVDQELDINRLSDYDVDHIVPQSFLKDDSIDNKVLTRSDKARGKSDNVPSEEVVKKMKNYWRQLLNAKLITQRKFDNLTKAERGGLSELDKAGFIKRQLVETRQITKHVAQILDSRMNTKYDENDKLIREVKVITLKSKLVSDFRKDFQFYKVREINNYHHAHDAYLNAVVGTALIKKYPKLESEFVYGDYKVYDVRKMIAKSEQEIGKATAKYFFYSNIMNFFKTEITLANGEIRKRPLIETNGETGEIVWDKGRDFATVRKVLSMPQVNIVKKTEVQTGGFSKESILPKRNSDKLIARKKDWDPKKYGGFDSPTVAYSVLVVAKVEKGKSKKLKSVKELLGITIMERSSFEKNPIDFLEAKGYKEVKKDLIIKLPKYSLFELENGRKRMLASAGELQKGNELALPSKYVNFLYLASHYEKLKGSPEDNEQKQLFVEQHKHYLDEIIEQISEFSKRVILADANLDKVLSAYNKHRDKPIREQAENIIHLFTLTNLGAPAAFKYFDTTIDRKRYTSTKEVLDATLIHQSITGLYETRIDLSQLGGDGGEAAAKEAAAKEAAAKEAAAKEAAAKEAAAKGGTLNIEDEYRLHETSKEPDVSLGSTWLSDFPQAWAETGGMGLAVRQAPLIIPLKATSTPVSIKQYPMSQEARLGIKPHIQRLLDQGILVPCQSPWNTPLLPVKKPGTNDYRPVQDLREVNKRVEDIHPTVPNPYNLLSGLPPSHQWYTVLDLKDAFFCLRLHPTSQPLFAFEWRDPEMGISGQLTWTRLPQGFKNSPTLFNEALHRDLAGFRIQHPDLILLQYVDDLLLAATSELDCQQGTRALLQTLGDLGYRASAKKAQICQKQVKYLGYLLKEGQRWLTEARKETVMGQPIPKTPRQLREFLGTAGFCRLWIPGFAEMAAPLYPLTKPGTLFNWGPDQQKAFQEIKQALLTAPALGLPDLTKPFELFVDEKQGYAKGVLTQKLGPWRRPVAYLSKKLDPVAAGWPPCLRMVAAIAVLTKDAGKLTMGQPLVILAPHAVEALVKQPPDRWLSNARMTHYQALLLDTDRVQFGPVVALNPATLLPLPEEGLQHDCLDILAEAHGTRSDLMDQPLPDADHTWYTDGSSFLQEGQRKAGAAVTTETEVIWARALPAGTSAQRAELIALTQALKMAEGKKLNVYTDSRYAFATAHIHGEIYRRRGWLTSEGKEIKNKDEILALLKALFLPKRLSIIHCPGHQKGNSAEARGNRMADQAAREVATRETPETSTLLAGKRTADGSEFEKRTADGSEFESPKKKAKVE

SEQ ID NO: 2250 - protein, 2097 aa, synthetic construct
MPAAKRVKLDGGDKKYSIGLDIGTNSVGWAVITDEYKVPSKKFKVLGNTDRHSIKKNLIGALLFDSGETAEATRLKRTARRRYTRRKNRICYLQEIFSNEMAKVDDSFFHRLEESFLVEEDKKHERHPIFGNIVDEVAYHEKYPTIYHLRKKLVDSTDKADLRLIYLALAHMIKFRGHFLIEGDLNPDNSDVDKLFIQLVQTYNQLFEENPINASGVDAKAILSARLSKSRRLENLIAQLPGEKKNGLFGNLIALSLGLTPNFKSNFDLAEDAKLQLSKDTYDDDLDNLLAQIGDQYADLFLAAKNLSDAILLSDILRVNTEITKAPLSASMIKRYDEHHQDLTLLKALVRQQLPEKYKEIFFDQSKNGYAGYIDGGASQEEFYKFIKPILEKMDGTEELLVKLNREDLLRKQRTFDNGSIPHQIHLGELHAILRRQEDFYPFLKDNREKIEKILTFRIPYYVGPLARGNSRFAWMTRKSEETITPWNFEEVVDKGASAQSFIERMTNFDKNLPNEKVLPKHSLLYEYFTVYNELTKVKYVTEGMRKPAFLSGEQKKAIVDLLFKTNRKVTVKQLKEDYFKKIECFDSVEISGVEDRFNASLGTYHDLLKIIKDKDFLDNEENEDILEDIVLTLTLFEDREMIEERLKTYAHLFDDKVMKQLKRRRYTGWGRLSRKLINGIRDKQSGKTILDFLKSDGFANRNFMQLIHDDSLTFKEDIQKAQVSGQGDSLHEHIANLAGSPAIKKGILQTVKVVDELVKVMGRHKPENIVIEMARENQTTQKGQKNSRERMKRIEEGIKELGSQILKEHPVENTQLQNEKLYLYYLQNGRDMYVDQELDINRLSDYDVDHIVPQSFLKDDSIDNKVLTRSDKARGKSDNVPSEEVVKKMKNYWRQLLNAKLITQRKFDNLTKAERGGLSELDKAGFIKRQLVETRQITKHVAQILDSRMNTKYDENDKLIREVKVITLKSKLVSDFRKDFQFYKVREINNYHHAHDAYLNAVVGTALIKKYPKLESEFVYGDYKVYDVRKMIAKSEQEIGKATAKYFFYSNIMNFFKTEITLANGEIRKRPLIETNGETGEIVWDKGRDFATVRKVLSMPQVNIVKKTEVQTGGFSKESILPKRNSDKLIARKKDWDPKKYGGFDSPTVAYSVLVVAKVEKGKSKKLKSVKELLGITIMERSSFEKNPIDFLEAKGYKEVKKDLIIKLPKYSLFELENGRKRMLASAGELQKGNELALPSKYVNFLYLASHYEKLKGSPEDNEQKQLFVEQHKHYLDEIIEQISEFSKRVILADANLDKVLSAYNKHRDKPIREQAENIIHLFTLTNLGAPAAFKYFDTTIDRKRYTSTKEVLDATLIHQSITGLYETRIDLSQLGGDGGGGSGGSGGSGGSGGTLNIEDEYRLHETSKEPDVSLGSTWLSDFPQAWAETGGMGLAVRQAPLIIPLKATSTPVSIKQYPMSQEARLGIKPHIQRLLDQGILVPCQSPWNTPLLPVKKPGTNDYRPVQDLREVNKRVEDIHPTVPNPYNLLSGLPPSHQWYTVLDLKDAFFCLRLHPTSQPLFAFEWRDPEMGISGQLTWTRLPQGFKNSPTLFNEALHRDLAGFRIQHPDLILLQYVDDLLLAATSELDCQQGTRALLQTLGDLGYRASAKKAQICQKQVKYLGYLLKEGQRWLTEARKETVMGQPIPKTPRQLREFLGTAGFCRLWIPGFAEMAAPLYPLTKPGTLFNWGPDQQKAFQEIKQALLTAPALGLPDLTKPFELFVDEKQGYAKGVLTQKLGPWRRPVAYLSKKLDPVAAGWPPCLRMVAAIAVLTKDAGKLTMGQPLVILAPHAVEALVKQPPDRWLSNARMTHYQALLLDTDRVQFGPVVALNPATLLPLPEEGLQHDCLDILAEAHGTRSDLMDQPLPDADHTWYTDGSSFLQEGQRKAGAAVTTETEVIWARALPAGTSAQRAELIALTQALKMAEGKKLNVYTDSRYAFATAHIHGEIYRRRGWLTSEGKEIKNKDEILALLKALFLPKRLSIIHCPGHQKGNSAEARGNRMADQAAREVATRETPETSTLLAGKRTADGSEFEKRTADGSEFESPKKKAKVE

SEQ ID NO: 2251 - protein, 2096 aa, synthetic construct
MPAAKRVKLDGGDKKYSIGLDIGTNSVGWAVITDEYKVPSKKFKVLGNTDRHSIKKNLIGALLFDSGETAEATRLKRTARRRYTRRKNRICYLQEIFSNEMAKVDDSFFHRLEESFLVEEDKKHERHPIFGNIVDEVAYHEKYPTIYHLRKKLVDSTDKADLRLIYLALAHMIKFRGHFLIEGDLNPDNSDVDKLFIQLVQTYNQLFEENPINASGVDAKAILSARLSKSRRLENLIAQLPGEKKNGLFGNLIALSLGLTPNFKSNFDLAEDAKLQLSKDTYDDDLDNLLAQIGDQYADLFLAAKNLSDAILLSDILRVNTEITKAPLSASMIKRYDEHHQDLTLLKALVRQQLPEKYKEIFFDQSKNGYAGYIDGGASQEEFYKFIKPILEKMDGTEELLVKLNREDLLRKQRTFDNGSIPHQIHLGELHAILRRQEDFYPFLKDNREKIEKILTFRIPYYVGPLARGNSRFAWMTRKSEETITPWNFEEVVDKGASAQSFIERMTNFDKNLPNEKVLPKHSLLYEYFTVYNELTKVKYVTEGMRKPAFLSGEQKKAIVDLLFKTNRKVTVKQLKEDYFKKIECFDSVEISGVEDRFNASLGTYHDLLKIIKDKDFLDNEENEDILEDIVLTLTLFEDREMIEERLKTYAHLFDDKVMKQLKRRRYTGWGRLSRKLINGIRDKQSGKTILDFLKSDGFANRNFMQLIHDDSLTFKEDIQKAQVSGQGDSLHEHIANLAGSPAIKKGILQTVKVVDELVKVMGRHKPENIVIEMARENQTTQKGQKNSRERMKRIEEGIKELGSQILKEHPVENTQLQNEKLYLYYLQNGRDMYVDQELDINRLSDYDVDHIVPQSFLKDDSIDNKVLTRSDKARGKSDNVPSEEVVKKMKNYWRQLLNAKLITQRKFDNLTKAERGGLSELDKAGFIKRQLVETRQITKHVAQILDSRMNTKYDENDKLIREVKVITLKSKLVSDFRKDFQFYKVREINNYHHAHDAYLNAVVGTALIKKYPKLESEFVYGDYKVYDVRKMIAKSEQEIGKATAKYFFYSNIMNFFKTEITLANGEIRKRPLIETNGETGEIVWDKGRDFATVRKVLSMPQVNIVKKTEVQTGGFSKESILPKRNSDKLIARKKDWDPKKYGGFDSPTVAYSVLVVAKVEKGKSKKLKSVKELLGITIMERSSFEKNPIDFLEAKGYKEVKKDLIIKLPKYSLFELENGRKRMLASAGELQKGNELALPSKYVNFLYLASHYEKLKGSPEDNEQKQLFVEQHKHYLDEIIEQISEFSKRVILADANLDKVLSAYNKHRDKPIREQAENIIHLFTLTNLGAPAAFKYFDTTIDRKRYTSTKEVLDATLIHQSITGLYETRIDLSQLGGDGGGGSEAAAKPAPGGTLNIEDEYRLHETSKEPDVSLGSTWLSDFPQAWAETGGMGLAVRQAPLIIPLKATSTPVSIKQYPMSQEARLGIKPHIQRLLDQGILVPCQSPWNTPLLPVKKPGTNDYRPVQDLREVNKRVEDIHPTVPNPYNLLSGLPPSHQWYTVLDLKDAFFCLRLHPTSQPLFAFEWRDPEMGISGQLTWTRLPQGFKNSPTLFNEALHRDLAGFRIQHPDLILLQYVDDLLLAATSELDCQQGTRALLQTLGDLGYRASAKKAQICQKQVKYLGYLLKEGQRWLTEARKETVMGQPIPKTPRQLREFLGTAGFCRLWIPGFAEMAAPLYPLTKPGTLFNWGPDQQKAFQEIKQALLTAPALGLPDLTKPFELFVDEKQGYAKGVLTQKLGPWRRPVAYLSKKLDPVAAGWPPCLRMVAAIAVLTKDAGKLTMGQPLVILAPHAVEALVKQPPDRWLSNARMTHYQALLLDTDRVQFGPVVALNPATLLPLPEEGLQHDCLDILAEAHGTRSDLMDQPLPDADHTWYTDGSSFLQEGQRKAGAAVTTETEVIWARALPAGTSAQRAELIALTQALKMAEGKKLNVYTDSRYAFATAHIHGEIYRRRGWLTSEGKEIKNKDEILALLKALFLPKRLSIIHCPGHQKGNSAEARGNRMADQAAREVATRETPETSTLLAGKRTADGSEFEKRTADGSEFESPKKKAKVE

SEQ ID NO: 2252 - protein, 2100 aa, synthetic construct
MPAAKRVKLDGGDKKYSIGLDIGTNSVGWAVITDEYKVPSKKFKVLGNTDRHSIKKNLIGALLFDSGETAEATRLKRTARRRYTRRKNRICYLQEIFSNEMAKVDDSFFHRLEESFLVEEDKKHERHPIFGNIVDEVAYHEKYPTIYHLRKKLVDSTDKADLRLIYLALAHMIKFRGHFLIEGDLNPDNSDVDKLFIQLVQTYNQLFEENPINASGVDAKAILSARLSKSRRLENLIAQLPGEKKNGLFGNLIALSLGLTPNFKSNFDLAEDAKLQLSKDTYDDDLDNLLAQIGDQYADLFLAAKNLSDAILLSDILRVNTEITKAPLSASMIKRYDEHHQDLTLLKALVRQQLPEKYKEIFFDQSKNGYAGYIDGGASQEEFYKFIKPILEKMDGTEELLVKLNREDLLRKQRTFDNGSIPHQIHLGELHAILRRQEDFYPFLKDNREKIEKILTFRIPYYVGPLARGNSRFAWMTRKSEETITPWNFEEVVDKGASAQSFIERMTNFDKNLPNEKVLPKHSLLYEYFTVYNELTKVKYVTEGMRKPAFLSGEQKKAIVDLLFKTNRKVTVKQLKEDYFKKIECFDSVEISGVEDRFNASLGTYHDLLKIIKDKDFLDNEENEDILEDIVLTLTLFEDREMIEERLKTYAHLFDDKVMKQLKRRRYTGWGRLSRKLINGIRDKQSGKTILDFLKSDGFANRNFMQLIHDDSLTFKEDIQKAQVSGQGDSLHEHIANLAGSPAIKKGILQTVKVVDELVKVMGRHKPENIVIEMARENQTTQKGQKNSRERMKRIEEGIKELGSQILKEHPVENTQLQNEKLYLYYLQNGRDMYVDQELDINRLSDYDVDHIVPQSFLKDDSIDNKVLTRSDKARGKSDNVPSEEVVKKMKNYWRQLLNAKLITQRKFDNLTKAERGGLSELDKAGFIKRQLVETRQITKHVAQILDSRMNTKYDENDKLIREVKVITLKSKLVSDFRKDFQFYKVREINNYHHAHDAYLNAVVGTALIKKYPKLESEFVYGDYKVYDVRKMIAKSEQEIGKATAKYFFYSNIMNFFKTEITLANGEIRKRPLIETNGETGEIVWDKGRDFATVRKVLSMPQVNIVKKTEVQTGGFSKESILPKRNSDKLIARKKDWDPKKYGGFDSPTVAYSVLVVAKVEKGKSKKLKSVKELLGITIMERSSFEKNPIDFLEAKGYKEVKKDLIIKLPKYSLFELENGRKRMLASAGELQKGNELALPSKYVNFLYLASHYEKLKGSPEDNEQKQLFVEQHKHYLDEIIEQISEFSKRVILADANLDKVLSAYNKHRDKPIREQAENIIHLFTLTNLGAPAAFKYFDTTIDRKRYTSTKEVLDATLIHQSITGLYETRIDLSQLGGDGGEAAAKEAAAKEAAAKGGTLNIEDEYRLHETSKEPDVSLGSTWLSDFPQAWAETGGMGLAVRQAPLIIPLKATSTPVSIKQYPMSQEARLGIKPHIQRLLDQGILVPCQSPWNTPLLPVKKPGTNDYRPVQDLREVNKRVEDIHPTVPNPYNLLSGLPPSHQWYTVLDLKDAFFCLRLHPTSQPLFAFEWRDPEMGISGQLTWTRLPQGFKNSPTLFNEALHRDLAGFRIQHPDLILLQYVDDLLLAATSELDCQQGTRALLQTLGDLGYRASAKKAQICQKQVKYLGYLLKEGQRWLTEARKETVMGQPIPKTPRQLREFLGTAGFCRLWIPGFAEMAAPLYPLTKPGTLFNWGPDQQKAFQEIKQALLTAPALGLPDLTKPFELFVDEKQGYAKGVLTQKLGPWRRPVAYLSKKLDPVAAGWPPCLRMVAAIAVLTKDAGKLTMGQPLVILAPHAVEALVKQPPDRWLSNARMTHYQALLLDTDRVQFGPVVALNPATLLPLPEEGLQHDCLDILAEAHGTRSDLMDQPLPDADHTWYTDGSSFLQEGQRKAGAAVTTETEVIWARALPAGTSAQRAELIALTQALKMAEGKKLNVYTDSRYAFATAHIHGEIYRRRGWLTSEGKEIKNKDEILALLKALFLPKRLSIIHCPGHQKGNSAEARGNRMADQAAREVATRETPETSTLLAGKRTADGSEFEKRTADGSEFESPKKKAKVE

SEQ ID NO: 2253 - protein, 2096 aa, synthetic construct
MPAAKRVKLDGGDKKYSIGLDIGTNSVGWAVITDEYKVPSKKFKVLGNTDRHSIKKNLIGALLFDSGETAEATRLKRTARRRYTRRKNRICYLQEIFSNEMAKVDDSFFHRLEESFLVEEDKKHERHPIFGNIVDEVAYHEKYPTIYHLRKKLVDSTDKADLRLIYLALAHMIKFRGHFLIEGDLNPDNSDVDKLFIQLVQTYNQLFEENPINASGVDAKAILSARLSKSRRLENLIAQLPGEKKNGLFGNLIALSLGLTPNFKSNFDLAEDAKLQLSKDTYDDDLDNLLAQIGDQYADLFLAAKNLSDAILLSDILRVNTEITKAPLSASMIKRYDEHHQDLTLLKALVRQQLPEKYKEIFFDQSKNGYAGYIDGGASQEEFYKFIKPILEKMDGTEELLVKLNREDLLRKQRTFDNGSIPHQIHLGELHAILRRQEDFYPFLKDNREKIEKILTFRIPYYVGPLARGNSRFAWMTRKSEETITPWNFEEVVDKGASAQSFIERMTNFDKNLPNEKVLPKHSLLYEYFTVYNELTKVKYVTEGMRKPAFLSGEQKKAIVDLLFKTNRKVTVKQLKEDYFKKIECFDSVEISGVEDRFNASLGTYHDLLKIIKDKDFLDNEENEDILEDIVLTLTLFEDREMIEERLKTYAHLFDDKVMKQLKRRRYTGWGRLSRKLINGIRDKQSGKTILDFLKSDGFANRNFMQLIHDDSLTFKEDIQKAQVSGQGDSLHEHIANLAGSPAIKKGILQTVKVVDELVKVMGRHKPENIVIEMARENQTTQKGQKNSRERMKRIEEGIKELGSQILKEHPVENTQLQNEKLYLYYLQNGRDMYVDQELDINRLSDYDVDHIVPQSFLKDDSIDNKVLTRSDKARGKSDNVPSEEVVKKMKNYWRQLLNAKLITQRKFDNLTKAERGGLSELDKAGFIKRQLVETRQITKHVAQILDSRMNTKYDENDKLIREVKVITLKSKLVSDFRKDFQFYKVREINNYHHAHDAYLNAVVGTALIKKYPKLESEFVYGDYKVYDVRKMIAKSEQEIGKATAKYFFYSNIMNFFKTEITLANGEIRKRPLIETNGETGEIVWDKGRDFATVRKVLSMPQVNIVKKTEVQTGGFSKESILPKRNSDKLIARKKDWDPKKYGGFDSPTVAYSVLVVAKVEKGKSKKLKSVKELLGITIMERSSFEKNPIDFLEAKGYKEVKKDLIIKLPKYSLFELENGRKRMLASAGELQKGNELALPSKYVNFLYLASHYEKLKGSPEDNEQKQLFVEQHKHYLDEIIEQISEFSKRVILADANLDKVLSAYNKHRDKPIREQAENIIHLFTLTNLGAPAAFKYFDTTIDRKRYTSTKEVLDATLIHQSITGLYETRIDLSQLGGDGGPAPEAAAKGSSGGTLNIEDEYRLHETSKEPDVSLGSTWLSDFPQAWAETGGMGLAVRQAPLIIPLKATSTPVSIKQYPMSQEARLGIKPHIQRLLDQGILVPCQSPWNTPLLPVKKPGTNDYRPVQDLREVNKRVEDIHPTVPNPYNLLSGLPPSHQWYTVLDLKDAFFCLRLHPTSQPLFAFEWRDPEMGISGQLTWTRLPQGFKNSPTLFNEALHRDLAGFRIQHPDLILLQYVDDLLLAATSELDCQQGTRALLQTLGDLGYRASAKKAQICQKQVKYLGYLLKEGQRWLTEARKETVMGQPIPKTPRQLREFLGTAGFCRLWIPGFAEMAAPLYPLTKPGTLFNWGPDQQKAFQEIKQALLTAPALGLPDLTKPFELFVDEKQGYAKGVLTQKLGPWRRPVAYLSKKLDPVAAGWPPCLRMVAAIAVLTKDAGKLTMGQPLVILAPHAVEALVKQPPDRWLSNARMTHYQALLLDTDRVQFGPVVALNPATLLPLPEEGLQHDCLDILAEAHGTRSDLMDQPLPDADHTWYTDGSSFLQEGQRKAGAAVTTETEVIWARALPAGTSAQRAELIALTQALKMAEGKKLNVYTDSRYAFATAHIHGEIYRRRGWLTSEGKEIKNKDEILALLKALFLPKRLSIIHCPGHQKGNSAEARGNRMADQAAREVATRETPETSTLLAGKRTADGSEFEKRTADGSEFESPKKKAKVE

SEQ ID NO: 2254 - protein, 2090 aa, synthetic construct
MPAAKRVKLDGGDKKYSIGLDIGTNSVGWAVITDEYKVPSKKFKVLGNTDRHSIKKNLIGALLFDSGETAEATRLKRTARRRYTRRKNRICYLQEIFSNEMAKVDDSFFHRLEESFLVEEDKKHERHPIFGNIVDEVAYHEKYPTIYHLRKKLVDSTDKADLRLIYLALAHMIKFRGHFLIEGDLNPDNSDVDKLFIQLVQTYNQLFEENPINASGVDAKAILSARLSKSRRLENLIAQLPGEKKNGLFGNLIALSLGLTPNFKSNFDLAEDAKLQLSKDTYDDDLDNLLAQIGDQYADLFLAAKNLSDAILLSDILRVNTEITKAPLSASMIKRYDEHHQDLTLLKALVRQQLPEKYKEIFFDQSKNGYAGYIDGGASQEEFYKFIKPILEKMDGTEELLVKLNREDLLRKQRTFDNGSIPHQIHLGELHAILRRQEDFYPFLKDNREKIEKILTFRIPYYVGPLARGNSRFAWMTRKSEETITPWNFEEVVDKGASAQSFIERMTNFDKNLPNEKVLPKHSLLYEYFTVYNELTKVKYVTEGMRKPAFLSGEQKKAIVDLLFKTNRKVTVKQLKEDYFKKIECFDSVEISGVEDRFNASLGTYHDLLKIIKDKDFLDNEENEDILEDIVLTLTLFEDREMIEERLKTYAHLFDDKVMKQLKRRRYTGWGRLSRKLINGIRDKQSGKTILDFLKSDGFANRNFMQLIHDDSLTFKEDIQKAQVSGQGDSLHEHIANLAGSPAIKKGILQTVKVVDELVKVMGRHKPENIVIEMARENQTTQKGQKNSRERMKRIEEGIKELGSQILKEHPVENTQLQNEKLYLYYLQNGRDMYVDQELDINRLSDYDVDHIVPQSFLKDDSIDNKVLTRSDKARGKSDNVPSEEVVKKMKNYWRQLLNAKLITQRKFDNLTKAERGGLSELDKAGFIKRQLVETRQITKHVAQILDSRMNTKYDENDKLIREVKVITLKSKLVSDFRKDFQFYKVREINNYHHAHDAYLNAVVGTALIKKYPKLESEFVYGDYKVYDVRKMIAKSEQEIGKATAKYFFYSNIMNFFKTEITLANGEIRKRPLIETNGETGEIVWDKGRDFATVRKVLSMPQVNIVKKTEVQTGGFSKESILPKRNSDKLIARKKDWDPKKYGGFDSPTVAYSVLVVAKVEKGKSKKLKSVKELLGITIMERSSFEKNPIDFLEAKGYKEVKKDLIIKLPKYSLFELENGRKRMLASAGELQKGNELALPSKYVNFLYLASHYEKLKGSPEDNEQKQLFVEQHKHYLDEIIEQISEFSKRVILADANLDKVLSAYNKHRDKPIREQAENIIHLFTLTNLGAPAAFKYFDTTIDRKRYTSTKEVLDATLIHQSITGLYETRIDLSQLGGDGGGGGGGGGTLNIEDEYRLHETSKEPDVSLGSTWLSDFPQAWAETGGMGLAVRQAPLIIPLKATSTPVSIKQYPMSQEARLGIKPHIQRLLDQGILVPCQSPWNTPLLPVKKPGTNDYRPVQDLREVNKRVEDIHPTVPNPYNLLSGLPPSHQWYTVLDLKDAFFCLRLHPTSQPLFAFEWRDPEMGISGQLTWTRLPQGFKNSPTLFNEALHRDLAGFRIQHPDLILLQYVDDLLLAATSELDCQQGTRALLQTLGDLGYRASAKKAQICQKQVKYLGYLLKEGQRWLTEARKETVMGQPIPKTPRQLREFLGTAGFCRLWIPGFAEMAAPLYPLTKPGTLFNWGPDQQKAFQEIKQALLTAPALGLPDLTKPFELFVDEKQGYAKGVLTQKLGPWRRPVAYLSKKLDPVAAGWPPCLRMVAAIAVLTKDAGKLTMGQPLVILAPHAVEALVKQPPDRWLSNARMTHYQALLLDTDRVQFGPVVALNPATLLPLPEEGLQHDCLDILAEAHGTRSDLMDQPLPDADHTWYTDGSSFLQEGQRKAGAAVTTETEVIWARALPAGTSAQRAELIALTQALKMAEGKKLNVYTDSRYAFATAHIHGEIYRRRGWLTSEGKEIKNKDEILALLKALFLPKRLSIIHCPGHQKGNSAEARGNRMADQAAREVATRETPETSTLLAGKRTADGSEFEKRTADGSEFESPKKKAKVE

SEQ ID NO: 2255 - protein, 2096 aa, synthetic construct
MPAAKRVKLDGGDKKYSIGLDIGTNSVGWAVITDEYKVPSKKFKVLGNTDRHSIKKNLIGALLFDSGETAEATRLKRTARRRYTRRKNRICYLQEIFSNEMAKVDDSFFHRLEESFLVEEDKKHERHPIFGNIVDEVAYHEKYPTIYHLRKKLVDSTDKADLRLIYLALAHMIKFRGHFLIEGDLNPDNSDVDKLFIQLVQTYNQLFEENPINASGVDAKAILSARLSKSRRLENLIAQLPGEKKNGLFGNLIALSLGLTPNFKSNFDLAEDAKLQLSKDTYDDDLDNLLAQIGDQYADLFLAAKNLSDAILLSDILRVNTEITKAPLSASMIKRYDEHHQDLTLLKALVRQQLPEKYKEIFFDQSKNGYAGYIDGGASQEEFYKFIKPILEKMDGTEELLVKLNREDLLRKQRTFDNGSIPHQIHLGELHAILRRQEDFYPFLKDNREKIEKILTFRIPYYVGPLARGNSRFAWMTRKSEETITPWNFEEVVDKGASAQSFIERMTNFDKNLPNEKVLPKHSLLYEYFTVYNELTKVKYVTEGMRKPAFLSGEQKKAIVDLLFKTNRKVTVKQLKEDYFKKIECFDSVEISGVEDRFNASLGTYHDLLKIIKDKDFLDNEENEDILEDIVLTLTLFEDREMIEERLKTYAHLFDDKVMKQLKRRRYTGWGRLSRKLINGIRDKQSGKTILDFLKSDGFANRNFMQLIHDDSLTFKEDIQKAQVSGQGDSLHEHIANLAGSPAIKKGILQTVKVVDELVKVMGRHKPENIVIEMARENQTTQKGQKNSRERMKRIEEGIKELGSQILKEHPVENTQLQNEKLYLYYLQNGRDMYVDQELDINRLSDYDVDHIVPQSFLKDDSIDNKVLTRSDKARGKSDNVPSEEVVKKMKNYWRQLLNAKLITQRKFDNLTKAERGGLSELDKAGFIKRQLVETRQITKHVAQILDSRMNTKYDENDKLIREVKVITLKSKLVSDFRKDFQFYKVREINNYHHAHDAYLNAVVGTALIKKYPKLESEFVYGDYKVYDVRKMIAKSEQEIGKATAKYFFYSNIMNFFKTEITLANGEIRKRPLIETNGETGEIVWDKGRDFATVRKVLSMPQVNIVKKTEVQTGGFSKESILPKRNSDKLIARKKDWDPKKYGGFDSPTVAYSVLVVAKVEKGKSKKLKSVKELLGITIMERSSFEKNPIDFLEAKGYKEVKKDLIIKLPKYSLFELENGRKRMLASAGELQKGNELALPSKYVNFLYLASHYEKLKGSPEDNEQKQLFVEQHKHYLDEIIEQISEFSKRVILADANLDKVLSAYNKHRDKPIREQAENIIHLFTLTNLGAPAAFKYFDTTIDRKRYTSTKEVLDATLIHQSITGLYETRIDLSQLGGDGGEAAAKPAPGSSGGTLNIEDEYRLHETSKEPDVSLGSTWLSDFPQAWAETGGMGLAVRQAPLIIPLKATSTPVSIKQYPMSQEARLGIKPHIQRLLDQGILVPCQSPWNTPLLPVKKPGTNDYRPVQDLREVNKRVEDIHPTVPNPYNLLSGLPPSHQWYTVLDLKDAFFCLRLHPTSQPLFAFEWRDPEMGISGQLTWTRLPQGFKNSPTLFNEALHRDLAGFRIQHPDLILLQYVDDLLLAATSELDCQQGTRALLQTLGDLGYRASAKKAQICQKQVKYLGYLLKEGQRWLTEARKETVMGQPIPKTPRQLREFLGTAGFCRLWIPGFAEMAAPLYPLTKPGTLFNWGPDQQKAFQEIKQALLTAPALGLPDLTKPFELFVDEKQGYAKGVLTQKLGPWRRPVAYLSKKLDPVAAGWPPCLRMVAAIAVLTKDAGKLTMGQPLVILAPHAVEALVKQPPDRWLSNARMTHYQALLLDTDRVQFGPVVALNPATLLPLPEEGLQHDCLDILAEAHGTRSDLMDQPLPDADHTWYTDGSSFLQEGQRKAGAAVTTETEVIWARALPAGTSAQRAELIALTQALKMAEGKKLNVYTDSRYAFATAHIHGEIYRRRGWLTSEGKEIKNKDEILALLKALFLPKRLSIIHCPGHQKGNSAEARGNRMADQAAREVATRETPETSTLLAGKRTADGSEFEKRTADGSEFESPKKKAKVE

SEQ ID NO: 2256 - protein, 2096 aa, synthetic construct
MPAAKRVKLDGGDKKYSIGLDIGTNSVGWAVITDEYKVPSKKFKVLGNTDRHSIKKNLIGALLFDSGETAEATRLKRTARRRYTRRKNRICYLQEIFSNEMAKVDDSFFHRLEESFLVEEDKKHERHPIFGNIVDEVAYHEKYPTIYHLRKKLVDSTDKADLRLIYLALAHMIKFRGHFLIEGDLNPDNSDVDKLFIQLVQTYNQLFEENPINASGVDAKAILSARLSKSRRLENLIAQLPGEKKNGLFGNLIALSLGLTPNFKSNFDLAEDAKLQLSKDTYDDDLDNLLAQIGDQYADLFLAAKNLSDAILLSDILRVNTEITKAPLSASMIKRYDEHHQDLTLLKALVRQQLPEKYKEIFFDQSKNGYAGYIDGGASQEEFYKFIKPILEKMDGTEELLVKLNREDLLRKQRTFDNGSIPHQIHLGELHAILRRQEDFYPFLKDNREKIEKILTFRIPYYVGPLARGNSRFAWMTRKSEETITPWNFEEVVDKGASAQSFIERMTNFDKNLPNEKVLPKHSLLYEYFTVYNELTKVKYVTEGMRKPAFLSGEQKKAIVDLLFKTNRKVTVKQLKEDYFKKIECFDSVEISGVEDRFNASLGTYHDLLKIIKDKDFLDNEENEDILEDIVLTLTLFEDREMIEERLKTYAHLFDDKVMKQLKRRRYTGWGRLSRKLINGIRDKQSGKTILDFLKSDGFANRNFMQLIHDDSLTFKEDIQKAQVSGQGDSLHEHIANLAGSPAIKKGILQTVKVVDELVKVMGRHKPENIVIEMARENQTTQKGQKNSRERMKRIEEGIKELGSQILKEHPVENTQLQNEKLYLYYLQNGRDMYVDQELDINRLSDYDVDHIVPQSFLKDDSIDNKVLTRSDKARGKSDNVPSEEVVKKMKNYWRQLLNAKLITQRKFDNLTKAERGGLSELDKAGFIKRQLVETRQITKHVAQILDSRMNTKYDENDKLIREVKVITLKSKLVSDFRKDFQFYKVREINNYHHAHDAYLNAVVGTALIKKYPKLESEFVYGDYKVYDVRKMIAKSEQEIGKATAKYFFYSNIMNFFKTEITLANGEIRKRPLIETNGETGEIVWDKGRDFATVRKVLSMPQVNIVKKTEVQTGGFSKESILPKRNSDKLIARKKDWDPKKYGGFDSPTVAYSVLVVAKVEKGKSKKLKSVKELLGITIMERSSFEKNPIDFLEAKGYKEVKKDLIIKLPKYSLFELENGRKRMLASAGELQKGNELALPSKYVNFLYLASHYEKLKGSPEDNEQKQLFVEQHKHYLDEIIEQISEFSKRVILADANLDKVLSAYNKHRDKPIREQAENIIHLFTLTNLGAPAAFKYFDTTIDRKRYTSTKEVLDATLIHQSITGLYETRIDLSQLGGDGGEAAAKGGGGGSGGTLNIEDEYRLHETSKEPDVSLGSTWLSDFPQAWAETGGMGLAVRQAPLIIPLKATSTPVSIKQYPMSQEARLGIKPHIQRLLDQGILVPCQSPWNTPLLPVKKPGTNDYRPVQDLREVNKRVEDIHPTVPNPYNLLSGLPPSHQWYTVLDLKDAFFCLRLHPTSQPLFAFEWRDPEMGISGQLTWTRLPQGFKNSPTLFNEALHRDLAGFRIQHPDLILLQYVDDLLLAATSELDCQQGTRALLQTLGDLGYRASAKKAQICQKQVKYLGYLLKEGQRWLTEARKETVMGQPIPKTPRQLREFLGTAGFCRLWIPGFAEMAAPLYPLTKPGTLFNWGPDQQKAFQEIKQALLTAPALGLPDLTKPFELFVDEKQGYAKGVLTQKLGPWRRPVAYLSKKLDPVAAGWPPCLRMVAAIAVLTKDAGKLTMGQPLVILAPHAVEALVKQPPDRWLSNARMTHYQALLLDTDRVQFGPVVALNPATLLPLPEEGLQHDCLDILAEAHGTRSDLMDQPLPDADHTWYTDGSSFLQEGQRKAGAAVTTETEVIWARALPAGTSAQRAELIALTQALKMAEGKKLNVYTDSRYAFATAHIHGEIYRRRGWLTSEGKEIKNKDEILALLKALFLPKRLSIIHCPGHQKGNSAEARGNRMADQAAREVATRETPETSTLLAGKRTADGSEFEKRTADGSEFESPKKKAKVE

SEQ ID NO: 2257 - protein, 2096 aa, synthetic construct
MPAAKRVKLDGGDKKYSIGLDIGTNSVGWAVITDEYKVPSKKFKVLGNTDRHSIKKNLIGALLFDSGETAEATRLKRTARRRYTRRKNRICYLQEIFSNEMAKVDDSFFHRLEESFLVEEDKKHERHPIFGNIVDEVAYHEKYPTIYHLRKKLVDSTDKADLRLIYLALAHMIKFRGHFLIEGDLNPDNSDVDKLFIQLVQTYNQLFEENPINASGVDAKAILSARLSKSRRLENLIAQLPGEKKNGLFGNLIALSLGLTPNFKSNFDLAEDAKLQLSKDTYDDDLDNLLAQIGDQYADLFLAAKNLSDAILLSDILRVNTEITKAPLSASMIKRYDEHHQDLTLLKALVRQQLPEKYKEIFFDQSKNGYAGYIDGGASQEEFYKFIKPILEKMDGTEELLVKLNREDLLRKQRTFDNGSIPHQIHLGELHAILRRQEDFYPFLKDNREKIEKILTFRIPYYVGPLARGNSRFAWMTRKSEETITPWNFEEVVDKGASAQSFIERMTNFDKNLPNEKVLPKHSLLYEYFTVYNELTKVKYVTEGMRKPAFLSGEQKKAIVDLLFKTNRKVTVKQLKEDYFKKIECFDSVEISGVEDRFNASLGTYHDLLKIIKDKDFLDNEENEDILEDIVLTLTLFEDREMIEERLKTYAHLFDDKVMKQLKRRRYTGWGRLSRKLINGIRDKQSGKTILDFLKSDGFANRNFMQLIHDDSLTFKEDIQKAQVSGQGDSLHEHIANLAGSPAIKKGILQTVKVVDELVKVMGRHKPENIVIEMARENQTTQKGQKNSRERMKRIEEGIKELGSQILKEHPVENTQLQNEKLYLYYLQNGRDMYVDQELDINRLSDYDVDHIVPQSFLKDDSIDNKVLTRSDKARGKSDNVPSEEVVKKMKNYWRQLLNAKLITQRKFDNLTKAERGGLSELDKAGFIKRQLVETRQITKHVAQILDSRMNTKYDENDKLIREVKVITLKSKLVSDFRKDFQFYKVREINNYHHAHDAYLNAVVGTALIKKYPKLESEFVYGDYKVYDVRKMIAKSEQEIGKATAKYFFYSNIMNFFKTEITLANGEIRKRPLIETNGETGEIVWDKGRDFATVRKVLSMPQVNIVKKTEVQTGGFSKESILPKRNSDKLIARKKDWDPKKYGGFDSPTVAYSVLVVAKVEKGKSKKLKSVKELLGITIMERSSFEKNPIDFLEAKGYKEVKKDLIIKLPKYSLFELENGRKRMLASAGELQKGNELALPSKYVNFLYLASHYEKLKGSPEDNEQKQLFVEQHKHYLDEIIEQISEFSKRVILADANLDKVLSAYNKHRDKPIREQAENIIHLFTLTNLGAPAAFKYFDTTIDRKRYTSTKEVLDATLIHQSITGLYETRIDLSQLGGDGGEAAAKGGSPAPGGTLNIEDEYRLHETSKEPDVSLGSTWLSDFPQAWAETGGMGLAVRQAPLIIPLKATSTPVSIKQYPMSQEARLGIKPHIQRLLDQGILVPCQSPWNTPLLPVKKPGTNDYRPVQDLREVNKRVEDIHPTVPNPYNLLSGLPPSHQWYTVLDLKDAFFCLRLHPTSQPLFAFEWRDPEMGISGQLTWTRLPQGFKNSPTLFNEALHRDLAGFRIQHPDLILLQYVDDLLLAATSELDCQQGTRALLQTLGDLGYRASAKKAQICQKQVKYLGYLLKEGQRWLTEARKETVMGQPIPKTPRQLREFLGTAGFCRLWIPGFAEMAAPLYPLTKPGTLFNWGPDQQKAFQEIKQALLTAPALGLPDLTKPFELFVDEKQGYAKGVLTQKLGPWRRPVAYLSKKLDPVAAGWPPCLRMVAAIAVLTKDAGKLTMGQPLVILAPHAVEALVKQPPDRWLSNARMTHYQALLLDTDRVQFGPVVALNPATLLPLPEEGLQHDCLDILAEAHGTRSDLMDQPLPDADHTWYTDGSSFLQEGQRKAGAAVTTETEVIWARALPAGTSAQRAELIALTQALKMAEGKKLNVYTDSRYAFATAHIHGEIYRRRGWLTSEGKEIKNKDEILALLKALFLPKRLSIIHCPGHQKGNSAEARGNRMADQAAREVATRETPETSTLLAGKRTADGSEFEKRTADGSEFESPKKKAKVE

SEQ ID NO: 2258 - protein, 2088 aa, synthetic construct
MPAAKRVKLDGGDKKYSIGLDIGTNSVGWAVITDEYKVPSKKFKVLGNTDRHSIKKNLIGALLFDSGETAEATRLKRTARRRYTRRKNRICYLQEIFSNEMAKVDDSFFHRLEESFLVEEDKKHERHPIFGNIVDEVAYHEKYPTIYHLRKKLVDSTDKADLRLIYLALAHMIKFRGHFLIEGDLNPDNSDVDKLFIQLVQTYNQLFEENPINASGVDAKAILSARLSKSRRLENLIAQLPGEKKNGLFGNLIALSLGLTPNFKSNFDLAEDAKLQLSKDTYDDDLDNLLAQIGDQYADLFLAAKNLSDAILLSDILRVNTEITKAPLSASMIKRYDEHHQDLTLLKALVRQQLPEKYKEIFFDQSKNGYAGYIDGGASQEEFYKFIKPILEKMDGTEELLVKLNREDLLRKQRTFDNGSIPHQIHLGELHAILRRQEDFYPFLKDNREKIEKILTFRIPYYVGPLARGNSRFAWMTRKSEETITPWNFEEVVDKGASAQSFIERMTNFDKNLPNEKVLPKHSLLYEYFTVYNELTKVKYVTEGMRKPAFLSGEQKKAIVDLLFKTNRKVTVKQLKEDYFKKIECFDSVEISGVEDRFNASLGTYHDLLKIIKDKDFLDNEENEDILEDIVLTLTLFEDREMIEERLKTYAHLFDDKVMKQLKRRRYTGWGRLSRKLINGIRDKQSGKTILDFLKSDGFANRNFMQLIHDDSLTFKEDIQKAQVSGQGDSLHEHIANLAGSPAIKKGILQTVKVVDELVKVMGRHKPENIVIEMARENQTTQKGQKNSRERMKRIEEGIKELGSQILKEHPVENTQLQNEKLYLYYLQNGRDMYVDQELDINRLSDYDVDHIVPQSFLKDDSIDNKVLTRSDKARGKSDNVPSEEVVKKMKNYWRQLLNAKLITQRKFDNLTKAERGGLSELDKAGFIKRQLVETRQITKHVAQILDSRMNTKYDENDKLIREVKVITLKSKLVSDFRKDFQFYKVREINNYHHAHDAYLNAVVGTALIKKYPKLESEFVYGDYKVYDVRKMIAKSEQEIGKATAKYFFYSNIMNFFKTEITLANGEIRKRPLIETNGETGEIVWDKGRDFATVRKVLSMPQVNIVKKTEVQTGGFSKESILPKRNSDKLIARKKDWDPKKYGGFDSPTVAYSVLVVAKVEKGKSKKLKSVKELLGITIMERSSFEKNPIDFLEAKGYKEVKKDLIIKLPKYSLFELENGRKRMLASAGELQKGNELALPSKYVNFLYLASHYEKLKGSPEDNEQKQLFVEQHKHYLDEIIEQISEFSKRVILADANLDKVLSAYNKHRDKPIREQAENIIHLFTLTNLGAPAAFKYFDTTIDRKRYTSTKEVLDATLIHQSITGLYETRIDLSQLGGDGGPAPGGTLNIEDEYRLHETSKEPDVSLGSTWLSDFPQAWAETGGMGLAVRQAPLIIPLKATSTPVSIKQYPMSQEARLGIKPHIQRLLDQGILVPCQSPWNTPLLPVKKPGTNDYRPVQDLREVNKRVEDIHPTVPNPYNLLSGLPPSHQWYTVLDLKDAFFCLRLHPTSQPLFAFEWRDPEMGISGQLTWTRLPQGFKNSPTLFNEALHRDLAGFRIQHPDLILLQYVDDLLLAATSELDCQQGTRALLQTLGDLGYRASAKKAQICQKQVKYLGYLLKEGQRWLTEARKETVMGQPIPKTPRQLREFLGTAGFCRLWIPGFAEMAAPLYPLTKPGTLFNWGPDQQKAFQEIKQALLTAPALGLPDLTKPFELFVDEKQGYAKGVLTQKLGPWRRPVAYLSKKLDPVAAGWPPCLRMVAAIAVLTKDAGKLTMGQPLVILAPHAVEALVKQPPDRWLSNARMTHYQALLLDTDRVQFGPVVALNPATLLPLPEEGLQHDCLDILAEAHGTRSDLMDQPLPDADHTWYTDGSSFLQEGQRKAGAAVTTETEVIWARALPAGTSAQRAELIALTQALKMAEGKKLNVYTDSRYAFATAHIHGEIYRRRGWLTSEGKEIKNKDEILALLKALFLPKRLSIIHCPGHQKGNSAEARGNRMADQAAREVATRETPETSTLLAGKRTADGSEFEKRTADGSEFESPKKKAKVE

SEQ ID NO: 2259 - protein, 2094 aa, synthetic construct
MPAAKRVKLDGGDKKYSIGLDIGTNSVGWAVITDEYKVPSKKFKVLGNTDRHSIKKNLIGALLFDSGETAEATRLKRTARRRYTRRKNRICYLQEIFSNEMAKVDDSFFHRLEESFLVEEDKKHERHPIFGNIVDEVAYHEKYPTIYHLRKKLVDSTDKADLRLIYLALAHMIKFRGHFLIEGDLNPDNSDVDKLFIQLVQTYNQLFEENPINASGVDAKAILSARLSKSRRLENLIAQLPGEKKNGLFGNLIALSLGLTPNFKSNFDLAEDAKLQLSKDTYDDDLDNLLAQIGDQYADLFLAAKNLSDAILLSDILRVNTEITKAPLSASMIKRYDEHHQDLTLLKALVRQQLPEKYKEIFFDQSKNGYAGYIDGGASQEEFYKFIKPILEKMDGTEELLVKLNREDLLRKQRTFDNGSIPHQIHLGELHAILRRQEDFYPFLKDNREKIEKILTFRIPYYVGPLARGNSRFAWMTRKSEETITPWNFEEVVDKGASAQSFIERMTNFDKNLPNEKVLPKHSLLYEYFTVYNELTKVKYVTEGMRKPAFLSGEQKKAIVDLLFKTNRKVTVKQLKEDYFKKIECFDSVEISGVEDRFNASLGTYHDLLKIIKDKDFLDNEENEDILEDIVLTLTLFEDREMIEERLKTYAHLFDDKVMKQLKRRRYTGWGRLSRKLINGIRDKQSGKTILDFLKSDGFANRNFMQLIHDDSLTFKEDIQKAQVSGQGDSLHEHIANLAGSPAIKKGILQTVKVVDELVKVMGRHKPENIVIEMARENQTTQKGQKNSRERMKRIEEGIKELGSQILKEHPVENTQLQNEKLYLYYLQNGRDMYVDQELDINRLSDYDVDHIVPQSFLKDDSIDNKVLTRSDKARGKSDNVPSEEVVKKMKNYWRQLLNAKLITQRKFDNLTKAERGGLSELDKAGFIKRQLVETRQITKHVAQILDSRMNTKYDENDKLIREVKVITLKSKLVSDFRKDFQFYKVREINNYHHAHDAYLNAVVGTALIKKYPKLESEFVYGDYKVYDVRKMIAKSEQEIGKATAKYFFYSNIMNFFKTEITLANGEIRKRPLIETNGETGEIVWDKGRDFATVRKVLSMPQVNIVKKTEVQTGGFSKESILPKRNSDKLIARKKDWDPKKYGGFDSPTVAYSVLVVAKVEKGKSKKLKSVKELLGITIMERSSFEKNPIDFLEAKGYKEVKKDLIIKLPKYSLFELENGRKRMLASAGELQKGNELALPSKYVNFLYLASHYEKLKGSPEDNEQKQLFVEQHKHYLDEIIEQISEFSKRVILADANLDKVLSAYNKHRDKPIREQAENIIHLFTLTNLGAPAAFKYFDTTIDRKRYTSTKEVLDATLIHQSITGLYETRIDLSQLGGDGGGGSGGGPAPGGTLNIEDEYRLHETSKEPDVSLGSTWLSDFPQAWAETGGMGLAVRQAPLIIPLKATSTPVSIKQYPMSQEARLGIKPHIQRLLDQGILVPCQSPWNTPLLPVKKPGTNDYRPVQDLREVNKRVEDIHPTVPNPYNLLSGLPPSHQWYTVLDLKDAFFCLRLHPTSQPLFAFEWRDPEMGISGQLTWTRLPQGFKNSPTLFNEALHRDLAGFRIQHPDLILLQYVDDLLLAATSELDCQQGTRALLQTLGDLGYRASAKKAQICQKQVKYLGYLLKEGQRWLTEARKETVMGQPIPKTPRQLREFLGTAGFCRLWIPGFAEMAAPLYPLTKPGTLFNWGPDQQKAFQEIKQALLTAPALGLPDLTKPFELFVDEKQGYAKGVLTQKLGPWRRPVAYLSKKLDPVAAGWPPCLRMVAAIAVLTKDAGKLTMGQPLVILAPHAVEALVKQPPDRWLSNARMTHYQALLLDTDRVQFGPVVALNPATLLPLPEEGLQHDCLDILAEAHGTRSDLMDQPLPDADHTWYTDGSSFLQEGQRKAGAAVTTETEVIWARALPAGTSAQRAELIALTQALKMAEGKKLNVYTDSRYAFATAHIHGEIYRRRGWLTSEGKEIKNKDEILALLKALFLPKRLSIIHCPGHQKGNSAEARGNRMADQAAREVATRETPETSTLLAGKRTADGSEFEKRTADGSEFESPKKKAKVE

SEQ ID NO: 2260 - protein, 2094 aa, synthetic construct
MPAAKRVKLDGGDKKYSIGLDIGTNSVGWAVITDEYKVPSKKFKVLGNTDRHSIKKNLIGALLFDSGETAEATRLKRTARRRYTRRKNRICYLQEIFSNEMAKVDDSFFHRLEESFLVEEDKKHERHPIFGNIVDEVAYHEKYPTIYHLRKKLVDSTDKADLRLIYLALAHMIKFRGHFLIEGDLNPDNSDVDKLFIQLVQTYNQLFEENPINASGVDAKAILSARLSKSRRLENLIAQLPGEKKNGLFGNLIALSLGLTPNFKSNFDLAEDAKLQLSKDTYDDDLDNLLAQIGDQYADLFLAAKNLSDAILLSDILRVNTEITKAPLSASMIKRYDEHHQDLTLLKALVRQQLPEKYKEIFFDQSKNGYAGYIDGGASQEEFYKFIKPILEKMDGTEELLVKLNREDLLRKQRTFDNGSIPHQIHLGELHAILRRQEDFYPFLKDNREKIEKILTFRIPYYVGPLARGNSRFAWMTRKSEETITPWNFEEVVDKGASAQSFIERMTNFDKNLPNEKVLPKHSLLYEYFTVYNELTKVKYVTEGMRKPAFLSGEQKKAIVDLLFKTNRKVTVKQLKEDYFKKIECFDSVEISGVEDRFNASLGTYHDLLKIIKDKDFLDNEENEDILEDIVLTLTLFEDREMIEERLKTYAHLFDDKVMKQLKRRRYTGWGRLSRKLINGIRDKQSGKTILDFLKSDGFANRNFMQLIHDDSLTFKEDIQKAQVSGQGDSLHEHIANLAGSPAIKKGILQTVKVVDELVKVMGRHKPENIVIEMARENQTTQKGQKNSRERMKRIEEGIKELGSQILKEHPVENTQLQNEKLYLYYLQNGRDMYVDQELDINRLSDYDVDHIVPQSFLKDDSIDNKVLTRSDKARGKSDNVPSEEVVKKMKNYWRQLLNAKLITQRKFDNLTKAERGGLSELDKAGFIKRQLVETRQITKHVAQILDSRMNTKYDENDKLIREVKVITLKSKLVSDFRKDFQFYKVREINNYHHAHDAYLNAVVGTALIKKYPKLESEFVYGDYKVYDVRKMIAKSEQEIGKATAKYFFYSNIMNFFKTEITLANGEIRKRPLIETNGETGEIVWDKGRDFATVRKVLSMPQVNIVKKTEVQTGGFSKESILPKRNSDKLIARKKDWDPKKYGGFDSPTVAYSVLVVAKVEKGKSKKLKSVKELLGITIMERSSFEKNPIDFLEAKGYKEVKKDLIIKLPKYSLFELENGRKRMLASAGELQKGNELALPSKYVNFLYLASHYEKLKGSPEDNEQKQLFVEQHKHYLDEIIEQISEFSKRVILADANLDKVLSAYNKHRDKPIREQAENIIHLFTLTNLGAPAAFKYFDTTIDRKRYTSTKEVLDATLIHQSITGLYETRIDLSQLGGDGGGGSPAPGSSGGTLNIEDEYRLHETSKEPDVSLGSTWLSDFPQAWAETGGMGLAVRQAPLIIPLKATSTPVSIKQYPMSQEARLGIKPHIQRLLDQGILVPCQSPWNTPLLPVKKPGTNDYRPVQDLREVNKRVEDIHPTVPNPYNLLSGLPPSHQWYTVLDLKDAFFCLRLHPTSQPLFAFEWRDPEMGISGQLTWTRLPQGFKNSPTLFNEALHRDLAGFRIQHPDLILLQYVDDLLLAATSELDCQQGTRALLQTLGDLGYRASAKKAQICQKQVKYLGYLLKEGQRWLTEARKETVMGQPIPKTPRQLREFLGTAGFCRLWIPGFAEMAAPLYPLTKPGTLFNWGPDQQKAFQEIKQALLTAPALGLPDLTKPFELFVDEKQGYAKGVLTQKLGPWRRPVAYLSKKLDPVAAGWPPCLRMVAAIAVLTKDAGKLTMGQPLVILAPHAVEALVKQPPDRWLSNARMTHYQALLLDTDRVQFGPVVALNPATLLPLPEEGLQHDCLDILAEAHGTRSDLMDQPLPDADHTWYTDGSSFLQEGQRKAGAAVTTETEVIWARALPAGTSAQRAELIALTQALKMAEGKKLNVYTDSRYAFATAHIHGEIYRRRGWLTSEGKEIKNKDEILALLKALFLPKRLSIIHCPGHQKGNSAEARGNRMADQAAREVATRETPETSTLLAGKRTADGSEFEKRTADGSEFESPKKKAKVE

SEQ ID NO: 2261 - protein, 2096 aa, synthetic construct
MPAAKRVKLDGGDKKYSIGLDIGTNSVGWAVITDEYKVPSKKFKVLGNTDRHSIKKNLIGALLFDSGETAEATRLKRTARRRYTRRKNRICYLQEIFSNEMAKVDDSFFHRLEESFLVEEDKKHERHPIFGNIVDEVAYHEKYPTIYHLRKKLVDSTDKADLRLIYLALAHMIKFRGHFLIEGDLNPDNSDVDKLFIQLVQTYNQLFEENPINASGVDAKAILSARLSKSRRLENLIAQLPGEKKNGLFGNLIALSLGLTPNFKSNFDLAEDAKLQLSKDTYDDDLDNLLAQIGDQYADLFLAAKNLSDAILLSDILRVNTEITKAPLSASMIKRYDEHHQDLTLLKALVRQQLPEKYKEIFFDQSKNGYAGYIDGGASQEEFYKFIKPILEKMDGTEELLVKLNREDLLRKQRTFDNGSIPHQIHLGELHAILRRQEDFYPFLKDNREKIEKILTFRIPYYVGPLARGNSRFAWMTRKSEETITPWNFEEVVDKGASAQSFIERMTNFDKNLPNEKVLPKHSLLYEYFTVYNELTKVKYVTEGMRKPAFLSGEQKKAIVDLLFKTNRKVTVKQLKEDYFKKIECFDSVEISGVEDRFNASLGTYHDLLKIIKDKDFLDNEENEDILEDIVLTLTLFEDREMIEERLKTYAHLFDDKVMKQLKRRRYTGWGRLSRKLINGIRDKQSGKTILDFLKSDGFANRNFMQLIHDDSLTFKEDIQKAQVSGQGDSLHEHIANLAGSPAIKKGILQTVKVVDELVKVMGRHKPENIVIEMARENQTTQKGQKNSRERMKRIEEGIKELGSQILKEHPVENTQLQNEKLYLYYLQNGRDMYVDQELDINRLSDYDVDHIVPQSFLKDDSIDNKVLTRSDKARGKSDNVPSEEVVKKMKNYWRQLLNAKLITQRKFDNLTKAERGGLSELDKAGFIKRQLVETRQITKHVAQILDSRMNTKYDENDKLIREVKVITLKSKLVSDFRKDFQFYKVREINNYHHAHDAYLNAVVGTALIKKYPKLESEFVYGDYKVYDVRKMIAKSEQEIGKATAKYFFYSNIMNFFKTEITLANGEIRKRPLIETNGETGEIVWDKGRDFATVRKVLSMPQVNIVKKTEVQTGGFSKESILPKRNSDKLIARKKDWDPKKYGGFDSPTVAYSVLVVAKVEKGKSKKLKSVKELLGITIMERSSFEKNPIDFLEAKGYKEVKKDLIIKLPKYSLFELENGRKRMLASAGELQKGNELALPSKYVNFLYLASHYEKLKGSPEDNEQKQLFVEQHKHYLDEIIEQISEFSKRVILADANLDKVLSAYNKHRDKPIREQAENIIHLFTLTNLGAPAAFKYFDTTIDRKRYTSTKEVLDATLIHQSITGLYETRIDLSQLGGDGGEAAAKGGGGSSGGTLNIEDEYRLHETSKEPDVSLGSTWLSDFPQAWAETGGMGLAVRQAPLIIPLKATSTPVSIKQYPMSQEARLGIKPHIQRLLDQGILVPCQSPWNTPLLPVKKPGTNDYRPVQDLREVNKRVEDIHPTVPNPYNLLSGLPPSHQWYTVLDLKDAFFCLRLHPTSQPLFAFEWRDPEMGISGQLTWTRLPQGFKNSPTLFNEALHRDLAGFRIQHPDLILLQYVDDLLLAATSELDCQQGTRALLQTLGDLGYRASAKKAQICQKQVKYLGYLLKEGQRWLTEARKETVMGQPIPKTPRQLREFLGTAGFCRLWIPGFAEMAAPLYPLTKPGTLFNWGPDQQKAFQEIKQALLTAPALGLPDLTKPFELFVDEKQGYAKGVLTQKLGPWRRPVAYLSKKLDPVAAGWPPCLRMVAAIAVLTKDAGKLTMGQPLVILAPHAVEALVKQPPDRWLSNARMTHYQALLLDTDRVQFGPVVALNPATLLPLPEEGLQHDCLDILAEAHGTRSDLMDQPLPDADHTWYTDGSSFLQEGQRKAGAAVTTETEVIWARALPAGTSAQRAELIALTQALKMAEGKKLNVYTDSRYAFATAHIHGEIYRRRGWLTSEGKEIKNKDEILALLKALFLPKRLSIIHCPGHQKGNSAEARGNRMADQAAREVATRETPETSTLLAGKRTADGSEFEKRTADGSEFESPKKKAKVE

SEQ ID NO: 2262 - protein, 2094 aa, synthetic construct
MPAAKRVKLDGGDKKYSIGLDIGTNSVGWAVITDEYKVPSKKFKVLGNTDRHSIKKNLIGALLFDSGETAEATRLKRTARRRYTRRKNRICYLQEIFSNEMAKVDDSFFHRLEESFLVEEDKKHERHPIFGNIVDEVAYHEKYPTIYHLRKKLVDSTDKADLRLIYLALAHMIKFRGHFLIEGDLNPDNSDVDKLFIQLVQTYNQLFEENPINASGVDAKAILSARLSKSRRLENLIAQLPGEKKNGLFGNLIALSLGLTPNFKSNFDLAEDAKLQLSKDTYDDDLDNLLAQIGDQYADLFLAAKNLSDAILLSDILRVNTEITKAPLSASMIKRYDEHHQDLTLLKALVRQQLPEKYKEIFFDQSKNGYAGYIDGGASQEEFYKFIKPILEKMDGTEELLVKLNREDLLRKQRTFDNGSIPHQIHLGELHAILRRQEDFYPFLKDNREKIEKILTFRIPYYVGPLARGNSRFAWMTRKSEETITPWNFEEVVDKGASAQSFIERMTNFDKNLPNEKVLPKHSLLYEYFTVYNELTKVKYVTEGMRKPAFLSGEQKKAIVDLLFKTNRKVTVKQLKEDYFKKIECFDSVEISGVEDRFNASLGTYHDLLKIIKDKDFLDNEENEDILEDIVLTLTLFEDREMIEERLKTYAHLFDDKVMKQLKRRRYTGWGRLSRKLINGIRDKQSGKTILDFLKSDGFANRNFMQLIHDDSLTFKEDIQKAQVSGQGDSLHEHIANLAGSPAIKKGILQTVKVVDELVKVMGRHKPENIVIEMARENQTTQKGQKNSRERMKRIEEGIKELGSQILKEHPVENTQLQNEKLYLYYLQNGRDMYVDQELDINRLSDYDVDHIVPQSFLKDDSIDNKVLTRSDKARGKSDNVPSEEVVKKMKNYWRQLLNAKLITQRKFDNLTKAERGGLSELDKAGFIKRQLVETRQITKHVAQILDSRMNTKYDENDKLIREVKVITLKSKLVSDFRKDFQFYKVREINNYHHAHDAYLNAVVGTALIKKYPKLESEFVYGDYKVYDVRKMIAKSEQEIGKATAKYFFYSNIMNFFKTEITLANGEIRKRPLIETNGETGEIVWDKGRDFATVRKVLSMPQVNIVKKTEVQTGGFSKESILPKRNSDKLIARKKDWDPKKYGGFDSPTVAYSVLVVAKVEKGKSKKLKSVKELLGITIMERSSFEKNPIDFLEAKGYKEVKKDLIIKLPKYSLFELENGRKRMLASAGELQKGNELALPSKYVNFLYLASHYEKLKGSPEDNEQKQLFVEQHKHYLDEIIEQISEFSKRVILADANLDKVLSAYNKHRDKPIREQAENIIHLFTLTNLGAPAAFKYFDTTIDRKRYTSTKEVLDATLIHQSITGLYETRIDLSQLGGDGGPAPGSSGGGGGTLNIEDEYRLHETSKEPDVSLGSTWLSDFPQAWAETGGMGLAVRQAPLIIPLKATSTPVSIKQYPMSQEARLGIKPHIQRLLDQGILVPCQSPWNTPLLPVKKPGTNDYRPVQDLREVNKRVEDIHPTVPNPYNLLSGLPPSHQWYTVLDLKDAFFCLRLHPTSQPLFAFEWRDPEMGISGQLTWTRLPQGFKNSPTLFNEALHRDLAGFRIQHPDLILLQYVDDLLLAATSELDCQQGTRALLQTLGDLGYRASAKKAQICQKQVKYLGYLLKEGQRWLTEARKETVMGQPIPKTPRQLREFLGTAGFCRLWIPGFAEMAAPLYPLTKPGTLFNWGPDQQKAFQEIKQALLTAPALGLPDLTKPFELFVDEKQGYAKGVLTQKLGPWRRPVAYLSKKLDPVAAGWPPCLRMVAAIAVLTKDAGKLTMGQPLVILAPHAVEALVKQPPDRWLSNARMTHYQALLLDTDRVQFGPVVALNPATLLPLPEEGLQHDCLDILAEAHGTRSDLMDQPLPDADHTWYTDGSSFLQEGQRKAGAAVTTETEVIWARALPAGTSAQRAELIALTQALKMAEGKKLNVYTDSRYAFATAHIHGEIYRRRGWLTSEGKEIKNKDEILALLKALFLPKRLSIIHCPGHQKGNSAEARGNRMADQAAREVATRETPETSTLLAGKRTADGSEFEKRTADGSEFESPKKKAKVE

SEQ ID NO: 2263 - protein, 2096 aa, synthetic construct
MPAAKRVKLDGGDKKYSIGLDIGTNSVGWAVITDEYKVPSKKFKVLGNTDRHSIKKNLIGALLFDSGETAEATRLKRTARRRYTRRKNRICYLQEIFSNEMAKVDDSFFHRLEESFLVEEDKKHERHPIFGNIVDEVAYHEKYPTIYHLRKKLVDSTDKADLRLIYLALAHMIKFRGHFLIEGDLNPDNSDVDKLFIQLVQTYNQLFEENPINASGVDAKAILSARLSKSRRLENLIAQLPGEKKNGLFGNLIALSLGLTPNFKSNFDLAEDAKLQLSKDTYDDDLDNLLAQIGDQYADLFLAAKNLSDAILLSDILRVNTEITKAPLSASMIKRYDEHHQDLTLLKALVRQQLPEKYKEIFFDQSKNGYAGYIDGGASQEEFYKFIKPILEKMDGTEELLVKLNREDLLRKQRTFDNGSIPHQIHLGELHAILRRQEDFYPFLKDNREKIEKILTFRIPYYVGPLARGNSRFAWMTRKSEETITPWNFEEVVDKGASAQSFIERMTNFDKNLPNEKVLPKHSLLYEYFTVYNELTKVKYVTEGMRKPAFLSGEQKKAIVDLLFKTNRKVTVKQLKEDYFKKIECFDSVEISGVEDRFNASLGTYHDLLKIIKDKDFLDNEENEDILEDIVLTLTLFEDREMIEERLKTYAHLFDDKVMKQLKRRRYTGWGRLSRKLINGIRDKQSGKTILDFLKSDGFANRNFMQLIHDDSLTFKEDIQKAQVSGQGDSLHEHIANLAGSPAIKKGILQTVKVVDELVKVMGRHKPENIVIEMARENQTTQKGQKNSRERMKRIEEGIKELGSQILKEHPVENTQLQNEKLYLYYLQNGRDMYVDQELDINRLSDYDVDHIVPQSFLKDDSIDNKVLTRSDKARGKSDNVPSEEVVKKMKNYWRQLLNAKLITQRKFDNLTKAERGGLSELDKAGFIKRQLVETRQITKHVAQILDSRMNTKYDENDKLIREVKVITLKSKLVSDFRKDFQFYKVREINNYHHAHDAYLNAVVGTALIKKYPKLESEFVYGDYKVYDVRKMIAKSEQEIGKATAKYFFYSNIMNFFKTEITLANGEIRKRPLIETNGETGEIVWDKGRDFATVRKVLSMPQVNIVKKTEVQTGGFSKESILPKRNSDKLIARKKDWDPKKYGGFDSPTVAYSVLVVAKVEKGKSKKLKSVKELLGITIMERSSFEKNPIDFLEAKGYKEVKKDLIIKLPKYSLFELENGRKRMLASAGELQKGNELALPSKYVNFLYLASHYEKLKGSPEDNEQKQLFVEQHKHYLDEIIEQISEFSKRVILADANLDKVLSAYNKHRDKPIREQAENIIHLFTLTNLGAPAAFKYFDTTIDRKRYTSTKEVLDATLIHQSITGLYETRIDLSQLGGDGGGGSGSSEAAAKGGTLNIEDEYRLHETSKEPDVSLGSTWLSDFPQAWAETGGMGLAVRQAPLIIPLKATSTPVSIKQYPMSQEARLGIKPHIQRLLDQGILVPCQSPWNTPLLPVKKPGTNDYRPVQDLREVNKRVEDIHPTVPNPYNLLSGLPPSHQWYTVLDLKDAFFCLRLHPTSQPLFAFEWRDPEMGISGQLTWTRLPQGFKNSPTLFNEALHRDLAGFRIQHPDLILLQYVDDLLLAATSELDCQQGTRALLQTLGDLGYRASAKKAQICQKQVKYLGYLLKEGQRWLTEARKETVMGQPIPKTPRQLREFLGTAGFCRLWIPGFAEMAAPLYPLTKPGTLFNWGPDQQKAFQEIKQALLTAPALGLPDLTKPFELFVDEKQGYAKGVLTQKLGPWRRPVAYLSKKLDPVAAGWPPCLRMVAAIAVLTKDAGKLTMGQPLVILAPHAVEALVKQPPDRWLSNARMTHYQALLLDTDRVQFGPVVALNPATLLPLPEEGLQHDCLDILAEAHGTRSDLMDQPLPDADHTWYTDGSSFLQEGQRKAGAAVTTETEVIWARALPAGTSAQRAELIALTQALKMAEGKKLNVYTDSRYAFATAHIHGEIYRRRGWLTSEGKEIKNKDEILALLKALFLPKRLSIIHCPGHQKGNSAEARGNRMADQAAREVATRETPETSTLLAGKRTADGSEFEKRTADGSEFESPKKKAKVE

SEQ ID NO: 2264 - protein, 2091 aa, synthetic construct
MPAAKRVKLDGGDKKYSIGLDIGTNSVGWAVITDEYKVPSKKFKVLGNTDRHSIKKNLIGALLFDSGETAEATRLKRTARRRYTRRKNRICYLQEIFSNEMAKVDDSFFHRLEESFLVEEDKKHERHPIFGNIVDEVAYHEKYPTIYHLRKKLVDSTDKADLRLIYLALAHMIKFRGHFLIEGDLNPDNSDVDKLFIQLVQTYNQLFEENPINASGVDAKAILSARLSKSRRLENLIAQLPGEKKNGLFGNLIALSLGLTPNFKSNFDLAEDAKLQLSKDTYDDDLDNLLAQIGDQYADLFLAAKNLSDAILLSDILRVNTEITKAPLSASMIKRYDEHHQDLTLLKALVRQQLPEKYKEIFFDQSKNGYAGYIDGGASQEEFYKFIKPILEKMDGTEELLVKLNREDLLRKQRTFDNGSIPHQIHLGELHAILRRQEDFYPFLKDNREKIEKILTFRIPYYVGPLARGNSRFAWMTRKSEETITPWNFEEVVDKGASAQSFIERMTNFDKNLPNEKVLPKHSLLYEYFTVYNELTKVKYVTEGMRKPAFLSGEQKKAIVDLLFKTNRKVTVKQLKEDYFKKIECFDSVEISGVEDRFNASLGTYHDLLKIIKDKDFLDNEENEDILEDIVLTLTLFEDREMIEERLKTYAHLFDDKVMKQLKRRRYTGWGRLSRKLINGIRDKQSGKTILDFLKSDGFANRNFMQLIHDDSLTFKEDIQKAQVSGQGDSLHEHIANLAGSPAIKKGILQTVKVVDELVKVMGRHKPENIVIEMARENQTTQKGQKNSRERMKRIEEGIKELGSQILKEHPVENTQLQNEKLYLYYLQNGRDMYVDQELDINRLSDYDVDHIVPQSFLKDDSIDNKVLTRSDKARGKSDNVPSEEVVKKMKNYWRQLLNAKLITQRKFDNLTKAERGGLSELDKAGFIKRQLVETRQITKHVAQILDSRMNTKYDENDKLIREVKVITLKSKLVSDFRKDFQFYKVREINNYHHAHDAYLNAVVGTALIKKYPKLESEFVYGDYKVYDVRKMIAKSEQEIGKATAKYFFYSNIMNFFKTEITLANGEIRKRPLIETNGETGEIVWDKGRDFATVRKVLSMPQVNIVKKTEVQTGGFSKESILPKRNSDKLIARKKDWDPKKYGGFDSPTVAYSVLVVAKVEKGKSKKLKSVKELLGITIMERSSFEKNPIDFLEAKGYKEVKKDLIIKLPKYSLFELENGRKRMLASAGELQKGNELALPSKYVNFLYLASHYEKLKGSPEDNEQKQLFVEQHKHYLDEIIEQISEFSKRVILADANLDKVLSAYNKHRDKPIREQAENIIHLFTLTNLGAPAAFKYFDTTIDRKRYTSTKEVLDATLIHQSITGLYETRIDLSQLGGDGGGSSGGGGGTLNIEDEYRLHETSKEPDVSLGSTWLSDFPQAWAETGGMGLAVRQAPLIIPLKATSTPVSIKQYPMSQEARLGIKPHIQRLLDQGILVPCQSPWNTPLLPVKKPGTNDYRPVQDLREVNKRVEDIHPTVPNPYNLLSGLPPSHQWYTVLDLKDAFFCLRLHPTSQPLFAFEWRDPEMGISGQLTWTRLPQGFKNSPTLFNEALHRDLAGFRIQHPDLILLQYVDDLLLAATSELDCQQGTRALLQTLGDLGYRASAKKAQICQKQVKYLGYLLKEGQRWLTEARKETVMGQPIPKTPRQLREFLGTAGFCRLWIPGFAEMAAPLYPLTKPGTLFNWGPDQQKAFQEIKQALLTAPALGLPDLTKPFELFVDEKQGYAKGVLTQKLGPWRRPVAYLSKKLDPVAAGWPPCLRMVAAIAVLTKDAGKLTMGQPLVILAPHAVEALVKQPPDRWLSNARMTHYQALLLDTDRVQFGPVVALNPATLLPLPEEGLQHDCLDILAEAHGTRSDLMDQPLPDADHTWYTDGSSFLQEGQRKAGAAVTTETEVIWARALPAGTSAQRAELIALTQALKMAEGKKLNVYTDSRYAFATAHIHGEIYRRRGWLTSEGKEIKNKDEILALLKALFLPKRLSIIHCPGHQKGNSAEARGNRMADQAAREVATRETPETSTLLAGKRTADGSEFEKRTADGSEFESPKKKAKVE

SEQ ID NO: 2265 - protein, 2094 aa, synthetic construct
MPAAKRVKLDGGDKKYSIGLDIGTNSVGWAVITDEYKVPSKKFKVLGNTDRHSIKKNLIGALLFDSGETAEATRLKRTARRRYTRRKNRICYLQEIFSNEMAKVDDSFFHRLEESFLVEEDKKHERHPIFGNIVDEVAYHEKYPTIYHLRKKLVDSTDKADLRLIYLALAHMIKFRGHFLIEGDLNPDNSDVDKLFIQLVQTYNQLFEENPINASGVDAKAILSARLSKSRRLENLIAQLPGEKKNGLFGNLIALSLGLTPNFKSNFDLAEDAKLQLSKDTYDDDLDNLLAQIGDQYADLFLAAKNLSDAILLSDILRVNTEITKAPLSASMIKRYDEHHQDLTLLKALVRQQLPEKYKEIFFDQSKNGYAGYIDGGASQEEFYKFIKPILEKMDGTEELLVKLNREDLLRKQRTFDNGSIPHQIHLGELHAILRRQEDFYPFLKDNREKIEKILTFRIPYYVGPLARGNSRFAWMTRKSEETITPWNFEEVVDKGASAQSFIERMTNFDKNLPNEKVLPKHSLLYEYFTVYNELTKVKYVTEGMRKPAFLSGEQKKAIVDLLFKTNRKVTVKQLKEDYFKKIECFDSVEISGVEDRFNASLGTYHDLLKIIKDKDFLDNEENEDILEDIVLTLTLFEDREMIEERLKTYAHLFDDKVMKQLKRRRYTGWGRLSRKLINGIRDKQSGKTILDFLKSDGFANRNFMQLIHDDSLTFKEDIQKAQVSGQGDSLHEHIANLAGSPAIKKGILQTVKVVDELVKVMGRHKPENIVIEMARENQTTQKGQKNSRERMKRIEEGIKELGSQILKEHPVENTQLQNEKLYLYYLQNGRDMYVDQELDINRLSDYDVDHIVPQSFLKDDSIDNKVLTRSDKARGKSDNVPSEEVVKKMKNYWRQLLNAKLITQRKFDNLTKAERGGLSELDKAGFIKRQLVETRQITKHVAQILDSRMNTKYDENDKLIREVKVITLKSKLVSDFRKDFQFYKVREINNYHHAHDAYLNAVVGTALIKKYPKLESEFVYGDYKVYDVRKMIAKSEQEIGKATAKYFFYSNIMNFFKTEITLANGEIRKRPLIETNGETGEIVWDKGRDFATVRKVLSMPQVNIVKKTEVQTGGFSKESILPKRNSDKLIARKKDWDPKKYGGFDSPTVAYSVLVVAKVEKGKSKKLKSVKELLGITIMERSSFEKNPIDFLEAKGYKEVKKDLIIKLPKYSLFELENGRKRMLASAGELQKGNELALPSKYVNFLYLASHYEKLKGSPEDNEQKQLFVEQHKHYLDEIIEQISEFSKRVILADANLDKVLSAYNKHRDKPIREQAENIIHLFTLTNLGAPAAFKYFDTTIDRKRYTSTKEVLDATLIHQSITGLYETRIDLSQLGGDGGGGSGSSPAPGGTLNIEDEYRLHETSKEPDVSLGSTWLSDFPQAWAETGGMGLAVRQAPLIIPLKATSTPVSIKQYPMSQEARLGIKPHIQRLLDQGILVPCQSPWNTPLLPVKKPGTNDYRPVQDLREVNKRVEDIHPTVPNPYNLLSGLPPSHQWYTVLDLKDAFFCLRLHPTSQPLFAFEWRDPEMGISGQLTWTRLPQGFKNSPTLFNEALHRDLAGFRIQHPDLILLQYVDDLLLAATSELDCQQGTRALLQTLGDLGYRASAKKAQICQKQVKYLGYLLKEGQRWLTEARKETVMGQPIPKTPRQLREFLGTAGFCRLWIPGFAEMAAPLYPLTKPGTLFNWGPDQQKAFQEIKQALLTAPALGLPDLTKPFELFVDEKQGYAKGVLTQKLGPWRRPVAYLSKKLDPVAAGWPPCLRMVAAIAVLTKDAGKLTMGQPLVILAPHAVEALVKQPPDRWLSNARMTHYQALLLDTDRVQFGPVVALNPATLLPLPEEGLQHDCLDILAEAHGTRSDLMDQPLPDADHTWYTDGSSFLQEGQRKAGAAVTTETEVIWARALPAGTSAQRAELIALTQALKMAEGKKLNVYTDSRYAFATAHIHGEIYRRRGWLTSEGKEIKNKDEILALLKALFLPKRLSIIHCPGHQKGNSAEARGNRMADQAAREVATRETPETSTLLAGKRTADGSEFEKRTADGSEFESPKKKAKVE

SEQ ID NO: 2266 - protein, 2096 aa, synthetic construct
MPAAKRVKLDGGDKKYSIGLDIGTNSVGWAVITDEYKVPSKKFKVLGNTDRHSIKKNLIGALLFDSGETAEATRLKRTARRRYTRRKNRICYLQEIFSNEMAKVDDSFFHRLEESFLVEEDKKHERHPIFGNIVDEVAYHEKYPTIYHLRKKLVDSTDKADLRLIYLALAHMIKFRGHFLIEGDLNPDNSDVDKLFIQLVQTYNQLFEENPINASGVDAKAILSARLSKSRRLENLIAQLPGEKKNGLFGNLIALSLGLTPNFKSNFDLAEDAKLQLSKDTYDDDLDNLLAQIGDQYADLFLAAKNLSDAILLSDILRVNTEITKAPLSASMIKRYDEHHQDLTLLKALVRQQLPEKYKEIFFDQSKNGYAGYIDGGASQEEFYKFIKPILEKMDGTEELLVKLNREDLLRKQRTFDNGSIPHQIHLGELHAILRRQEDFYPFLKDNREKIEKILTFRIPYYVGPLARGNSRFAWMTRKSEETITPWNFEEVVDKGASAQSFIERMTNFDKNLPNEKVLPKHSLLYEYFTVYNELTKVKYVTEGMRKPAFLSGEQKKAIVDLLFKTNRKVTVKQLKEDYFKKIECFDSVEISGVEDRFNASLGTYHDLLKIIKDKDFLDNEENEDILEDIVLTLTLFEDREMIEERLKTYAHLFDDKVMKQLKRRRYTGWGRLSRKLINGIRDKQSGKTILDFLKSDGFANRNFMQLIHDDSLTFKEDIQKAQVSGQGDSLHEHIANLAGSPAIKKGILQTVKVVDELVKVMGRHKPENIVIEMARENQTTQKGQKNSRERMKRIEEGIKELGSQILKEHPVENTQLQNEKLYLYYLQNGRDMYVDQELDINRLSDYDVDHIVPQSFLKDDSIDNKVLTRSDKARGKSDNVPSEEVVKKMKNYWRQLLNAKLITQRKFDNLTKAERGGLSELDKAGFIKRQLVETRQITKHVAQILDSRMNTKYDENDKLIREVKVITLKSKLVSDFRKDFQFYKVREINNYHHAHDAYLNAVVGTALIKKYPKLESEFVYGDYKVYDVRKMIAKSEQEIGKATAKYFFYSNIMNFFKTEITLANGEIRKRPLIETNGETGEIVWDKGRDFATVRKVLSMPQVNIVKKTEVQTGGFSKESILPKRNSDKLIARKKDWDPKKYGGFDSPTVAYSVLVVAKVEKGKSKKLKSVKELLGITIMERSSFEKNPIDFLEAKGYKEVKKDLIIKLPKYSLFELENGRKRMLASAGELQKGNELALPSKYVNFLYLASHYEKLKGSPEDNEQKQLFVEQHKHYLDEIIEQISEFSKRVILADANLDKVLSAYNKHRDKPIREQAENIIHLFTLTNLGAPAAFKYFDTTIDRKRYTSTKEVLDATLIHQSITGLYETRIDLSQLGGDGGGGSGGGEAAAKGGTLNIEDEYRLHETSKEPDVSLGSTWLSDFPQAWAETGGMGLAVRQAPLIIPLKATSTPVSIKQYPMSQEARLGIKPHIQRLLDQGILVPCQSPWNTPLLPVKKPGTNDYRPVQDLREVNKRVEDIHPTVPNPYNLLSGLPPSHQWYTVLDLKDAFFCLRLHPTSQPLFAFEWRDPEMGISGQLTWTRLPQGFKNSPTLFNEALHRDLAGFRIQHPDLILLQYVDDLLLAATSELDCQQGTRALLQTLGDLGYRASAKKAQICQKQVKYLGYLLKEGQRWLTEARKETVMGQPIPKTPRQLREFLGTAGFCRLWIPGFAEMAAPLYPLTKPGTLFNWGPDQQKAFQEIKQALLTAPALGLPDLTKPFELFVDEKQGYAKGVLTQKLGPWRRPVAYLSKKLDPVAAGWPPCLRMVAAIAVLTKDAGKLTMGQPLVILAPHAVEALVKQPPDRWLSNARMTHYQALLLDTDRVQFGPVVALNPATLLPLPEEGLQHDCLDILAEAHGTRSDLMDQPLPDADHTWYTDGSSFLQEGQRKAGAAVTTETEVIWARALPAGTSAQRAELIALTQALKMAEGKKLNVYTDSRYAFATAHIHGEIYRRRGWLTSEGKEIKNKDEILALLKALFLPKRLSIIHCPGHQKGNSAEARGNRMADQAAREVATRETPETSTLLAGKRTADGSEFEKRTADGSEFESPKKKAKVE

SEQ ID NO: 2267 - protein, 2092 aa, synthetic construct
MPAAKRVKLDGGDKKYSIGLDIGTNSVGWAVITDEYKVPSKKFKVLGNTDRHSIKKNLIGALLFDSGETAEATRLKRTARRRYTRRKNRICYLQEIFSNEMAKVDDSFFHRLEESFLVEEDKKHERHPIFGNIVDEVAYHEKYPTIYHLRKKLVDSTDKADLRLIYLALAHMIKFRGHFLIEGDLNPDNSDVDKLFIQLVQTYNQLFEENPINASGVDAKAILSARLSKSRRLENLIAQLPGEKKNGLFGNLIALSLGLTPNFKSNFDLAEDAKLQLSKDTYDDDLDNLLAQIGDQYADLFLAAKNLSDAILLSDILRVNTEITKAPLSASMIKRYDEHHQDLTLLKALVRQQLPEKYKEIFFDQSKNGYAGYIDGGASQEEFYKFIKPILEKMDGTEELLVKLNREDLLRKQRTFDNGSIPHQIHLGELHAILRRQEDFYPFLKDNREKIEKILTFRIPYYVGPLARGNSRFAWMTRKSEETITPWNFEEVVDKGASAQSFIERMTNFDKNLPNEKVLPKHSLLYEYFTVYNELTKVKYVTEGMRKPAFLSGEQKKAIVDLLFKTNRKVTVKQLKEDYFKKIECFDSVEISGVEDRFNASLGTYHDLLKIIKDKDFLDNEENEDILEDIVLTLTLFEDREMIEERLKTYAHLFDDKVMKQLKRRRYTGWGRLSRKLINGIRDKQSGKTILDFLKSDGFANRNFMQLIHDDSLTFKEDIQKAQVSGQGDSLHEHIANLAGSPAIKKGILQTVKVVDELVKVMGRHKPENIVIEMARENQTTQKGQKNSRERMKRIEEGIKELGSQILKEHPVENTQLQNEKLYLYYLQNGRDMYVDQELDINRLSDYDVDHIVPQSFLKDDSIDNKVLTRSDKARGKSDNVPSEEVVKKMKNYWRQLLNAKLITQRKFDNLTKAERGGLSELDKAGFIKRQLVETRQITKHVAQILDSRMNTKYDENDKLIREVKVITLKSKLVSDFRKDFQFYKVREINNYHHAHDAYLNAVVGTALIKKYPKLESEFVYGDYKVYDVRKMIAKSEQEIGKATAKYFFYSNIMNFFKTEITLANGEIRKRPLIETNGETGEIVWDKGRDFATVRKVLSMPQVNIVKKTEVQTGGFSKESILPKRNSDKLIARKKDWDPKKYGGFDSPTVAYSVLVVAKVEKGKSKKLKSVKELLGITIMERSSFEKNPIDFLEAKGYKEVKKDLIIKLPKYSLFELENGRKRMLASAGELQKGNELALPSKYVNFLYLASHYEKLKGSPEDNEQKQLFVEQHKHYLDEIIEQISEFSKRVILADANLDKVLSAYNKHRDKPIREQAENIIHLFTLTNLGAPAAFKYFDTTIDRKRYTSTKEVLDATLIHQSITGLYETRIDLSQLGGDGGGGGGGGGGGTLNIEDEYRLHETSKEPDVSLGSTWLSDFPQAWAETGGMGLAVRQAPLIIPLKATSTPVSIKQYPMSQEARLGIKPHIQRLLDQGILVPCQSPWNTPLLPVKKPGTNDYRPVQDLREVNKRVEDIHPTVPNPYNLLSGLPPSHQWYTVLDLKDAFFCLRLHPTSQPLFAFEWRDPEMGISGQLTWTRLPQGFKNSPTLFNEALHRDLAGFRIQHPDLILLQYVDDLLLAATSELDCQQGTRALLQTLGDLGYRASAKKAQICQKQVKYLGYLLKEGQRWLTEARKETVMGQPIPKTPRQLREFLGTAGFCRLWIPGFAEMAAPLYPLTKPGTLFNWGPDQQKAFQEIKQALLTAPALGLPDLTKPFELFVDEKQGYAKGVLTQKLGPWRRPVAYLSKKLDPVAAGWPPCLRMVAAIAVLTKDAGKLTMGQPLVILAPHAVEALVKQPPDRWLSNARMTHYQALLLDTDRVQFGPVVALNPATLLPLPEEGLQHDCLDILAEAHGTRSDLMDQPLPDADHTWYTDGSSFLQEGQRKAGAAVTTETEVIWARALPAGTSAQRAELIALTQALKMAEGKKLNVYTDSRYAFATAHIHGEIYRRRGWLTSEGKEIKNKDEILALLKALFLPKRLSIIHCPGHQKGNSAEARGNRMADQAAREVATRETPETSTLLAGKRTADGSEFEKRTADGSEFESPKKKAKVE

SEQ ID NO: 2268 - protein, 2089 aa, synthetic construct
MPAAKRVKLDGGDKKYSIGLDIGTNSVGWAVITDEYKVPSKKFKVLGNTDRHSIKKNLIGALLFDSGETAEATRLKRTARRRYTRRKNRICYLQEIFSNEMAKVDDSFFHRLEESFLVEEDKKHERHPIFGNIVDEVAYHEKYPTIYHLRKKLVDSTDKADLRLIYLALAHMIKFRGHFLIEGDLNPDNSDVDKLFIQLVQTYNQLFEENPINASGVDAKAILSARLSKSRRLENLIAQLPGEKKNGLFGNLIALSLGLTPNFKSNFDLAEDAKLQLSKDTYDDDLDNLLAQIGDQYADLFLAAKNLSDAILLSDILRVNTEITKAPLSASMIKRYDEHHQDLTLLKALVRQQLPEKYKEIFFDQSKNGYAGYIDGGASQEEFYKFIKPILEKMDGTEELLVKLNREDLLRKQRTFDNGSIPHQIHLGELHAILRRQEDFYPFLKDNREKIEKILTFRIPYYVGPLARGNSRFAWMTRKSEETITPWNFEEVVDKGASAQSFIERMTNFDKNLPNEKVLPKHSLLYEYFTVYNELTKVKYVTEGMRKPAFLSGEQKKAIVDLLFKTNRKVTVKQLKEDYFKKIECFDSVEISGVEDRFNASLGTYHDLLKIIKDKDFLDNEENEDILEDIVLTLTLFEDREMIEERLKTYAHLFDDKVMKQLKRRRYTGWGRLSRKLINGIRDKQSGKTILDFLKSDGFANRNFMQLIHDDSLTFKEDIQKAQVSGQGDSLHEHIANLAGSPAIKKGILQTVKVVDELVKVMGRHKPENIVIEMARENQTTQKGQKNSRERMKRIEEGIKELGSQILKEHPVENTQLQNEKLYLYYLQNGRDMYVDQELDINRLSDYDVDHIVPQSFLKDDSIDNKVLTRSDKARGKSDNVPSEEVVKKMKNYWRQLLNAKLITQRKFDNLTKAERGGLSELDKAGFIKRQLVETRQITKHVAQILDSRMNTKYDENDKLIREVKVITLKSKLVSDFRKDFQFYKVREINNYHHAHDAYLNAVVGTALIKKYPKLESEFVYGDYKVYDVRKMIAKSEQEIGKATAKYFFYSNIMNFFKTEITLANGEIRKRPLIETNGETGEIVWDKGRDFATVRKVLSMPQVNIVKKTEVQTGGFSKESILPKRNSDKLIARKKDWDPKKYGGFDSPTVAYSVLVVAKVEKGKSKKLKSVKELLGITIMERSSFEKNPIDFLEAKGYKEVKKDLIIKLPKYSLFELENGRKRMLASAGELQKGNELALPSKYVNFLYLASHYEKLKGSPEDNEQKQLFVEQHKHYLDEIIEQISEFSKRVILADANLDKVLSAYNKHRDKPIREQAENIIHLFTLTNLGAPAAFKYFDTTIDRKRYTSTKEVLDATLIHQSITGLYETRIDLSQLGGDGGGGGGGGTLNIEDEYRLHETSKEPDVSLGSTWLSDFPQAWAETGGMGLAVRQAPLIIPLKATSTPVSIKQYPMSQEARLGIKPHIQRLLDQGILVPCQSPWNTPLLPVKKPGTNDYRPVQDLREVNKRVEDIHPTVPNPYNLLSGLPPSHQWYTVLDLKDAFFCLRLHPTSQPLFAFEWRDPEMGISGQLTWTRLPQGFKNSPTLFNEALHRDLAGFRIQHPDLILLQYVDDLLLAATSELDCQQGTRALLQTLGDLGYRASAKKAQICQKQVKYLGYLLKEGQRWLTEARKETVMGQPIPKTPRQLREFLGTAGFCRLWIPGFAEMAAPLYPLTKPGTLFNWGPDQQKAFQEIKQALLTAPALGLPDLTKPFELFVDEKQGYAKGVLTQKLGPWRRPVAYLSKKLDPVAAGWPPCLRMVAAIAVLTKDAGKLTMGQPLVILAPHAVEALVKQPPDRWLSNARMTHYQALLLDTDRVQFGPVVALNPATLLPLPEEGLQHDCLDILAEAHGTRSDLMDQPLPDADHTWYTDGSSFLQEGQRKAGAAVTTETEVIWARALPAGTSAQRAELIALTQALKMAEGKKLNVYTDSRYAFATAHIHGEIYRRRGWLTSEGKEIKNKDEILALLKALFLPKRLSIIHCPGHQKGNSAEARGNRMADQAAREVATRETPETSTLLAGKRTADGSEFEKRTADGSEFESPKKKAKVE

SEQ ID NO: 2269 - protein, 2096 aa, synthetic construct
MPAAKRVKLDGGDKKYSIGLDIGTNSVGWAVITDEYKVPSKKFKVLGNTDRHSIKKNLIGALLFDSGETAEATRLKRTARRRYTRRKNRICYLQEIFSNEMAKVDDSFFHRLEESFLVEEDKKHERHPIFGNIVDEVAYHEKYPTIYHLRKKLVDSTDKADLRLIYLALAHMIKFRGHFLIEGDLNPDNSDVDKLFIQLVQTYNQLFEENPINASGVDAKAILSARLSKSRRLENLIAQLPGEKKNGLFGNLIALSLGLTPNFKSNFDLAEDAKLQLSKDTYDDDLDNLLAQIGDQYADLFLAAKNLSDAILLSDILRVNTEITKAPLSASMIKRYDEHHQDLTLLKALVRQQLPEKYKEIFFDQSKNGYAGYIDGGASQEEFYKFIKPILEKMDGTEELLVKLNREDLLRKQRTFDNGSIPHQIHLGELHAILRRQEDFYPFLKDNREKIEKILTFRIPYYVGPLARGNSRFAWMTRKSEETITPWNFEEVVDKGASAQSFIERMTNFDKNLPNEKVLPKHSLLYEYFTVYNELTKVKYVTEGMRKPAFLSGEQKKAIVDLLFKTNRKVTVKQLKEDYFKKIECFDSVEISGVEDRFNASLGTYHDLLKIIKDKDFLDNEENEDILEDIVLTLTLFEDREMIEERLKTYAHLFDDKVMKQLKRRRYTGWGRLSRKLINGIRDKQSGKTILDFLKSDGFANRNFMQLIHDDSLTFKEDIQKAQVSGQGDSLHEHIANLAGSPAIKKGILQTVKVVDELVKVMGRHKPENIVIEMARENQTTQKGQKNSRERMKRIEEGIKELGSQILKEHPVENTQLQNEKLYLYYLQNGRDMYVDQELDINRLSDYDVDHIVPQSFLKDDSIDNKVLTRSDKARGKSDNVPSEEVVKKMKNYWRQLLNAKLITQRKFDNLTKAERGGLSELDKAGFIKRQLVETRQITKHVAQILDSRMNTKYDENDKLIREVKVITLKSKLVSDFRKDFQFYKVREINNYHHAHDAYLNAVVGTALIKKYPKLESEFVYGDYKVYDVRKMIAKSEQEIGKATAKYFFYSNIMNFFKTEITLANGEIRKRPLIETNGETGEIVWDKGRDFATVRKVLSMPQVNIVKKTEVQTGGFSKESILPKRNSDKLIARKKDWDPKKYGGFDSPTVAYSVLVVAKVEKGKSKKLKSVKELLGITIMERSSFEKNPIDFLEAKGYKEVKKDLIIKLPKYSLFELENGRKRMLASAGELQKGNELALPSKYVNFLYLASHYEKLKGSPEDNEQKQLFVEQHKHYLDEIIEQISEFSKRVILADANLDKVLSAYNKHRDKPIREQAENIIHLFTLTNLGAPAAFKYFDTTIDRKRYTSTKEVLDATLIHQSITGLYETRIDLSQLGGDGGPAPEAAAKGGGGGTLNIEDEYRLHETSKEPDVSLGSTWLSDFPQAWAETGGMGLAVRQAPLIIPLKATSTPVSIKQYPMSQEARLGIKPHIQRLLDQGILVPCQSPWNTPLLPVKKPGTNDYRPVQDLREVNKRVEDIHPTVPNPYNLLSGLPPSHQWYTVLDLKDAFFCLRLHPTSQPLFAFEWRDPEMGISGQLTWTRLPQGFKNSPTLFNEALHRDLAGFRIQHPDLILLQYVDDLLLAATSELDCQQGTRALLQTLGDLGYRASAKKAQICQKQVKYLGYLLKEGQRWLTEARKETVMGQPIPKTPRQLREFLGTAGFCRLWIPGFAEMAAPLYPLTKPGTLFNWGPDQQKAFQEIKQALLTAPALGLPDLTKPFELFVDEKQGYAKGVLTQKLGPWRRPVAYLSKKLDPVAAGWPPCLRMVAAIAVLTKDAGKLTMGQPLVILAPHAVEALVKQPPDRWLSNARMTHYQALLLDTDRVQFGPVVALNPATLLPLPEEGLQHDCLDILAEAHGTRSDLMDQPLPDADHTWYTDGSSFLQEGQRKAGAAVTTETEVIWARALPAGTSAQRAELIALTQALKMAEGKKLNVYTDSRYAFATAHIHGEIYRRRGWLTSEGKEIKNKDEILALLKALFLPKRLSIIHCPGHQKGNSAEARGNRMADQAAREVATRETPETSTLLAGKRTADGSEFEKRTADGSEFESPKKKAKVE

SEQ ID NO: 2270 - protein, 2091 aa, synthetic construct
MPAAKRVKLDGGDKKYSIGLDIGTNSVGWAVITDEYKVPSKKFKVLGNTDRHSIKKNLIGALLFDSGETAEATRLKRTARRRYTRRKNRICYLQEIFSNEMAKVDDSFFHRLEESFLVEEDKKHERHPIFGNIVDEVAYHEKYPTIYHLRKKLVDSTDKADLRLIYLALAHMIKFRGHFLIEGDLNPDNSDVDKLFIQLVQTYNQLFEENPINASGVDAKAILSARLSKSRRLENLIAQLPGEKKNGLFGNLIALSLGLTPNFKSNFDLAEDAKLQLSKDTYDDDLDNLLAQIGDQYADLFLAAKNLSDAILLSDILRVNTEITKAPLSASMIKRYDEHHQDLTLLKALVRQQLPEKYKEIFFDQSKNGYAGYIDGGASQEEFYKFIKPILEKMDGTEELLVKLNREDLLRKQRTFDNGSIPHQIHLGELHAILRRQEDFYPFLKDNREKIEKILTFRIPYYVGPLARGNSRFAWMTRKSEETITPWNFEEVVDKGASAQSFIERMTNFDKNLPNEKVLPKHSLLYEYFTVYNELTKVKYVTEGMRKPAFLSGEQKKAIVDLLFKTNRKVTVKQLKEDYFKKIECFDSVEISGVEDRFNASLGTYHDLLKIIKDKDFLDNEENEDILEDIVLTLTLFEDREMIEERLKTYAHLFDDKVMKQLKRRRYTGWGRLSRKLINGIRDKQSGKTILDFLKSDGFANRNFMQLIHDDSLTFKEDIQKAQVSGQGDSLHEHIANLAGSPAIKKGILQTVKVVDELVKVMGRHKPENIVIEMARENQTTQKGQKNSRERMKRIEEGIKELGSQILKEHPVENTQLQNEKLYLYYLQNGRDMYVDQELDINRLSDYDVDHIVPQSFLKDDSIDNKVLTRSDKARGKSDNVPSEEVVKKMKNYWRQLLNAKLITQRKFDNLTKAERGGLSELDKAGFIKRQLVETRQITKHVAQILDSRMNTKYDENDKLIREVKVITLKSKLVSDFRKDFQFYKVREINNYHHAHDAYLNAVVGTALIKKYPKLESEFVYGDYKVYDVRKMIAKSEQEIGKATAKYFFYSNIMNFFKTEITLANGEIRKRPLIETNGETGEIVWDKGRDFATVRKVLSMPQVNIVKKTEVQTGGFSKESILPKRNSDKLIARKKDWDPKKYGGFDSPTVAYSVLVVAKVEKGKSKKLKSVKELLGITIMERSSFEKNPIDFLEAKGYKEVKKDLIIKLPKYSLFELENGRKRMLASAGELQKGNELALPSKYVNFLYLASHYEKLKGSPEDNEQKQLFVEQHKHYLDEIIEQISEFSKRVILADANLDKVLSAYNKHRDKPIREQAENIIHLFTLTNLGAPAAFKYFDTTIDRKRYTSTKEVLDATLIHQSITGLYETRIDLSQLGGDGGGGSGSSGGTLNIEDEYRLHETSKEPDVSLGSTWLSDFPQAWAETGGMGLAVRQAPLIIPLKATSTPVSIKQYPMSQEARLGIKPHIQRLLDQGILVPCQSPWNTPLLPVKKPGTNDYRPVQDLREVNKRVEDIHPTVPNPYNLLSGLPPSHQWYTVLDLKDAFFCLRLHPTSQPLFAFEWRDPEMGISGQLTWTRLPQGFKNSPTLFNEALHRDLAGFRIQHPDLILLQYVDDLLLAATSELDCQQGTRALLQTLGDLGYRASAKKAQICQKQVKYLGYLLKEGQRWLTEARKETVMGQPIPKTPRQLREFLGTAGFCRLWIPGFAEMAAPLYPLTKPGTLFNWGPDQQKAFQEIKQALLTAPALGLPDLTKPFELFVDEKQGYAKGVLTQKLGPWRRPVAYLSKKLDPVAAGWPPCLRMVAAIAVLTKDAGKLTMGQPLVILAPHAVEALVKQPPDRWLSNARMTHYQALLLDTDRVQFGPVVALNPATLLPLPEEGLQHDCLDILAEAHGTRSDLMDQPLPDADHTWYTDGSSFLQEGQRKAGAAVTTETEVIWARALPAGTSAQRAELIALTQALKMAEGKKLNVYTDSRYAFATAHIHGEIYRRRGWLTSEGKEIKNKDEILALLKALFLPKRLSIIHCPGHQKGNSAEARGNRMADQAAREVATRETPETSTLLAGKRTADGSEFEKRTADGSEFESPKKKAKVE

SEQ ID NO: 2271 - protein, 2091 aa, synthetic construct
MPAAKRVKLDGGDKKYSIGLDIGTNSVGWAVITDEYKVPSKKFKVLGNTDRHSIKKNLIGALLFDSGETAEATRLKRTARRRYTRRKNRICYLQEIFSNEMAKVDDSFFHRLEESFLVEEDKKHERHPIFGNIVDEVAYHEKYPTIYHLRKKLVDSTDKADLRLIYLALAHMIKFRGHFLIEGDLNPDNSDVDKLFIQLVQTYNQLFEENPINASGVDAKAILSARLSKSRRLENLIAQLPGEKKNGLFGNLIALSLGLTPNFKSNFDLAEDAKLQLSKDTYDDDLDNLLAQIGDQYADLFLAAKNLSDAILLSDILRVNTEITKAPLSASMIKRYDEHHQDLTLLKALVRQQLPEKYKEIFFDQSKNGYAGYIDGGASQEEFYKFIKPILEKMDGTEELLVKLNREDLLRKQRTFDNGSIPHQIHLGELHAILRRQEDFYPFLKDNREKIEKILTFRIPYYVGPLARGNSRFAWMTRKSEETITPWNFEEVVDKGASAQSFIERMTNFDKNLPNEKVLPKHSLLYEYFTVYNELTKVKYVTEGMRKPAFLSGEQKKAIVDLLFKTNRKVTVKQLKEDYFKKIECFDSVEISGVEDRFNASLGTYHDLLKIIKDKDFLDNEENEDILEDIVLTLTLFEDREMIEERLKTYAHLFDDKVMKQLKRRRYTGWGRLSRKLINGIRDKQSGKTILDFLKSDGFANRNFMQLIHDDSLTFKEDIQKAQVSGQGDSLHEHIANLAGSPAIKKGILQTVKVVDELVKVMGRHKPENIVIEMARENQTTQKGQKNSRERMKRIEEGIKELGSQILKEHPVENTQLQNEKLYLYYLQNGRDMYVDQELDINRLSDYDVDHIVPQSFLKDDSIDNKVLTRSDKARGKSDNVPSEEVVKKMKNYWRQLLNAKLITQRKFDNLTKAERGGLSELDKAGFIKRQLVETRQITKHVAQILDSRMNTKYDENDKLIREVKVITLKSKLVSDFRKDFQFYKVREINNYHHAHDAYLNAVVGTALIKKYPKLESEFVYGDYKVYDVRKMIAKSEQEIGKATAKYFFYSNIMNFFKTEITLANGEIRKRPLIETNGETGEIVWDKGRDFATVRKVLSMPQVNIVKKTEVQTGGFSKESILPKRNSDKLIARKKDWDPKKYGGFDSPTVAYSVLVVAKVEKGKSKKLKSVKELLGITIMERSSFEKNPIDFLEAKGYKEVKKDLIIKLPKYSLFELENGRKRMLASAGELQKGNELALPSKYVNFLYLASHYEKLKGSPEDNEQKQLFVEQHKHYLDEIIEQISEFSKRVILADANLDKVLSAYNKHRDKPIREQAENIIHLFTLTNLGAPAAFKYFDTTIDRKRYTSTKEVLDATLIHQSITGLYETRIDLSQLGGDGGPAPGSSGGTLNIEDEYRLHETSKEPDVSLGSTWLSDFPQAWAETGGMGLAVRQAPLIIPLKATSTPVSIKQYPMSQEARLGIKPHIQRLLDQGILVPCQSPWNTPLLPVKKPGTNDYRPVQDLREVNKRVEDIHPTVPNPYNLLSGLPPSHQWYTVLDLKDAFFCLRLHPTSQPLFAFEWRDPEMGISGQLTWTRLPQGFKNSPTLFNEALHRDLAGFRIQHPDLILLQYVDDLLLAATSELDCQQGTRALLQTLGDLGYRASAKKAQICQKQVKYLGYLLKEGQRWLTEARKETVMGQPIPKTPRQLREFLGTAGFCRLWIPGFAEMAAPLYPLTKPGTLFNWGPDQQKAFQEIKQALLTAPALGLPDLTKPFELFVDEKQGYAKGVLTQKLGPWRRPVAYLSKKLDPVAAGWPPCLRMVAAIAVLTKDAGKLTMGQPLVILAPHAVEALVKQPPDRWLSNARMTHYQALLLDTDRVQFGPVVALNPATLLPLPEEGLQHDCLDILAEAHGTRSDLMDQPLPDADHTWYTDGSSFLQEGQRKAGAAVTTETEVIWARALPAGTSAQRAELIALTQALKMAEGKKLNVYTDSRYAFATAHIHGEIYRRRGWLTSEGKEIKNKDEILALLKALFLPKRLSIIHCPGHQKGNSAEARGNRMADQAAREVATRETPETSTLLAGKRTADGSEFEKRTADGSEFESPKKKAKVE

SEQ ID NO: 2272 - protein, 2094 aa, synthetic construct
MPAAKRVKLDGGDKKYSIGLDIGTNSVGWAVITDEYKVPSKKFKVLGNTDRHSIKKNLIGALLFDSGETAEATRLKRTARRRYTRRKNRICYLQEIFSNEMAKVDDSFFHRLEESFLVEEDKKHERHPIFGNIVDEVAYHEKYPTIYHLRKKLVDSTDKADLRLIYLALAHMIKFRGHFLIEGDLNPDNSDVDKLFIQLVQTYNQLFEENPINASGVDAKAILSARLSKSRRLENLIAQLPGEKKNGLFGNLIALSLGLTPNFKSNFDLAEDAKLQLSKDTYDDDLDNLLAQIGDQYADLFLAAKNLSDAILLSDILRVNTEITKAPLSASMIKRYDEHHQDLTLLKALVRQQLPEKYKEIFFDQSKNGYAGYIDGGASQEEFYKFIKPILEKMDGTEELLVKLNREDLLRKQRTFDNGSIPHQIHLGELHAILRRQEDFYPFLKDNREKIEKILTFRIPYYVGPLARGNSRFAWMTRKSEETITPWNFEEVVDKGASAQSFIERMTNFDKNLPNEKVLPKHSLLYEYFTVYNELTKVKYVTEGMRKPAFLSGEQKKAIVDLLFKTNRKVTVKQLKEDYFKKIECFDSVEISGVEDRFNASLGTYHDLLKIIKDKDFLDNEENEDILEDIVLTLTLFEDREMIEERLKTYAHLFDDKVMKQLKRRRYTGWGRLSRKLINGIRDKQSGKTILDFLKSDGFANRNFMQLIHDDSLTFKEDIQKAQVSGQGDSLHEHIANLAGSPAIKKGILQTVKVVDELVKVMGRHKPENIVIEMARENQTTQKGQKNSRERMKRIEEGIKELGSQILKEHPVENTQLQNEKLYLYYLQNGRDMYVDQELDINRLSDYDVDHIVPQSFLKDDSIDNKVLTRSDKARGKSDNVPSEEVVKKMKNYWRQLLNAKLITQRKFDNLTKAERGGLSELDKAGFIKRQLVETRQITKHVAQILDSRMNTKYDENDKLIREVKVITLKSKLVSDFRKDFQFYKVREINNYHHAHDAYLNAVVGTALIKKYPKLESEFVYGDYKVYDVRKMIAKSEQEIGKATAKYFFYSNIMNFFKTEITLANGEIRKRPLIETNGETGEIVWDKGRDFATVRKVLSMPQVNIVKKTEVQTGGFSKESILPKRNSDKLIARKKDWDPKKYGGFDSPTVAYSVLVVAKVEKGKSKKLKSVKELLGITIMERSSFEKNPIDFLEAKGYKEVKKDLIIKLPKYSLFELENGRKRMLASAGELQKGNELALPSKYVNFLYLASHYEKLKGSPEDNEQKQLFVEQHKHYLDEIIEQISEFSKRVILADANLDKVLSAYNKHRDKPIREQAENIIHLFTLTNLGAPAAFKYFDTTIDRKRYTSTKEVLDATLIHQSITGLYETRIDLSQLGGDGGGGSPAPGGGGGTLNIEDEYRLHETSKEPDVSLGSTWLSDFPQAWAETGGMGLAVRQAPLIIPLKATSTPVSIKQYPMSQEARLGIKPHIQRLLDQGILVPCQSPWNTPLLPVKKPGTNDYRPVQDLREVNKRVEDIHPTVPNPYNLLSGLPPSHQWYTVLDLKDAFFCLRLHPTSQPLFAFEWRDPEMGISGQLTWTRLPQGFKNSPTLFNEALHRDLAGFRIQHPDLILLQYVDDLLLAATSELDCQQGTRALLQTLGDLGYRASAKKAQICQKQVKYLGYLLKEGQRWLTEARKETVMGQPIPKTPRQLREFLGTAGFCRLWIPGFAEMAAPLYPLTKPGTLFNWGPDQQKAFQEIKQALLTAPALGLPDLTKPFELFVDEKQGYAKGVLTQKLGPWRRPVAYLSKKLDPVAAGWPPCLRMVAAIAVLTKDAGKLTMGQPLVILAPHAVEALVKQPPDRWLSNARMTHYQALLLDTDRVQFGPVVALNPATLLPLPEEGLQHDCLDILAEAHGTRSDLMDQPLPDADHTWYTDGSSFLQEGQRKAGAAVTTETEVIWARALPAGTSAQRAELIALTQALKMAEGKKLNVYTDSRYAFATAHIHGEIYRRRGWLTSEGKEIKNKDEILALLKALFLPKRLSIIHCPGHQKGNSAEARGNRMADQAAREVATRETPETSTLLAGKRTADGSEFEKRTADGSEFESPKKKAKVE

SEQ ID NO: 2273 - protein, 2096 aa, synthetic construct
MPAAKRVKLDGGDKKYSIGLDIGTNSVGWAVITDEYKVPSKKFKVLGNTDRHSIKKNLIGALLFDSGETAEATRLKRTARRRYTRRKNRICYLQEIFSNEMAKVDDSFFHRLEESFLVEEDKKHERHPIFGNIVDEVAYHEKYPTIYHLRKKLVDSTDKADLRLIYLALAHMIKFRGHFLIEGDLNPDNSDVDKLFIQLVQTYNQLFEENPINASGVDAKAILSARLSKSRRLENLIAQLPGEKKNGLFGNLIALSLGLTPNFKSNFDLAEDAKLQLSKDTYDDDLDNLLAQIGDQYADLFLAAKNLSDAILLSDILRVNTEITKAPLSASMIKRYDEHHQDLTLLKALVRQQLPEKYKEIFFDQSKNGYAGYIDGGASQEEFYKFIKPILEKMDGTEELLVKLNREDLLRKQRTFDNGSIPHQIHLGELHAILRRQEDFYPFLKDNREKIEKILTFRIPYYVGPLARGNSRFAWMTRKSEETITPWNFEEVVDKGASAQSFIERMTNFDKNLPNEKVLPKHSLLYEYFTVYNELTKVKYVTEGMRKPAFLSGEQKKAIVDLLFKTNRKVTVKQLKEDYFKKIECFDSVEISGVEDRFNASLGTYHDLLKIIKDKDFLDNEENEDILEDIVLTLTLFEDREMIEERLKTYAHLFDDKVMKQLKRRRYTGWGRLSRKLINGIRDKQSGKTILDFLKSDGFANRNFMQLIHDDSLTFKEDIQKAQVSGQGDSLHEHIANLAGSPAIKKGILQTVKVVDELVKVMGRHKPENIVIEMARENQTTQKGQKNSRERMKRIEEGIKELGSQILKEHPVENTQLQNEKLYLYYLQNGRDMYVDQELDINRLSDYDVDHIVPQSFLKDDSIDNKVLTRSDKARGKSDNVPSEEVVKKMKNYWRQLLNAKLITQRKFDNLTKAERGGLSELDKAGFIKRQLVETRQITKHVAQILDSRMNTKYDENDKLIREVKVITLKSKLVSDFRKDFQFYKVREINNYHHAHDAYLNAVVGTALIKKYPKLESEFVYGDYKVYDVRKMIAKSEQEIGKATAKYFFYSNIMNFFKTEITLANGEIRKRPLIETNGETGEIVWDKGRDFATVRKVLSMPQVNIVKKTEVQTGGFSKESILPKRNSDKLIARKKDWDPKKYGGFDSPTVAYSVLVVAKVEKGKSKKLKSVKELLGITIMERSSFEKNPIDFLEAKGYKEVKKDLIIKLPKYSLFELENGRKRMLASAGELQKGNELALPSKYVNFLYLASHYEKLKGSPEDNEQKQLFVEQHKHYLDEIIEQISEFSKRVILADANLDKVLSAYNKHRDKPIREQAENIIHLFTLTNLGAPAAFKYFDTTIDRKRYTSTKEVLDATLIHQSITGLYETRIDLSQLGGDGGGSSGGSEAAAKGGTLNIEDEYRLHETSKEPDVSLGSTWLSDFPQAWAETGGMGLAVRQAPLIIPLKATSTPVSIKQYPMSQEARLGIKPHIQRLLDQGILVPCQSPWNTPLLPVKKPGTNDYRPVQDLREVNKRVEDIHPTVPNPYNLLSGLPPSHQWYTVLDLKDAFFCLRLHPTSQPLFAFEWRDPEMGISGQLTWTRLPQGFKNSPTLFNEALHRDLAGFRIQHPDLILLQYVDDLLLAATSELDCQQGTRALLQTLGDLGYRASAKKAQICQKQVKYLGYLLKEGQRWLTEARKETVMGQPIPKTPRQLREFLGTAGFCRLWIPGFAEMAAPLYPLTKPGTLFNWGPDQQKAFQEIKQALLTAPALGLPDLTKPFELFVDEKQGYAKGVLTQKLGPWRRPVAYLSKKLDPVAAGWPPCLRMVAAIAVLTKDAGKLTMGQPLVILAPHAVEALVKQPPDRWLSNARMTHYQALLLDTDRVQFGPVVALNPATLLPLPEEGLQHDCLDILAEAHGTRSDLMDQPLPDADHTWYTDGSSFLQEGQRKAGAAVTTETEVIWARALPAGTSAQRAELIALTQALKMAEGKKLNVYTDSRYAFATAHIHGEIYRRRGWLTSEGKEIKNKDEILALLKALFLPKRLSIIHCPGHQKGNSAEARGNRMADQAAREVATRETPETSTLLAGKRTADGSEFEKRTADGSEFESPKKKAKVE

SEQ ID NO: 2274 - protein, 2094 aa, synthetic construct
MPAAKRVKLDGGDKKYSIGLDIGTNSVGWAVITDEYKVPSKKFKVLGNTDRHSIKKNLIGALLFDSGETAEATRLKRTARRRYTRRKNRICYLQEIFSNEMAKVDDSFFHRLEESFLVEEDKKHERHPIFGNIVDEVAYHEKYPTIYHLRKKLVDSTDKADLRLIYLALAHMIKFRGHFLIEGDLNPDNSDVDKLFIQLVQTYNQLFEENPINASGVDAKAILSARLSKSRRLENLIAQLPGEKKNGLFGNLIALSLGLTPNFKSNFDLAEDAKLQLSKDTYDDDLDNLLAQIGDQYADLFLAAKNLSDAILLSDILRVNTEITKAPLSASMIKRYDEHHQDLTLLKALVRQQLPEKYKEIFFDQSKNGYAGYIDGGASQEEFYKFIKPILEKMDGTEELLVKLNREDLLRKQRTFDNGSIPHQIHLGELHAILRRQEDFYPFLKDNREKIEKILTFRIPYYVGPLARGNSRFAWMTRKSEETITPWNFEEVVDKGASAQSFIERMTNFDKNLPNEKVLPKHSLLYEYFTVYNELTKVKYVTEGMRKPAFLSGEQKKAIVDLLFKTNRKVTVKQLKEDYFKKIECFDSVEISGVEDRFNASLGTYHDLLKIIKDKDFLDNEENEDILEDIVLTLTLFEDREMIEERLKTYAHLFDDKVMKQLKRRRYTGWGRLSRKLINGIRDKQSGKTILDFLKSDGFANRNFMQLIHDDSLTFKEDIQKAQVSGQGDSLHEHIANLAGSPAIKKGILQTVKVVDELVKVMGRHKPENIVIEMARENQTTQKGQKNSRERMKRIEEGIKELGSQILKEHPVENTQLQNEKLYLYYLQNGRDMYVDQELDINRLSDYDVDHIVPQSFLKDDSIDNKVLTRSDKARGKSDNVPSEEVVKKMKNYWRQLLNAKLITQRKFDNLTKAERGGLSELDKAGFIKRQLVETRQITKHVAQILDSRMNTKYDENDKLIREVKVITLKSKLVSDFRKDFQFYKVREINNYHHAHDAYLNAVVGTALIKKYPKLESEFVYGDYKVYDVRKMIAKSEQEIGKATAKYFFYSNIMNFFKTEITLANGEIRKRPLIETNGETGEIVWDKGRDFATVRKVLSMPQVNIVKKTEVQTGGFSKESILPKRNSDKLIARKKDWDPKKYGGFDSPTVAYSVLVVAKVEKGKSKKLKSVKELLGITIMERSSFEKNPIDFLEAKGYKEVKKDLIIKLPKYSLFELENGRKRMLASAGELQKGNELALPSKYVNFLYLASHYEKLKGSPEDNEQKQLFVEQHKHYLDEIIEQISEFSKRVILADANLDKVLSAYNKHRDKPIREQAENIIHLFTLTNLGAPAAFKYFDTTIDRKRYTSTKEVLDATLIHQSITGLYETRIDLSQLGGDGGGGSGGSGGSGGTLNIEDEYRLHETSKEPDVSLGSTWLSDFPQAWAETGGMGLAVRQAPLIIPLKATSTPVSIKQYPMSQEARLGIKPHIQRLLDQGILVPCQSPWNTPLLPVKKPGTNDYRPVQDLREVNKRVEDIHPTVPNPYNLLSGLPPSHQWYTVLDLKDAFFCLRLHPTSQPLFAFEWRDPEMGISGQLTWTRLPQGFKNSPTLFNEALHRDLAGFRIQHPDLILLQYVDDLLLAATSELDCQQGTRALLQTLGDLGYRASAKKAQICQKQVKYLGYLLKEGQRWLTEARKETVMGQPIPKTPRQLREFLGTAGFCRLWIPGFAEMAAPLYPLTKPGTLFNWGPDQQKAFQEIKQALLTAPALGLPDLTKPFELFVDEKQGYAKGVLTQKLGPWRRPVAYLSKKLDPVAAGWPPCLRMVAAIAVLTKDAGKLTMGQPLVILAPHAVEALVKQPPDRWLSNARMTHYQALLLDTDRVQFGPVVALNPATLLPLPEEGLQHDCLDILAEAHGTRSDLMDQPLPDADHTWYTDGSSFLQEGQRKAGAAVTTETEVIWARALPAGTSAQRAELIALTQALKMAEGKKLNVYTDSRYAFATAHIHGEIYRRRGWLTSEGKEIKNKDEILALLKALFLPKRLSIIHCPGHQKGNSAEARGNRMADQAAREVATRETPETSTLLAGKRTADGSEFEKRTADGSEFESPKKKAKVE

SEQ ID NO: 2275 - protein, 2096 aa, synthetic construct
MPAAKRVKLDGGDKKYSIGLDIGTNSVGWAVITDEYKVPSKKFKVLGNTDRHSIKKNLIGALLFDSGETAEATRLKRTARRRYTRRKNRICYLQEIFSNEMAKVDDSFFHRLEESFLVEEDKKHERHPIFGNIVDEVAYHEKYPTIYHLRKKLVDSTDKADLRLIYLALAHMIKFRGHFLIEGDLNPDNSDVDKLFIQLVQTYNQLFEENPINASGVDAKAILSARLSKSRRLENLIAQLPGEKKNGLFGNLIALSLGLTPNFKSNFDLAEDAKLQLSKDTYDDDLDNLLAQIGDQYADLFLAAKNLSDAILLSDILRVNTEITKAPLSASMIKRYDEHHQDLTLLKALVRQQLPEKYKEIFFDQSKNGYAGYIDGGASQEEFYKFIKPILEKMDGTEELLVKLNREDLLRKQRTFDNGSIPHQIHLGELHAILRRQEDFYPFLKDNREKIEKILTFRIPYYVGPLARGNSRFAWMTRKSEETITPWNFEEVVDKGASAQSFIERMTNFDKNLPNEKVLPKHSLLYEYFTVYNELTKVKYVTEGMRKPAFLSGEQKKAIVDLLFKTNRKVTVKQLKEDYFKKIECFDSVEISGVEDRFNASLGTYHDLLKIIKDKDFLDNEENEDILEDIVLTLTLFEDREMIEERLKTYAHLFDDKVMKQLKRRRYTGWGRLSRKLINGIRDKQSGKTILDFLKSDGFANRNFMQLIHDDSLTFKEDIQKAQVSGQGDSLHEHIANLAGSPAIKKGILQTVKVVDELVKVMGRHKPENIVIEMARENQTTQKGQKNSRERMKRIEEGIKELGSQILKEHPVENTQLQNEKLYLYYLQNGRDMYVDQELDINRLSDYDVDHIVPQSFLKDDSIDNKVLTRSDKARGKSDNVPSEEVVKKMKNYWRQLLNAKLITQRKFDNLTKAERGGLSELDKAGFIKRQLVETRQITKHVAQILDSRMNTKYDENDKLIREVKVITLKSKLVSDFRKDFQFYKVREINNYHHAHDAYLNAVVGTALIKKYPKLESEFVYGDYKVYDVRKMIAKSEQEIGKATAKYFFYSNIMNFFKTEITLANGEIRKRPLIETNGETGEIVWDKGRDFATVRKVLSMPQVNIVKKTEVQTGGFSKESILPKRNSDKLIARKKDWDPKKYGGFDSPTVAYSVLVVAKVEKGKSKKLKSVKELLGITIMERSSFEKNPIDFLEAKGYKEVKKDLIIKLPKYSLFELENGRKRMLASAGELQKGNELALPSKYVNFLYLASHYEKLKGSPEDNEQKQLFVEQHKHYLDEIIEQISEFSKRVILADANLDKVLSAYNKHRDKPIREQAENIIHLFTLTNLGAPAAFKYFDTTIDRKRYTSTKEVLDATLIHQSITGLYETRIDLSQLGGDGGGGGEAAAKGGSGGTLNIEDEYRLHETSKEPDVSLGSTWLSDFPQAWAETGGMGLAVRQAPLIIPLKATSTPVSIKQYPMSQEARLGIKPHIQRLLDQGILVPCQSPWNTPLLPVKKPGTNDYRPVQDLREVNKRVEDIHPTVPNPYNLLSGLPPSHQWYTVLDLKDAFFCLRLHPTSQPLFAFEWRDPEMGISGQLTWTRLPQGFKNSPTLFNEALHRDLAGFRIQHPDLILLQYVDDLLLAATSELDCQQGTRALLQTLGDLGYRASAKKAQICQKQVKYLGYLLKEGQRWLTEARKETVMGQPIPKTPRQLREFLGTAGFCRLWIPGFAEMAAPLYPLTKPGTLFNWGPDQQKAFQEIKQALLTAPALGLPDLTKPFELFVDEKQGYAKGVLTQKLGPWRRPVAYLSKKLDPVAAGWPPCLRMVAAIAVLTKDAGKLTMGQPLVILAPHAVEALVKQPPDRWLSNARMTHYQALLLDTDRVQFGPVVALNPATLLPLPEEGLQHDCLDILAEAHGTRSDLMDQPLPDADHTWYTDGSSFLQEGQRKAGAAVTTETEVIWARALPAGTSAQRAELIALTQALKMAEGKKLNVYTDSRYAFATAHIHGEIYRRRGWLTSEGKEIKNKDEILALLKALFLPKRLSIIHCPGHQKGNSAEARGNRMADQAAREVATRETPETSTLLAGKRTADGSEFEKRTADGSEFESPKKKAKVE

SEQ ID NO: 2276 - protein, 2095 aa, synthetic construct
MPAAKRVKLDGGDKKYSIGLDIGTNSVGWAVITDEYKVPSKKFKVLGNTDRHSIKKNLIGALLFDSGETAEATRLKRTARRRYTRRKNRICYLQEIFSNEMAKVDDSFFHRLEESFLVEEDKKHERHPIFGNIVDEVAYHEKYPTIYHLRKKLVDSTDKADLRLIYLALAHMIKFRGHFLIEGDLNPDNSDVDKLFIQLVQTYNQLFEENPINASGVDAKAILSARLSKSRRLENLIAQLPGEKKNGLFGNLIALSLGLTPNFKSNFDLAEDAKLQLSKDTYDDDLDNLLAQIGDQYADLFLAAKNLSDAILLSDILRVNTEITKAPLSASMIKRYDEHHQDLTLLKALVRQQLPEKYKEIFFDQSKNGYAGYIDGGASQEEFYKFIKPILEKMDGTEELLVKLNREDLLRKQRTFDNGSIPHQIHLGELHAILRRQEDFYPFLKDNREKIEKILTFRIPYYVGPLARGNSRFAWMTRKSEETITPWNFEEVVDKGASAQSFIERMTNFDKNLPNEKVLPKHSLLYEYFTVYNELTKVKYVTEGMRKPAFLSGEQKKAIVDLLFKTNRKVTVKQLKEDYFKKIECFDSVEISGVEDRFNASLGTYHDLLKIIKDKDFLDNEENEDILEDIVLTLTLFEDREMIEERLKTYAHLFDDKVMKQLKRRRYTGWGRLSRKLINGIRDKQSGKTILDFLKSDGFANRNFMQLIHDDSLTFKEDIQKAQVSGQGDSLHEHIANLAGSPAIKKGILQTVKVVDELVKVMGRHKPENIVIEMARENQTTQKGQKNSRERMKRIEEGIKELGSQILKEHPVENTQLQNEKLYLYYLQNGRDMYVDQELDINRLSDYDVDHIVPQSFLKDDSIDNKVLTRSDKARGKSDNVPSEEVVKKMKNYWRQLLNAKLITQRKFDNLTKAERGGLSELDKAGFIKRQLVETRQITKHVAQILDSRMNTKYDENDKLIREVKVITLKSKLVSDFRKDFQFYKVREINNYHHAHDAYLNAVVGTALIKKYPKLESEFVYGDYKVYDVRKMIAKSEQEIGKATAKYFFYSNIMNFFKTEITLANGEIRKRPLIETNGETGEIVWDKGRDFATVRKVLSMPQVNIVKKTEVQTGGFSKESILPKRNSDKLIARKKDWDPKKYGGFDSPTVAYSVLVVAKVEKGKSKKLKSVKELLGITIMERSSFEKNPIDFLEAKGYKEVKKDLIIKLPKYSLFELENGRKRMLASAGELQKGNELALPSKYVNFLYLASHYEKLKGSPEDNEQKQLFVEQHKHYLDEIIEQISEFSKRVILADANLDKVLSAYNKHRDKPIREQAENIIHLFTLTNLGAPAAFKYFDTTIDRKRYTSTKEVLDATLIHQSITGLYETRIDLSQLGGDGGGGGGSGGGGSGGTLNIEDEYRLHETSKEPDVSLGSTWLSDFPQAWAETGGMGLAVRQAPLIIPLKATSTPVSIKQYPMSQEARLGIKPHIQRLLDQGILVPCQSPWNTPLLPVKKPGTNDYRPVQDLREVNKRVEDIHPTVPNPYNLLSGLPPSHQWYTVLDLKDAFFCLRLHPTSQPLFAFEWRDPEMGISGQLTWTRLPQGFKNSPTLFNEALHRDLAGFRIQHPDLILLQYVDDLLLAATSELDCQQGTRALLQTLGDLGYRASAKKAQICQKQVKYLGYLLKEGQRWLTEARKETVMGQPIPKTPRQLREFLGTAGFCRLWIPGFAEMAAPLYPLTKPGTLFNWGPDQQKAFQEIKQALLTAPALGLPDLTKPFELFVDEKQGYAKGVLTQKLGPWRRPVAYLSKKLDPVAAGWPPCLRMVAAIAVLTKDAGKLTMGQPLVILAPHAVEALVKQPPDRWLSNARMTHYQALLLDTDRVQFGPVVALNPATLLPLPEEGLQHDCLDILAEAHGTRSDLMDQPLPDADHTWYTDGSSFLQEGQRKAGAAVTTETEVIWARALPAGTSAQRAELIALTQALKMAEGKKLNVYTDSRYAFATAHIHGEIYRRRGWLTSEGKEIKNKDEILALLKALFLPKRLSIIHCPGHQKGNSAEARGNRMADQAAREVATRETPETSTLLAGKRTADGSEFEKRTADGSEFESPKKKAKVE

SEQ ID NO: 2277 - protein, 2096 aa, synthetic construct
MPAAKRVKLDGGDKKYSIGLDIGTNSVGWAVITDEYKVPSKKFKVLGNTDRHSIKKNLIGALLFDSGETAEATRLKRTARRRYTRRKNRICYLQEIFSNEMAKVDDSFFHRLEESFLVEEDKKHERHPIFGNIVDEVAYHEKYPTIYHLRKKLVDSTDKADLRLIYLALAHMIKFRGHFLIEGDLNPDNSDVDKLFIQLVQTYNQLFEENPINASGVDAKAILSARLSKSRRLENLIAQLPGEKKNGLFGNLIALSLGLTPNFKSNFDLAEDAKLQLSKDTYDDDLDNLLAQIGDQYADLFLAAKNLSDAILLSDILRVNTEITKAPLSASMIKRYDEHHQDLTLLKALVRQQLPEKYKEIFFDQSKNGYAGYIDGGASQEEFYKFIKPILEKMDGTEELLVKLNREDLLRKQRTFDNGSIPHQIHLGELHAILRRQEDFYPFLKDNREKIEKILTFRIPYYVGPLARGNSRFAWMTRKSEETITPWNFEEVVDKGASAQSFIERMTNFDKNLPNEKVLPKHSLLYEYFTVYNELTKVKYVTEGMRKPAFLSGEQKKAIVDLLFKTNRKVTVKQLKEDYFKKIECFDSVEISGVEDRFNASLGTYHDLLKIIKDKDFLDNEENEDILEDIVLTLTLFEDREMIEERLKTYAHLFDDKVMKQLKRRRYTGWGRLSRKLINGIRDKQSGKTILDFLKSDGFANRNFMQLIHDDSLTFKEDIQKAQVSGQGDSLHEHIANLAGSPAIKKGILQTVKVVDELVKVMGRHKPENIVIEMARENQTTQKGQKNSRERMKRIEEGIKELGSQILKEHPVENTQLQNEKLYLYYLQNGRDMYVDQELDINRLSDYDVDHIVPQSFLKDDSIDNKVLTRSDKARGKSDNVPSEEVVKKMKNYWRQLLNAKLITQRKFDNLTKAERGGLSELDKAGFIKRQLVETRQITKHVAQILDSRMNTKYDENDKLIREVKVITLKSKLVSDFRKDFQFYKVREINNYHHAHDAYLNAVVGTALIKKYPKLESEFVYGDYKVYDVRKMIAKSEQEIGKATAKYFFYSNIMNFFKTEITLANGEIRKRPLIETNGETGEIVWDKGRDFATVRKVLSMPQVNIVKKTEVQTGGFSKESILPKRNSDKLIARKKDWDPKKYGGFDSPTVAYSVLVVAKVEKGKSKKLKSVKELLGITIMERSSFEKNPIDFLEAKGYKEVKKDLIIKLPKYSLFELENGRKRMLASAGELQKGNELALPSKYVNFLYLASHYEKLKGSPEDNEQKQLFVEQHKHYLDEIIEQISEFSKRVILADANLDKVLSAYNKHRDKPIREQAENIIHLFTLTNLGAPAAFKYFDTTIDRKRYTSTKEVLDATLIHQSITGLYETRIDLSQLGGDGGEAAAKPAPGGSGGTLNIEDEYRLHETSKEPDVSLGSTWLSDFPQAWAETGGMGLAVRQAPLIIPLKATSTPVSIKQYPMSQEARLGIKPHIQRLLDQGILVPCQSPWNTPLLPVKKPGTNDYRPVQDLREVNKRVEDIHPTVPNPYNLLSGLPPSHQWYTVLDLKDAFFCLRLHPTSQPLFAFEWRDPEMGISGQLTWTRLPQGFKNSPTLFNEALHRDLAGFRIQHPDLILLQYVDDLLLAATSELDCQQGTRALLQTLGDLGYRASAKKAQICQKQVKYLGYLLKEGQRWLTEARKETVMGQPIPKTPRQLREFLGTAGFCRLWIPGFAEMAAPLYPLTKPGTLFNWGPDQQKAFQEIKQALLTAPALGLPDLTKPFELFVDEKQGYAKGVLTQKLGPWRRPVAYLSKKLDPVAAGWPPCLRMVAAIAVLTKDAGKLTMGQPLVILAPHAVEALVKQPPDRWLSNARMTHYQALLLDTDRVQFGPVVALNPATLLPLPEEGLQHDCLDILAEAHGTRSDLMDQPLPDADHTWYTDGSSFLQEGQRKAGAAVTTETEVIWARALPAGTSAQRAELIALTQALKMAEGKKLNVYTDSRYAFATAHIHGEIYRRRGWLTSEGKEIKNKDEILALLKALFLPKRLSIIHCPGHQKGNSAEARGNRMADQAAREVATRETPETSTLLAGKRTADGSEFEKRTADGSEFESPKKKAKVE

SEQ ID NO: 2278 - protein, 2096 aa, synthetic construct
MPAAKRVKLDGGDKKYSIGLDIGTNSVGWAVITDEYKVPSKKFKVLGNTDRHSIKKNLIGALLFDSGETAEATRLKRTARRRYTRRKNRICYLQEIFSNEMAKVDDSFFHRLEESFLVEEDKKHERHPIFGNIVDEVAYHEKYPTIYHLRKKLVDSTDKADLRLIYLALAHMIKFRGHFLIEGDLNPDNSDVDKLFIQLVQTYNQLFEENPINASGVDAKAILSARLSKSRRLENLIAQLPGEKKNGLFGNLIALSLGLTPNFKSNFDLAEDAKLQLSKDTYDDDLDNLLAQIGDQYADLFLAAKNLSDAILLSDILRVNTEITKAPLSASMIKRYDEHHQDLTLLKALVRQQLPEKYKEIFFDQSKNGYAGYIDGGASQEEFYKFIKPILEKMDGTEELLVKLNREDLLRKQRTFDNGSIPHQIHLGELHAILRRQEDFYPFLKDNREKIEKILTFRIPYYVGPLARGNSRFAWMTRKSEETITPWNFEEVVDKGASAQSFIERMTNFDKNLPNEKVLPKHSLLYEYFTVYNELTKVKYVTEGMRKPAFLSGEQKKAIVDLLFKTNRKVTVKQLKEDYFKKIECFDSVEISGVEDRFNASLGTYHDLLKIIKDKDFLDNEENEDILEDIVLTLTLFEDREMIEERLKTYAHLFDDKVMKQLKRRRYTGWGRLSRKLINGIRDKQSGKTILDFLKSDGFANRNFMQLIHDDSLTFKEDIQKAQVSGQGDSLHEHIANLAGSPAIKKGILQTVKVVDELVKVMGRHKPENIVIEMARENQTTQKGQKNSRERMKRIEEGIKELGSQILKEHPVENTQLQNEKLYLYYLQNGRDMYVDQELDINRLSDYDVDHIVPQSFLKDDSIDNKVLTRSDKARGKSDNVPSEEVVKKMKNYWRQLLNAKLITQRKFDNLTKAERGGLSELDKAGFIKRQLVETRQITKHVAQILDSRMNTKYDENDKLIREVKVITLKSKLVSDFRKDFQFYKVREINNYHHAHDAYLNAVVGTALIKKYPKLESEFVYGDYKVYDVRKMIAKSEQEIGKATAKYFFYSNIMNFFKTEITLANGEIRKRPLIETNGETGEIVWDKGRDFATVRKVLSMPQVNIVKKTEVQTGGFSKESILPKRNSDKLIARKKDWDPKKYGGFDSPTVAYSVLVVAKVEKGKSKKLKSVKELLGITIMERSSFEKNPIDFLEAKGYKEVKKDLIIKLPKYSLFELENGRKRMLASAGELQKGNELALPSKYVNFLYLASHYEKLKGSPEDNEQKQLFVEQHKHYLDEIIEQISEFSKRVILADANLDKVLSAYNKHRDKPIREQAENIIHLFTLTNLGAPAAFKYFDTTIDRKRYTSTKEVLDATLIHQSITGLYETRIDLSQLGGDGGEAAAKGGGPAPGGTLNIEDEYRLHETSKEPDVSLGSTWLSDFPQAWAETGGMGLAVRQAPLIIPLKATSTPVSIKQYPMSQEARLGIKPHIQRLLDQGILVPCQSPWNTPLLPVKKPGTNDYRPVQDLREVNKRVEDIHPTVPNPYNLLSGLPPSHQWYTVLDLKDAFFCLRLHPTSQPLFAFEWRDPEMGISGQLTWTRLPQGFKNSPTLFNEALHRDLAGFRIQHPDLILLQYVDDLLLAATSELDCQQGTRALLQTLGDLGYRASAKKAQICQKQVKYLGYLLKEGQRWLTEARKETVMGQPIPKTPRQLREFLGTAGFCRLWIPGFAEMAAPLYPLTKPGTLFNWGPDQQKAFQEIKQALLTAPALGLPDLTKPFELFVDEKQGYAKGVLTQKLGPWRRPVAYLSKKLDPVAAGWPPCLRMVAAIAVLTKDAGKLTMGQPLVILAPHAVEALVKQPPDRWLSNARMTHYQALLLDTDRVQFGPVVALNPATLLPLPEEGLQHDCLDILAEAHGTRSDLMDQPLPDADHTWYTDGSSFLQEGQRKAGAAVTTETEVIWARALPAGTSAQRAELIALTQALKMAEGKKLNVYTDSRYAFATAHIHGEIYRRRGWLTSEGKEIKNKDEILALLKALFLPKRLSIIHCPGHQKGNSAEARGNRMADQAAREVATRETPETSTLLAGKRTADGSEFEKRTADGSEFESPKKKAKVE

SEQ ID NO: 2279 - protein, 2096 aa, synthetic construct
MPAAKRVKLDGGDKKYSIGLDIGTNSVGWAVITDEYKVPSKKFKVLGNTDRHSIKKNLIGALLFDSGETAEATRLKRTARRRYTRRKNRICYLQEIFSNEMAKVDDSFFHRLEESFLVEEDKKHERHPIFGNIVDEVAYHEKYPTIYHLRKKLVDSTDKADLRLIYLALAHMIKFRGHFLIEGDLNPDNSDVDKLFIQLVQTYNQLFEENPINASGVDAKAILSARLSKSRRLENLIAQLPGEKKNGLFGNLIALSLGLTPNFKSNFDLAEDAKLQLSKDTYDDDLDNLLAQIGDQYADLFLAAKNLSDAILLSDILRVNTEITKAPLSASMIKRYDEHHQDLTLLKALVRQQLPEKYKEIFFDQSKNGYAGYIDGGASQEEFYKFIKPILEKMDGTEELLVKLNREDLLRKQRTFDNGSIPHQIHLGELHAILRRQEDFYPFLKDNREKIEKILTFRIPYYVGPLARGNSRFAWMTRKSEETITPWNFEEVVDKGASAQSFIERMTNFDKNLPNEKVLPKHSLLYEYFTVYNELTKVKYVTEGMRKPAFLSGEQKKAIVDLLFKTNRKVTVKQLKEDYFKKIECFDSVEISGVEDRFNASLGTYHDLLKIIKDKDFLDNEENEDILEDIVLTLTLFEDREMIEERLKTYAHLFDDKVMKQLKRRRYTGWGRLSRKLINGIRDKQSGKTILDFLKSDGFANRNFMQLIHDDSLTFKEDIQKAQVSGQGDSLHEHIANLAGSPAIKKGILQTVKVVDELVKVMGRHKPENIVIEMARENQTTQKGQKNSRERMKRIEEGIKELGSQILKEHPVENTQLQNEKLYLYYLQNGRDMYVDQELDINRLSDYDVDHIVPQSFLKDDSIDNKVLTRSDKARGKSDNVPSEEVVKKMKNYWRQLLNAKLITQRKFDNLTKAERGGLSELDKAGFIKRQLVETRQITKHVAQILDSRMNTKYDENDKLIREVKVITLKSKLVSDFRKDFQFYKVREINNYHHAHDAYLNAVVGTALIKKYPKLESEFVYGDYKVYDVRKMIAKSEQEIGKATAKYFFYSNIMNFFKTEITLANGEIRKRPLIETNGETGEIVWDKGRDFATVRKVLSMPQVNIVKKTEVQTGGFSKESILPKRNSDKLIARKKDWDPKKYGGFDSPTVAYSVLVVAKVEKGKSKKLKSVKELLGITIMERSSFEKNPIDFLEAKGYKEVKKDLIIKLPKYSLFELENGRKRMLASAGELQKGNELALPSKYVNFLYLASHYEKLKGSPEDNEQKQLFVEQHKHYLDEIIEQISEFSKRVILADANLDKVLSAYNKHRDKPIREQAENIIHLFTLTNLGAPAAFKYFDTTIDRKRYTSTKEVLDATLIHQSITGLYETRIDLSQLGGDGGGGGEAAAKPAPGGTLNIEDEYRLHETSKEPDVSLGSTWLSDFPQAWAETGGMGLAVRQAPLIIPLKATSTPVSIKQYPMSQEARLGIKPHIQRLLDQGILVPCQSPWNTPLLPVKKPGTNDYRPVQDLREVNKRVEDIHPTVPNPYNLLSGLPPSHQWYTVLDLKDAFFCLRLHPTSQPLFAFEWRDPEMGISGQLTWTRLPQGFKNSPTLFNEALHRDLAGFRIQHPDLILLQYVDDLLLAATSELDCQQGTRALLQTLGDLGYRASAKKAQICQKQVKYLGYLLKEGQRWLTEARKETVMGQPIPKTPRQLREFLGTAGFCRLWIPGFAEMAAPLYPLTKPGTLFNWGPDQQKAFQEIKQALLTAPALGLPDLTKPFELFVDEKQGYAKGVLTQKLGPWRRPVAYLSKKLDPVAAGWPPCLRMVAAIAVLTKDAGKLTMGQPLVILAPHAVEALVKQPPDRWLSNARMTHYQALLLDTDRVQFGPVVALNPATLLPLPEEGLQHDCLDILAEAHGTRSDLMDQPLPDADHTWYTDGSSFLQEGQRKAGAAVTTETEVIWARALPAGTSAQRAELIALTQALKMAEGKKLNVYTDSRYAFATAHIHGEIYRRRGWLTSEGKEIKNKDEILALLKALFLPKRLSIIHCPGHQKGNSAEARGNRMADQAAREVATRETPETSTLLAGKRTADGSEFEKRTADGSEFESPKKKAKVE

SEQ ID NO: 2280 - protein, 2100 aa, synthetic construct
MPAAKRVKLDGGDKKYSIGLDIGTNSVGWAVITDEYKVPSKKFKVLGNTDRHSIKKNLIGALLFDSGETAEATRLKRTARRRYTRRKNRICYLQEIFSNEMAKVDDSFFHRLEESFLVEEDKKHERHPIFGNIVDEVAYHEKYPTIYHLRKKLVDSTDKADLRLIYLALAHMIKFRGHFLIEGDLNPDNSDVDKLFIQLVQTYNQLFEENPINASGVDAKAILSARLSKSRRLENLIAQLPGEKKNGLFGNLIALSLGLTPNFKSNFDLAEDAKLQLSKDTYDDDLDNLLAQIGDQYADLFLAAKNLSDAILLSDILRVNTEITKAPLSASMIKRYDEHHQDLTLLKALVRQQLPEKYKEIFFDQSKNGYAGYIDGGASQEEFYKFIKPILEKMDGTEELLVKLNREDLLRKQRTFDNGSIPHQIHLGELHAILRRQEDFYPFLKDNREKIEKILTFRIPYYVGPLARGNSRFAWMTRKSEETITPWNFEEVVDKGASAQSFIERMTNFDKNLPNEKVLPKHSLLYEYFTVYNELTKVKYVTEGMRKPAFLSGEQKKAIVDLLFKTNRKVTVKQLKEDYFKKIECFDSVEISGVEDRFNASLGTYHDLLKIIKDKDFLDNEENEDILEDIVLTLTLFEDREMIEERLKTYAHLFDDKVMKQLKRRRYTGWGRLSRKLINGIRDKQSGKTILDFLKSDGFANRNFMQLIHDDSLTFKEDIQKAQVSGQGDSLHEHIANLAGSPAIKKGILQTVKVVDELVKVMGRHKPENIVIEMARENQTTQKGQKNSRERMKRIEEGIKELGSQILKEHPVENTQLQNEKLYLYYLQNGRDMYVDQELDINRLSDYDVDHIVPQSFLKDDSIDNKVLTRSDKARGKSDNVPSEEVVKKMKNYWRQLLNAKLITQRKFDNLTKAERGGLSELDKAGFIKRQLVETRQITKHVAQILDSRMNTKYDENDKLIREVKVITLKSKLVSDFRKDFQFYKVREINNYHHAHDAYLNAVVGTALIKKYPKLESEFVYGDYKVYDVRKMIAKSEQEIGKATAKYFFYSNIMNFFKTEITLANGEIRKRPLIETNGETGEIVWDKGRDFATVRKVLSMPQVNIVKKTEVQTGGFSKESILPKRNSDKLIARKKDWDPKKYGGFDSPTVAYSVLVVAKVEKGKSKKLKSVKELLGITIMERSSFEKNPIDFLEAKGYKEVKKDLIIKLPKYSLFELENGRKRMLASAGELQKGNELALPSKYVNFLYLASHYEKLKGSPEDNEQKQLFVEQHKHYLDEIIEQISEFSKRVILADANLDKVLSAYNKHRDKPIREQAENIIHLFTLTNLGAPAAFKYFDTTIDRKRYTSTKEVLDATLIHQSITGLYETRIDLSQLGGDGGGSSGSSGSSGSSGSSGGTLNIEDEYRLHETSKEPDVSLGSTWLSDFPQAWAETGGMGLAVRQAPLIIPLKATSTPVSIKQYPMSQEARLGIKPHIQRLLDQGILVPCQSPWNTPLLPVKKPGTNDYRPVQDLREVNKRVEDIHPTVPNPYNLLSGLPPSHQWYTVLDLKDAFFCLRLHPTSQPLFAFEWRDPEMGISGQLTWTRLPQGFKNSPTLFNEALHRDLAGFRIQHPDLILLQYVDDLLLAATSELDCQQGTRALLQTLGDLGYRASAKKAQICQKQVKYLGYLLKEGQRWLTEARKETVMGQPIPKTPRQLREFLGTAGFCRLWIPGFAEMAAPLYPLTKPGTLFNWGPDQQKAFQEIKQALLTAPALGLPDLTKPFELFVDEKQGYAKGVLTQKLGPWRRPVAYLSKKLDPVAAGWPPCLRMVAAIAVLTKDAGKLTMGQPLVILAPHAVEALVKQPPDRWLSNARMTHYQALLLDTDRVQFGPVVALNPATLLPLPEEGLQHDCLDILAEAHGTRSDLMDQPLPDADHTWYTDGSSFLQEGQRKAGAAVTTETEVIWARALPAGTSAQRAELIALTQALKMAEGKKLNVYTDSRYAFATAHIHGEIYRRRGWLTSEGKEIKNKDEILALLKALFLPKRLSIIHCPGHQKGNSAEARGNRMADQAAREVATRETPETSTLLAGKRTADGSEFEKRTADGSEFESPKKKAKVE

SEQ ID NO: 2281 - protein, 2093 aa, synthetic construct
MPAAKRVKLDGGDKKYSIGLDIGTNSVGWAVITDEYKVPSKKFKVLGNTDRHSIKKNLIGALLFDSGETAEATRLKRTARRRYTRRKNRICYLQEIFSNEMAKVDDSFFHRLEESFLVEEDKKHERHPIFGNIVDEVAYHEKYPTIYHLRKKLVDSTDKADLRLIYLALAHMIKFRGHFLIEGDLNPDNSDVDKLFIQLVQTYNQLFEENPINASGVDAKAILSARLSKSRRLENLIAQLPGEKKNGLFGNLIALSLGLTPNFKSNFDLAEDAKLQLSKDTYDDDLDNLLAQIGDQYADLFLAAKNLSDAILLSDILRVNTEITKAPLSASMIKRYDEHHQDLTLLKALVRQQLPEKYKEIFFDQSKNGYAGYIDGGASQEEFYKFIKPILEKMDGTEELLVKLNREDLLRKQRTFDNGSIPHQIHLGELHAILRRQEDFYPFLKDNREKIEKILTFRIPYYVGPLARGNSRFAWMTRKSEETITPWNFEEVVDKGASAQSFIERMTNFDKNLPNEKVLPKHSLLYEYFTVYNELTKVKYVTEGMRKPAFLSGEQKKAIVDLLFKTNRKVTVKQLKEDYFKKIECFDSVEISGVEDRFNASLGTYHDLLKIIKDKDFLDNEENEDILEDIVLTLTLFEDREMIEERLKTYAHLFDDKVMKQLKRRRYTGWGRLSRKLINGIRDKQSGKTILDFLKSDGFANRNFMQLIHDDSLTFKEDIQKAQVSGQGDSLHEHIANLAGSPAIKKGILQTVKVVDELVKVMGRHKPENIVIEMARENQTTQKGQKNSRERMKRIEEGIKELGSQILKEHPVENTQLQNEKLYLYYLQNGRDMYVDQELDINRLSDYDVDHIVPQSFLKDDSIDNKVLTRSDKARGKSDNVPSEEVVKKMKNYWRQLLNAKLITQRKFDNLTKAERGGLSELDKAGFIKRQLVETRQITKHVAQILDSRMNTKYDENDKLIREVKVITLKSKLVSDFRKDFQFYKVREINNYHHAHDAYLNAVVGTALIKKYPKLESEFVYGDYKVYDVRKMIAKSEQEIGKATAKYFFYSNIMNFFKTEITLANGEIRKRPLIETNGETGEIVWDKGRDFATVRKVLSMPQVNIVKKTEVQTGGFSKESILPKRNSDKLIARKKDWDPKKYGGFDSPTVAYSVLVVAKVEKGKSKKLKSVKELLGITIMERSSFEKNPIDFLEAKGYKEVKKDLIIKLPKYSLFELENGRKRMLASAGELQKGNELALPSKYVNFLYLASHYEKLKGSPEDNEQKQLFVEQHKHYLDEIIEQISEFSKRVILADANLDKVLSAYNKHRDKPIREQAENIIHLFTLTNLGAPAAFKYFDTTIDRKRYTSTKEVLDATLIHQSITGLYETRIDLSQLGGDGGEAAAKGGGGGTLNIEDEYRLHETSKEPDVSLGSTWLSDFPQAWAETGGMGLAVRQAPLIIPLKATSTPVSIKQYPMSQEARLGIKPHIQRLLDQGILVPCQSPWNTPLLPVKKPGTNDYRPVQDLREVNKRVEDIHPTVPNPYNLLSGLPPSHQWYTVLDLKDAFFCLRLHPTSQPLFAFEWRDPEMGISGQLTWTRLPQGFKNSPTLFNEALHRDLAGFRIQHPDLILLQYVDDLLLAATSELDCQQGTRALLQTLGDLGYRASAKKAQICQKQVKYLGYLLKEGQRWLTEARKETVMGQPIPKTPRQLREFLGTAGFCRLWIPGFAEMAAPLYPLTKPGTLFNWGPDQQKAFQEIKQALLTAPALGLPDLTKPFELFVDEKQGYAKGVLTQKLGPWRRPVAYLSKKLDPVAAGWPPCLRMVAAIAVLTKDAGKLTMGQPLVILAPHAVEALVKQPPDRWLSNARMTHYQALLLDTDRVQFGPVVALNPATLLPLPEEGLQHDCLDILAEAHGTRSDLMDQPLPDADHTWYTDGSSFLQEGQRKAGAAVTTETEVIWARALPAGTSAQRAELIALTQALKMAEGKKLNVYTDSRYAFATAHIHGEIYRRRGWLTSEGKEIKNKDEILALLKALFLPKRLSIIHCPGHQKGNSAEARGNRMADQAAREVATRETPETSTLLAGKRTADGSEFEKRTADGSEFESPKKKAKVE

SEQ ID NO: 2282 - protein, 2096 aa, synthetic construct
MPAAKRVKLDGGDKKYSIGLDIGTNSVGWAVITDEYKVPSKKFKVLGNTDRHSIKKNLIGALLFDSGETAEATRLKRTARRRYTRRKNRICYLQEIFSNEMAKVDDSFFHRLEESFLVEEDKKHERHPIFGNIVDEVAYHEKYPTIYHLRKKLVDSTDKADLRLIYLALAHMIKFRGHFLIEGDLNPDNSDVDKLFIQLVQTYNQLFEENPINASGVDAKAILSARLSKSRRLENLIAQLPGEKKNGLFGNLIALSLGLTPNFKSNFDLAEDAKLQLSKDTYDDDLDNLLAQIGDQYADLFLAAKNLSDAILLSDILRVNTEITKAPLSASMIKRYDEHHQDLTLLKALVRQQLPEKYKEIFFDQSKNGYAGYIDGGASQEEFYKFIKPILEKMDGTEELLVKLNREDLLRKQRTFDNGSIPHQIHLGELHAILRRQEDFYPFLKDNREKIEKILTFRIPYYVGPLARGNSRFAWMTRKSEETITPWNFEEVVDKGASAQSFIERMTNFDKNLPNEKVLPKHSLLYEYFTVYNELTKVKYVTEGMRKPAFLSGEQKKAIVDLLFKTNRKVTVKQLKEDYFKKIECFDSVEISGVEDRFNASLGTYHDLLKIIKDKDFLDNEENEDILEDIVLTLTLFEDREMIEERLKTYAHLFDDKVMKQLKRRRYTGWGRLSRKLINGIRDKQSGKTILDFLKSDGFANRNFMQLIHDDSLTFKEDIQKAQVSGQGDSLHEHIANLAGSPAIKKGILQTVKVVDELVKVMGRHKPENIVIEMARENQTTQKGQKNSRERMKRIEEGIKELGSQILKEHPVENTQLQNEKLYLYYLQNGRDMYVDQELDINRLSDYDVDHIVPQSFLKDDSIDNKVLTRSDKARGKSDNVPSEEVVKKMKNYWRQLLNAKLITQRKFDNLTKAERGGLSELDKAGFIKRQLVETRQITKHVAQILDSRMNTKYDENDKLIREVKVITLKSKLVSDFRKDFQFYKVREINNYHHAHDAYLNAVVGTALIKKYPKLESEFVYGDYKVYDVRKMIAKSEQEIGKATAKYFFYSNIMNFFKTEITLANGEIRKRPLIETNGETGEIVWDKGRDFATVRKVLSMPQVNIVKKTEVQTGGFSKESILPKRNSDKLIARKKDWDPKKYGGFDSPTVAYSVLVVAKVEKGKSKKLKSVKELLGITIMERSSFEKNPIDFLEAKGYKEVKKDLIIKLPKYSLFELENGRKRMLASAGELQKGNELALPSKYVNFLYLASHYEKLKGSPEDNEQKQLFVEQHKHYLDEIIEQISEFSKRVILADANLDKVLSAYNKHRDKPIREQAENIIHLFTLTNLGAPAAFKYFDTTIDRKRYTSTKEVLDATLIHQSITGLYETRIDLSQLGGDGGGSSPAPEAAAKGGTLNIEDEYRLHETSKEPDVSLGSTWLSDFPQAWAETGGMGLAVRQAPLIIPLKATSTPVSIKQYPMSQEARLGIKPHIQRLLDQGILVPCQSPWNTPLLPVKKPGTNDYRPVQDLREVNKRVEDIHPTVPNPYNLLSGLPPSHQWYTVLDLKDAFFCLRLHPTSQPLFAFEWRDPEMGISGQLTWTRLPQGFKNSPTLFNEALHRDLAGFRIQHPDLILLQYVDDLLLAATSELDCQQGTRALLQTLGDLGYRASAKKAQICQKQVKYLGYLLKEGQRWLTEARKETVMGQPIPKTPRQLREFLGTAGFCRLWIPGFAEMAAPLYPLTKPGTLFNWGPDQQKAFQEIKQALLTAPALGLPDLTKPFELFVDEKQGYAKGVLTQKLGPWRRPVAYLSKKLDPVAAGWPPCLRMVAAIAVLTKDAGKLTMGQPLVILAPHAVEALVKQPPDRWLSNARMTHYQALLLDTDRVQFGPVVALNPATLLPLPEEGLQHDCLDILAEAHGTRSDLMDQPLPDADHTWYTDGSSFLQEGQRKAGAAVTTETEVIWARALPAGTSAQRAELIALTQALKMAEGKKLNVYTDSRYAFATAHIHGEIYRRRGWLTSEGKEIKNKDEILALLKALFLPKRLSIIHCPGHQKGNSAEARGNRMADQAAREVATRETPETSTLLAGKRTADGSEFEKRTADGSEFESPKKKAKVE

SEQ ID NO: 2283 - protein, 2094 aa, synthetic construct
MPAAKRVKLDGGDKKYSIGLDIGTNSVGWAVITDEYKVPSKKFKVLGNTDRHSIKKNLIGALLFDSGETAEATRLKRTARRRYTRRKNRICYLQEIFSNEMAKVDDSFFHRLEESFLVEEDKKHERHPIFGNIVDEVAYHEKYPTIYHLRKKLVDSTDKADLRLIYLALAHMIKFRGHFLIEGDLNPDNSDVDKLFIQLVQTYNQLFEENPINASGVDAKAILSARLSKSRRLENLIAQLPGEKKNGLFGNLIALSLGLTPNFKSNFDLAEDAKLQLSKDTYDDDLDNLLAQIGDQYADLFLAAKNLSDAILLSDILRVNTEITKAPLSASMIKRYDEHHQDLTLLKALVRQQLPEKYKEIFFDQSKNGYAGYIDGGASQEEFYKFIKPILEKMDGTEELLVKLNREDLLRKQRTFDNGSIPHQIHLGELHAILRRQEDFYPFLKDNREKIEKILTFRIPYYVGPLARGNSRFAWMTRKSEETITPWNFEEVVDKGASAQSFIERMTNFDKNLPNEKVLPKHSLLYEYFTVYNELTKVKYVTEGMRKPAFLSGEQKKAIVDLLFKTNRKVTVKQLKEDYFKKIECFDSVEISGVEDRFNASLGTYHDLLKIIKDKDFLDNEENEDILEDIVLTLTLFEDREMIEERLKTYAHLFDDKVMKQLKRRRYTGWGRLSRKLINGIRDKQSGKTILDFLKSDGFANRNFMQLIHDDSLTFKEDIQKAQVSGQGDSLHEHIANLAGSPAIKKGILQTVKVVDELVKVMGRHKPENIVIEMARENQTTQKGQKNSRERMKRIEEGIKELGSQILKEHPVENTQLQNEKLYLYYLQNGRDMYVDQELDINRLSDYDVDHIVPQSFLKDDSIDNKVLTRSDKARGKSDNVPSEEVVKKMKNYWRQLLNAKLITQRKFDNLTKAERGGLSELDKAGFIKRQLVETRQITKHVAQILDSRMNTKYDENDKLIREVKVITLKSKLVSDFRKDFQFYKVREINNYHHAHDAYLNAVVGTALIKKYPKLESEFVYGDYKVYDVRKMIAKSEQEIGKATAKYFFYSNIMNFFKTEITLANGEIRKRPLIETNGETGEIVWDKGRDFATVRKVLSMPQVNIVKKTEVQTGGFSKESILPKRNSDKLIARKKDWDPKKYGGFDSPTVAYSVLVVAKVEKGKSKKLKSVKELLGITIMERSSFEKNPIDFLEAKGYKEVKKDLIIKLPKYSLFELENGRKRMLASAGELQKGNELALPSKYVNFLYLASHYEKLKGSPEDNEQKQLFVEQHKHYLDEIIEQISEFSKRVILADANLDKVLSAYNKHRDKPIREQAENIIHLFTLTNLGAPAAFKYFDTTIDRKRYTSTKEVLDATLIHQSITGLYETRIDLSQLGGDGGGSSPAPGGGGGTLNIEDEYRLHETSKEPDVSLGSTWLSDFPQAWAETGGMGLAVRQAPLIIPLKATSTPVSIKQYPMSQEARLGIKPHIQRLLDQGILVPCQSPWNTPLLPVKKPGTNDYRPVQDLREVNKRVEDIHPTVPNPYNLLSGLPPSHQWYTVLDLKDAFFCLRLHPTSQPLFAFEWRDPEMGISGQLTWTRLPQGFKNSPTLFNEALHRDLAGFRIQHPDLILLQYVDDLLLAATSELDCQQGTRALLQTLGDLGYRASAKKAQICQKQVKYLGYLLKEGQRWLTEARKETVMGQPIPKTPRQLREFLGTAGFCRLWIPGFAEMAAPLYPLTKPGTLFNWGPDQQKAFQEIKQALLTAPALGLPDLTKPFELFVDEKQGYAKGVLTQKLGPWRRPVAYLSKKLDPVAAGWPPCLRMVAAIAVLTKDAGKLTMGQPLVILAPHAVEALVKQPPDRWLSNARMTHYQALLLDTDRVQFGPVVALNPATLLPLPEEGLQHDCLDILAEAHGTRSDLMDQPLPDADHTWYTDGSSFLQEGQRKAGAAVTTETEVIWARALPAGTSAQRAELIALTQALKMAEGKKLNVYTDSRYAFATAHIHGEIYRRRGWLTSEGKEIKNKDEILALLKALFLPKRLSIIHCPGHQKGNSAEARGNRMADQAAREVATRETPETSTLLAGKRTADGSEFEKRTADGSEFESPKKKAKVE

SEQ ID NO: 2284 - protein, 2090 aa, synthetic construct
MPAAKRVKLDGGDKKYSIGLDIGTNSVGWAVITDEYKVPSKKFKVLGNTDRHSIKKNLIGALLFDSGETAEATRLKRTARRRYTRRKNRICYLQEIFSNEMAKVDDSFFHRLEESFLVEEDKKHERHPIFGNIVDEVAYHEKYPTIYHLRKKLVDSTDKADLRLIYLALAHMIKFRGHFLIEGDLNPDNSDVDKLFIQLVQTYNQLFEENPINASGVDAKAILSARLSKSRRLENLIAQLPGEKKNGLFGNLIALSLGLTPNFKSNFDLAEDAKLQLSKDTYDDDLDNLLAQIGDQYADLFLAAKNLSDAILLSDILRVNTEITKAPLSASMIKRYDEHHQDLTLLKALVRQQLPEKYKEIFFDQSKNGYAGYIDGGASQEEFYKFIKPILEKMDGTEELLVKLNREDLLRKQRTFDNGSIPHQIHLGELHAILRRQEDFYPFLKDNREKIEKILTFRIPYYVGPLARGNSRFAWMTRKSEETITPWNFEEVVDKGASAQSFIERMTNFDKNLPNEKVLPKHSLLYEYFTVYNELTKVKYVTEGMRKPAFLSGEQKKAIVDLLFKTNRKVTVKQLKEDYFKKIECFDSVEISGVEDRFNASLGTYHDLLKIIKDKDFLDNEENEDILEDIVLTLTLFEDREMIEERLKTYAHLFDDKVMKQLKRRRYTGWGRLSRKLINGIRDKQSGKTILDFLKSDGFANRNFMQLIHDDSLTFKEDIQKAQVSGQGDSLHEHIANLAGSPAIKKGILQTVKVVDELVKVMGRHKPENIVIEMARENQTTQKGQKNSRERMKRIEEGIKELGSQILKEHPVENTQLQNEKLYLYYLQNGRDMYVDQELDINRLSDYDVDHIVPQSFLKDDSIDNKVLTRSDKARGKSDNVPSEEVVKKMKNYWRQLLNAKLITQRKFDNLTKAERGGLSELDKAGFIKRQLVETRQITKHVAQILDSRMNTKYDENDKLIREVKVITLKSKLVSDFRKDFQFYKVREINNYHHAHDAYLNAVVGTALIKKYPKLESEFVYGDYKVYDVRKMIAKSEQEIGKATAKYFFYSNIMNFFKTEITLANGEIRKRPLIETNGETGEIVWDKGRDFATVRKVLSMPQVNIVKKTEVQTGGFSKESILPKRNSDKLIARKKDWDPKKYGGFDSPTVAYSVLVVAKVEKGKSKKLKSVKELLGITIMERSSFEKNPIDFLEAKGYKEVKKDLIIKLPKYSLFELENGRKRMLASAGELQKGNELALPSKYVNFLYLASHYEKLKGSPEDNEQKQLFVEQHKHYLDEIIEQISEFSKRVILADANLDKVLSAYNKHRDKPIREQAENIIHLFTLTNLGAPAAFKYFDTTIDRKRYTSTKEVLDATLIHQSITGLYETRIDLSQLGGDGGEAAAKGGTLNIEDEYRLHETSKEPDVSLGSTWLSDFPQAWAETGGMGLAVRQAPLIIPLKATSTPVSIKQYPMSQEARLGIKPHIQRLLDQGILVPCQSPWNTPLLPVKKPGTNDYRPVQDLREVNKRVEDIHPTVPNPYNLLSGLPPSHQWYTVLDLKDAFFCLRLHPTSQPLFAFEWRDPEMGISGQLTWTRLPQGFKNSPTLFNEALHRDLAGFRIQHPDLILLQYVDDLLLAATSELDCQQGTRALLQTLGDLGYRASAKKAQICQKQVKYLGYLLKEGQRWLTEARKETVMGQPIPKTPRQLREFLGTAGFCRLWIPGFAEMAAPLYPLTKPGTLFNWGPDQQKAFQEIKQALLTAPALGLPDLTKPFELFVDEKQGYAKGVLTQKLGPWRRPVAYLSKKLDPVAAGWPPCLRMVAAIAVLTKDAGKLTMGQPLVILAPHAVEALVKQPPDRWLSNARMTHYQALLLDTDRVQFGPVVALNPATLLPLPEEGLQHDCLDILAEAHGTRSDLMDQPLPDADHTWYTDGSSFLQEGQRKAGAAVTTETEVIWARALPAGTSAQRAELIALTQALKMAEGKKLNVYTDSRYAFATAHIHGEIYRRRGWLTSEGKEIKNKDEILALLKALFLPKRLSIIHCPGHQKGNSAEARGNRMADQAAREVATRETPETSTLLAGKRTADGSEFEKRTADGSEFESPKKKAKVE

SEQ ID NO: 2285 - protein, 2091 aa, synthetic construct
MPAAKRVKLDGGDKKYSIGLDIGTNSVGWAVITDEYKVPSKKFKVLGNTDRHSIKKNLIGALLFDSGETAEATRLKRTARRRYTRRKNRICYLQEIFSNEMAKVDDSFFHRLEESFLVEEDKKHERHPIFGNIVDEVAYHEKYPTIYHLRKKLVDSTDKADLRLIYLALAHMIKFRGHFLIEGDLNPDNSDVDKLFIQLVQTYNQLFEENPINASGVDAKAILSARLSKSRRLENLIAQLPGEKKNGLFGNLIALSLGLTPNFKSNFDLAEDAKLQLSKDTYDDDLDNLLAQIGDQYADLFLAAKNLSDAILLSDILRVNTEITKAPLSASMIKRYDEHHQDLTLLKALVRQQLPEKYKEIFFDQSKNGYAGYIDGGASQEEFYKFIKPILEKMDGTEELLVKLNREDLLRKQRTFDNGSIPHQIHLGELHAILRRQEDFYPFLKDNREKIEKILTFRIPYYVGPLARGNSRFAWMTRKSEETITPWNFEEVVDKGASAQSFIERMTNFDKNLPNEKVLPKHSLLYEYFTVYNELTKVKYVTEGMRKPAFLSGEQKKAIVDLLFKTNRKVTVKQLKEDYFKKIECFDSVEISGVEDRFNASLGTYHDLLKIIKDKDFLDNEENEDILEDIVLTLTLFEDREMIEERLKTYAHLFDDKVMKQLKRRRYTGWGRLSRKLINGIRDKQSGKTILDFLKSDGFANRNFMQLIHDDSLTFKEDIQKAQVSGQGDSLHEHIANLAGSPAIKKGILQTVKVVDELVKVMGRHKPENIVIEMARENQTTQKGQKNSRERMKRIEEGIKELGSQILKEHPVENTQLQNEKLYLYYLQNGRDMYVDQELDINRLSDYDVDHIVPQSFLKDDSIDNKVLTRSDKARGKSDNVPSEEVVKKMKNYWRQLLNAKLITQRKFDNLTKAERGGLSELDKAGFIKRQLVETRQITKHVAQILDSRMNTKYDENDKLIREVKVITLKSKLVSDFRKDFQFYKVREINNYHHAHDAYLNAVVGTALIKKYPKLESEFVYGDYKVYDVRKMIAKSEQEIGKATAKYFFYSNIMNFFKTEITLANGEIRKRPLIETNGETGEIVWDKGRDFATVRKVLSMPQVNIVKKTEVQTGGFSKESILPKRNSDKLIARKKDWDPKKYGGFDSPTVAYSVLVVAKVEKGKSKKLKSVKELLGITIMERSSFEKNPIDFLEAKGYKEVKKDLIIKLPKYSLFELENGRKRMLASAGELQKGNELALPSKYVNFLYLASHYEKLKGSPEDNEQKQLFVEQHKHYLDEIIEQISEFSKRVILADANLDKVLSAYNKHRDKPIREQAENIIHLFTLTNLGAPAAFKYFDTTIDRKRYTSTKEVLDATLIHQSITGLYETRIDLSQLGGDGGGSSPAPGGTLNIEDEYRLHETSKEPDVSLGSTWLSDFPQAWAETGGMGLAVRQAPLIIPLKATSTPVSIKQYPMSQEARLGIKPHIQRLLDQGILVPCQSPWNTPLLPVKKPGTNDYRPVQDLREVNKRVEDIHPTVPNPYNLLSGLPPSHQWYTVLDLKDAFFCLRLHPTSQPLFAFEWRDPEMGISGQLTWTRLPQGFKNSPTLFNEALHRDLAGFRIQHPDLILLQYVDDLLLAATSELDCQQGTRALLQTLGDLGYRASAKKAQICQKQVKYLGYLLKEGQRWLTEARKETVMGQPIPKTPRQLREFLGTAGFCRLWIPGFAEMAAPLYPLTKPGTLFNWGPDQQKAFQEIKQALLTAPALGLPDLTKPFELFVDEKQGYAKGVLTQKLGPWRRPVAYLSKKLDPVAAGWPPCLRMVAAIAVLTKDAGKLTMGQPLVILAPHAVEALVKQPPDRWLSNARMTHYQALLLDTDRVQFGPVVALNPATLLPLPEEGLQHDCLDILAEAHGTRSDLMDQPLPDADHTWYTDGSSFLQEGQRKAGAAVTTETEVIWARALPAGTSAQRAELIALTQALKMAEGKKLNVYTDSRYAFATAHIHGEIYRRRGWLTSEGKEIKNKDEILALLKALFLPKRLSIIHCPGHQKGNSAEARGNRMADQAAREVATRETPETSTLLAGKRTADGSEFEKRTADGSEFESPKKKAKVE

SEQ ID NO: 2286 - protein, 2096 aa, synthetic construct
MPAAKRVKLDGGDKKYSIGLDIGTNSVGWAVITDEYKVPSKKFKVLGNTDRHSIKKNLIGALLFDSGETAEATRLKRTARRRYTRRKNRICYLQEIFSNEMAKVDDSFFHRLEESFLVEEDKKHERHPIFGNIVDEVAYHEKYPTIYHLRKKLVDSTDKADLRLIYLALAHMIKFRGHFLIEGDLNPDNSDVDKLFIQLVQTYNQLFEENPINASGVDAKAILSARLSKSRRLENLIAQLPGEKKNGLFGNLIALSLGLTPNFKSNFDLAEDAKLQLSKDTYDDDLDNLLAQIGDQYADLFLAAKNLSDAILLSDILRVNTEITKAPLSASMIKRYDEHHQDLTLLKALVRQQLPEKYKEIFFDQSKNGYAGYIDGGASQEEFYKFIKPILEKMDGTEELLVKLNREDLLRKQRTFDNGSIPHQIHLGELHAILRRQEDFYPFLKDNREKIEKILTFRIPYYVGPLARGNSRFAWMTRKSEETITPWNFEEVVDKGASAQSFIERMTNFDKNLPNEKVLPKHSLLYEYFTVYNELTKVKYVTEGMRKPAFLSGEQKKAIVDLLFKTNRKVTVKQLKEDYFKKIECFDSVEISGVEDRFNASLGTYHDLLKIIKDKDFLDNEENEDILEDIVLTLTLFEDREMIEERLKTYAHLFDDKVMKQLKRRRYTGWGRLSRKLINGIRDKQSGKTILDFLKSDGFANRNFMQLIHDDSLTFKEDIQKAQVSGQGDSLHEHIANLAGSPAIKKGILQTVKVVDELVKVMGRHKPENIVIEMARENQTTQKGQKNSRERMKRIEEGIKELGSQILKEHPVENTQLQNEKLYLYYLQNGRDMYVDQELDINRLSDYDVDHIVPQSFLKDDSIDNKVLTRSDKARGKSDNVPSEEVVKKMKNYWRQLLNAKLITQRKFDNLTKAERGGLSELDKAGFIKRQLVETRQITKHVAQILDSRMNTKYDENDKLIREVKVITLKSKLVSDFRKDFQFYKVREINNYHHAHDAYLNAVVGTALIKKYPKLESEFVYGDYKVYDVRKMIAKSEQEIGKATAKYFFYSNIMNFFKTEITLANGEIRKRPLIETNGETGEIVWDKGRDFATVRKVLSMPQVNIVKKTEVQTGGFSKESILPKRNSDKLIARKKDWDPKKYGGFDSPTVAYSVLVVAKVEKGKSKKLKSVKELLGITIMERSSFEKNPIDFLEAKGYKEVKKDLIIKLPKYSLFELENGRKRMLASAGELQKGNELALPSKYVNFLYLASHYEKLKGSPEDNEQKQLFVEQHKHYLDEIIEQISEFSKRVILADANLDKVLSAYNKHRDKPIREQAENIIHLFTLTNLGAPAAFKYFDTTIDRKRYTSTKEVLDATLIHQSITGLYETRIDLSQLGGDGGGGSPAPEAAAKGGTLNIEDEYRLHETSKEPDVSLGSTWLSDFPQAWAETGGMGLAVRQAPLIIPLKATSTPVSIKQYPMSQEARLGIKPHIQRLLDQGILVPCQSPWNTPLLPVKKPGTNDYRPVQDLREVNKRVEDIHPTVPNPYNLLSGLPPSHQWYTVLDLKDAFFCLRLHPTSQPLFAFEWRDPEMGISGQLTWTRLPQGFKNSPTLFNEALHRDLAGFRIQHPDLILLQYVDDLLLAATSELDCQQGTRALLQTLGDLGYRASAKKAQICQKQVKYLGYLLKEGQRWLTEARKETVMGQPIPKTPRQLREFLGTAGFCRLWIPGFAEMAAPLYPLTKPGTLFNWGPDQQKAFQEIKQALLTAPALGLPDLTKPFELFVDEKQGYAKGVLTQKLGPWRRPVAYLSKKLDPVAAGWPPCLRMVAAIAVLTKDAGKLTMGQPLVILAPHAVEALVKQPPDRWLSNARMTHYQALLLDTDRVQFGPVVALNPATLLPLPEEGLQHDCLDILAEAHGTRSDLMDQPLPDADHTWYTDGSSFLQEGQRKAGAAVTTETEVIWARALPAGTSAQRAELIALTQALKMAEGKKLNVYTDSRYAFATAHIHGEIYRRRGWLTSEGKEIKNKDEILALLKALFLPKRLSIIHCPGHQKGNSAEARGNRMADQAAREVATRETPETSTLLAGKRTADGSEFEKRTADGSEFESPKKKAKVE

SEQ ID NO: 2287 - protein, 2096 aa, synthetic construct
MPAAKRVKLDGGDKKYSIGLDIGTNSVGWAVITDEYKVPSKKFKVLGNTDRHSIKKNLIGALLFDSGETAEATRLKRTARRRYTRRKNRICYLQEIFSNEMAKVDDSFFHRLEESFLVEEDKKHERHPIFGNIVDEVAYHEKYPTIYHLRKKLVDSTDKADLRLIYLALAHMIKFRGHFLIEGDLNPDNSDVDKLFIQLVQTYNQLFEENPINASGVDAKAILSARLSKSRRLENLIAQLPGEKKNGLFGNLIALSLGLTPNFKSNFDLAEDAKLQLSKDTYDDDLDNLLAQIGDQYADLFLAAKNLSDAILLSDILRVNTEITKAPLSASMIKRYDEHHQDLTLLKALVRQQLPEKYKEIFFDQSKNGYAGYIDGGASQEEFYKFIKPILEKMDGTEELLVKLNREDLLRKQRTFDNGSIPHQIHLGELHAILRRQEDFYPFLKDNREKIEKILTFRIPYYVGPLARGNSRFAWMTRKSEETITPWNFEEVVDKGASAQSFIERMTNFDKNLPNEKVLPKHSLLYEYFTVYNELTKVKYVTEGMRKPAFLSGEQKKAIVDLLFKTNRKVTVKQLKEDYFKKIECFDSVEISGVEDRFNASLGTYHDLLKIIKDKDFLDNEENEDILEDIVLTLTLFEDREMIEERLKTYAHLFDDKVMKQLKRRRYTGWGRLSRKLINGIRDKQSGKTILDFLKSDGFANRNFMQLIHDDSLTFKEDIQKAQVSGQGDSLHEHIANLAGSPAIKKGILQTVKVVDELVKVMGRHKPENIVIEMARENQTTQKGQKNSRERMKRIEEGIKELGSQILKEHPVENTQLQNEKLYLYYLQNGRDMYVDQELDINRLSDYDVDHIVPQSFLKDDSIDNKVLTRSDKARGKSDNVPSEEVVKKMKNYWRQLLNAKLITQRKFDNLTKAERGGLSELDKAGFIKRQLVETRQITKHVAQILDSRMNTKYDENDKLIREVKVITLKSKLVSDFRKDFQFYKVREINNYHHAHDAYLNAVVGTALIKKYPKLESEFVYGDYKVYDVRKMIAKSEQEIGKATAKYFFYSNIMNFFKTEITLANGEIRKRPLIETNGETGEIVWDKGRDFATVRKVLSMPQVNIVKKTEVQTGGFSKESILPKRNSDKLIARKKDWDPKKYGGFDSPTVAYSVLVVAKVEKGKSKKLKSVKELLGITIMERSSFEKNPIDFLEAKGYKEVKKDLIIKLPKYSLFELENGRKRMLASAGELQKGNELALPSKYVNFLYLASHYEKLKGSPEDNEQKQLFVEQHKHYLDEIIEQISEFSKRVILADANLDKVLSAYNKHRDKPIREQAENIIHLFTLTNLGAPAAFKYFDTTIDRKRYTSTKEVLDATLIHQSITGLYETRIDLSQLGGDGGGGSEAAAKGGGGGTLNIEDEYRLHETSKEPDVSLGSTWLSDFPQAWAETGGMGLAVRQAPLIIPLKATSTPVSIKQYPMSQEARLGIKPHIQRLLDQGILVPCQSPWNTPLLPVKKPGTNDYRPVQDLREVNKRVEDIHPTVPNPYNLLSGLPPSHQWYTVLDLKDAFFCLRLHPTSQPLFAFEWRDPEMGISGQLTWTRLPQGFKNSPTLFNEALHRDLAGFRIQHPDLILLQYVDDLLLAATSELDCQQGTRALLQTLGDLGYRASAKKAQICQKQVKYLGYLLKEGQRWLTEARKETVMGQPIPKTPRQLREFLGTAGFCRLWIPGFAEMAAPLYPLTKPGTLFNWGPDQQKAFQEIKQALLTAPALGLPDLTKPFELFVDEKQGYAKGVLTQKLGPWRRPVAYLSKKLDPVAAGWPPCLRMVAAIAVLTKDAGKLTMGQPLVILAPHAVEALVKQPPDRWLSNARMTHYQALLLDTDRVQFGPVVALNPATLLPLPEEGLQHDCLDILAEAHGTRSDLMDQPLPDADHTWYTDGSSFLQEGQRKAGAAVTTETEVIWARALPAGTSAQRAELIALTQALKMAEGKKLNVYTDSRYAFATAHIHGEIYRRRGWLTSEGKEIKNKDEILALLKALFLPKRLSIIHCPGHQKGNSAEARGNRMADQAAREVATRETPETSTLLAGKRTADGSEFEKRTADGSEFESPKKKAKVE

SEQ ID NO: 2288 - protein, 2094 aa, synthetic construct
MPAAKRVKLDGGDKKYSIGLDIGTNSVGWAVITDEYKVPSKKFKVLGNTDRHSIKKNLIGALLFDSGETAEATRLKRTARRRYTRRKNRICYLQEIFSNEMAKVDDSFFHRLEESFLVEEDKKHERHPIFGNIVDEVAYHEKYPTIYHLRKKLVDSTDKADLRLIYLALAHMIKFRGHFLIEGDLNPDNSDVDKLFIQLVQTYNQLFEENPINASGVDAKAILSARLSKSRRLENLIAQLPGEKKNGLFGNLIALSLGLTPNFKSNFDLAEDAKLQLSKDTYDDDLDNLLAQIGDQYADLFLAAKNLSDAILLSDILRVNTEITKAPLSASMIKRYDEHHQDLTLLKALVRQQLPEKYKEIFFDQSKNGYAGYIDGGASQEEFYKFIKPILEKMDGTEELLVKLNREDLLRKQRTFDNGSIPHQIHLGELHAILRRQEDFYPFLKDNREKIEKILTFRIPYYVGPLARGNSRFAWMTRKSEETITPWNFEEVVDKGASAQSFIERMTNFDKNLPNEKVLPKHSLLYEYFTVYNELTKVKYVTEGMRKPAFLSGEQKKAIVDLLFKTNRKVTVKQLKEDYFKKIECFDSVEISGVEDRFNASLGTYHDLLKIIKDKDFLDNEENEDILEDIVLTLTLFEDREMIEERLKTYAHLFDDKVMKQLKRRRYTGWGRLSRKLINGIRDKQSGKTILDFLKSDGFANRNFMQLIHDDSLTFKEDIQKAQVSGQGDSLHEHIANLAGSPAIKKGILQTVKVVDELVKVMGRHKPENIVIEMARENQTTQKGQKNSRERMKRIEEGIKELGSQILKEHPVENTQLQNEKLYLYYLQNGRDMYVDQELDINRLSDYDVDHIVPQSFLKDDSIDNKVLTRSDKARGKSDNVPSEEVVKKMKNYWRQLLNAKLITQRKFDNLTKAERGGLSELDKAGFIKRQLVETRQITKHVAQILDSRMNTKYDENDKLIREVKVITLKSKLVSDFRKDFQFYKVREINNYHHAHDAYLNAVVGTALIKKYPKLESEFVYGDYKVYDVRKMIAKSEQEIGKATAKYFFYSNIMNFFKTEITLANGEIRKRPLIETNGETGEIVWDKGRDFATVRKVLSMPQVNIVKKTEVQTGGFSKESILPKRNSDKLIARKKDWDPKKYGGFDSPTVAYSVLVVAKVEKGKSKKLKSVKELLGITIMERSSFEKNPIDFLEAKGYKEVKKDLIIKLPKYSLFELENGRKRMLASAGELQKGNELALPSKYVNFLYLASHYEKLKGSPEDNEQKQLFVEQHKHYLDEIIEQISEFSKRVILADANLDKVLSAYNKHRDKPIREQAENIIHLFTLTNLGAPAAFKYFDTTIDRKRYTSTKEVLDATLIHQSITGLYETRIDLSQLGGDGGGSSPAPGGSGGTLNIEDEYRLHETSKEPDVSLGSTWLSDFPQAWAETGGMGLAVRQAPLIIPLKATSTPVSIKQYPMSQEARLGIKPHIQRLLDQGILVPCQSPWNTPLLPVKKPGTNDYRPVQDLREVNKRVEDIHPTVPNPYNLLSGLPPSHQWYTVLDLKDAFFCLRLHPTSQPLFAFEWRDPEMGISGQLTWTRLPQGFKNSPTLFNEALHRDLAGFRIQHPDLILLQYVDDLLLAATSELDCQQGTRALLQTLGDLGYRASAKKAQICQKQVKYLGYLLKEGQRWLTEARKETVMGQPIPKTPRQLREFLGTAGFCRLWIPGFAEMAAPLYPLTKPGTLFNWGPDQQKAFQEIKQALLTAPALGLPDLTKPFELFVDEKQGYAKGVLTQKLGPWRRPVAYLSKKLDPVAAGWPPCLRMVAAIAVLTKDAGKLTMGQPLVILAPHAVEALVKQPPDRWLSNARMTHYQALLLDTDRVQFGPVVALNPATLLPLPEEGLQHDCLDILAEAHGTRSDLMDQPLPDADHTWYTDGSSFLQEGQRKAGAAVTTETEVIWARALPAGTSAQRAELIALTQALKMAEGKKLNVYTDSRYAFATAHIHGEIYRRRGWLTSEGKEIKNKDEILALLKALFLPKRLSIIHCPGHQKGNSAEARGNRMADQAAREVATRETPETSTLLAGKRTADGSEFEKRTADGSEFESPKKKAKVE

SEQ ID NO: 2289 - protein, 2096 aa, synthetic construct
MPAAKRVKLDGGDKKYSIGLDIGTNSVGWAVITDEYKVPSKKFKVLGNTDRHSIKKNLIGALLFDSGETAEATRLKRTARRRYTRRKNRICYLQEIFSNEMAKVDDSFFHRLEESFLVEEDKKHERHPIFGNIVDEVAYHEKYPTIYHLRKKLVDSTDKADLRLIYLALAHMIKFRGHFLIEGDLNPDNSDVDKLFIQLVQTYNQLFEENPINASGVDAKAILSARLSKSRRLENLIAQLPGEKKNGLFGNLIALSLGLTPNFKSNFDLAEDAKLQLSKDTYDDDLDNLLAQIGDQYADLFLAAKNLSDAILLSDILRVNTEITKAPLSASMIKRYDEHHQDLTLLKALVRQQLPEKYKEIFFDQSKNGYAGYIDGGASQEEFYKFIKPILEKMDGTEELLVKLNREDLLRKQRTFDNGSIPHQIHLGELHAILRRQEDFYPFLKDNREKIEKILTFRIPYYVGPLARGNSRFAWMTRKSEETITPWNFEEVVDKGASAQSFIERMTNFDKNLPNEKVLPKHSLLYEYFTVYNELTKVKYVTEGMRKPAFLSGEQKKAIVDLLFKTNRKVTVKQLKEDYFKKIECFDSVEISGVEDRFNASLGTYHDLLKIIKDKDFLDNEENEDILEDIVLTLTLFEDREMIEERLKTYAHLFDDKVMKQLKRRRYTGWGRLSRKLINGIRDKQSGKTILDFLKSDGFANRNFMQLIHDDSLTFKEDIQKAQVSGQGDSLHEHIANLAGSPAIKKGILQTVKVVDELVKVMGRHKPENIVIEMARENQTTQKGQKNSRERMKRIEEGIKELGSQILKEHPVENTQLQNEKLYLYYLQNGRDMYVDQELDINRLSDYDVDHIVPQSFLKDDSIDNKVLTRSDKARGKSDNVPSEEVVKKMKNYWRQLLNAKLITQRKFDNLTKAERGGLSELDKAGFIKRQLVETRQITKHVAQILDSRMNTKYDENDKLIREVKVITLKSKLVSDFRKDFQFYKVREINNYHHAHDAYLNAVVGTALIKKYPKLESEFVYGDYKVYDVRKMIAKSEQEIGKATAKYFFYSNIMNFFKTEITLANGEIRKRPLIETNGETGEIVWDKGRDFATVRKVLSMPQVNIVKKTEVQTGGFSKESILPKRNSDKLIARKKDWDPKKYGGFDSPTVAYSVLVVAKVEKGKSKKLKSVKELLGITIMERSSFEKNPIDFLEAKGYKEVKKDLIIKLPKYSLFELENGRKRMLASAGELQKGNELALPSKYVNFLYLASHYEKLKGSPEDNEQKQLFVEQHKHYLDEIIEQISEFSKRVILADANLDKVLSAYNKHRDKPIREQAENIIHLFTLTNLGAPAAFKYFDTTIDRKRYTSTKEVLDATLIHQSITGLYETRIDLSQLGGDGGGSSEAAAKGGGGGTLNIEDEYRLHETSKEPDVSLGSTWLSDFPQAWAETGGMGLAVRQAPLIIPLKATSTPVSIKQYPMSQEARLGIKPHIQRLLDQGILVPCQSPWNTPLLPVKKPGTNDYRPVQDLREVNKRVEDIHPTVPNPYNLLSGLPPSHQWYTVLDLKDAFFCLRLHPTSQPLFAFEWRDPEMGISGQLTWTRLPQGFKNSPTLFNEALHRDLAGFRIQHPDLILLQYVDDLLLAATSELDCQQGTRALLQTLGDLGYRASAKKAQICQKQVKYLGYLLKEGQRWLTEARKETVMGQPIPKTPRQLREFLGTAGFCRLWIPGFAEMAAPLYPLTKPGTLFNWGPDQQKAFQEIKQALLTAPALGLPDLTKPFELFVDEKQGYAKGVLTQKLGPWRRPVAYLSKKLDPVAAGWPPCLRMVAAIAVLTKDAGKLTMGQPLVILAPHAVEALVKQPPDRWLSNARMTHYQALLLDTDRVQFGPVVALNPATLLPLPEEGLQHDCLDILAEAHGTRSDLMDQPLPDADHTWYTDGSSFLQEGQRKAGAAVTTETEVIWARALPAGTSAQRAELIALTQALKMAEGKKLNVYTDSRYAFATAHIHGEIYRRRGWLTSEGKEIKNKDEILALLKALFLPKRLSIIHCPGHQKGNSAEARGNRMADQAAREVATRETPETSTLLAGKRTADGSEFEKRTADGSEFESPKKKAKVE

SEQ ID NO: 2290 - protein, 2094 aa, synthetic construct
MPAAKRVKLDGGDKKYSIGLDIGTNSVGWAVITDEYKVPSKKFKVLGNTDRHSIKKNLIGALLFDSGETAEATRLKRTARRRYTRRKNRICYLQEIFSNEMAKVDDSFFHRLEESFLVEEDKKHERHPIFGNIVDEVAYHEKYPTIYHLRKKLVDSTDKADLRLIYLALAHMIKFRGHFLIEGDLNPDNSDVDKLFIQLVQTYNQLFEENPINASGVDAKAILSARLSKSRRLENLIAQLPGEKKNGLFGNLIALSLGLTPNFKSNFDLAEDAKLQLSKDTYDDDLDNLLAQIGDQYADLFLAAKNLSDAILLSDILRVNTEITKAPLSASMIKRYDEHHQDLTLLKALVRQQLPEKYKEIFFDQSKNGYAGYIDGGASQEEFYKFIKPILEKMDGTEELLVKLNREDLLRKQRTFDNGSIPHQIHLGELHAILRRQEDFYPFLKDNREKIEKILTFRIPYYVGPLARGNSRFAWMTRKSEETITPWNFEEVVDKGASAQSFIERMTNFDKNLPNEKVLPKHSLLYEYFTVYNELTKVKYVTEGMRKPAFLSGEQKKAIVDLLFKTNRKVTVKQLKEDYFKKIECFDSVEISGVEDRFNASLGTYHDLLKIIKDKDFLDNEENEDILEDIVLTLTLFEDREMIEERLKTYAHLFDDKVMKQLKRRRYTGWGRLSRKLINGIRDKQSGKTILDFLKSDGFANRNFMQLIHDDSLTFKEDIQKAQVSGQGDSLHEHIANLAGSPAIKKGILQTVKVVDELVKVMGRHKPENIVIEMARENQTTQKGQKNSRERMKRIEEGIKELGSQILKEHPVENTQLQNEKLYLYYLQNGRDMYVDQELDINRLSDYDVDHIVPQSFLKDDSIDNKVLTRSDKARGKSDNVPSEEVVKKMKNYWRQLLNAKLITQRKFDNLTKAERGGLSELDKAGFIKRQLVETRQITKHVAQILDSRMNTKYDENDKLIREVKVITLKSKLVSDFRKDFQFYKVREINNYHHAHDAYLNAVVGTALIKKYPKLESEFVYGDYKVYDVRKMIAKSEQEIGKATAKYFFYSNIMNFFKTEITLANGEIRKRPLIETNGETGEIVWDKGRDFATVRKVLSMPQVNIVKKTEVQTGGFSKESILPKRNSDKLIARKKDWDPKKYGGFDSPTVAYSVLVVAKVEKGKSKKLKSVKELLGITIMERSSFEKNPIDFLEAKGYKEVKKDLIIKLPKYSLFELENGRKRMLASAGELQKGNELALPSKYVNFLYLASHYEKLKGSPEDNEQKQLFVEQHKHYLDEIIEQISEFSKRVILADANLDKVLSAYNKHRDKPIREQAENIIHLFTLTNLGAPAAFKYFDTTIDRKRYTSTKEVLDATLIHQSITGLYETRIDLSQLGGDGGGGGPAPGGSGGTLNIEDEYRLHETSKEPDVSLGSTWLSDFPQAWAETGGMGLAVRQAPLIIPLKATSTPVSIKQYPMSQEARLGIKPHIQRLLDQGILVPCQSPWNTPLLPVKKPGTNDYRPVQDLREVNKRVEDIHPTVPNPYNLLSGLPPSHQWYTVLDLKDAFFCLRLHPTSQPLFAFEWRDPEMGISGQLTWTRLPQGFKNSPTLFNEALHRDLAGFRIQHPDLILLQYVDDLLLAATSELDCQQGTRALLQTLGDLGYRASAKKAQICQKQVKYLGYLLKEGQRWLTEARKETVMGQPIPKTPRQLREFLGTAGFCRLWIPGFAEMAAPLYPLTKPGTLFNWGPDQQKAFQEIKQALLTAPALGLPDLTKPFELFVDEKQGYAKGVLTQKLGPWRRPVAYLSKKLDPVAAGWPPCLRMVAAIAVLTKDAGKLTMGQPLVILAPHAVEALVKQPPDRWLSNARMTHYQALLLDTDRVQFGPVVALNPATLLPLPEEGLQHDCLDILAEAHGTRSDLMDQPLPDADHTWYTDGSSFLQEGQRKAGAAVTTETEVIWARALPAGTSAQRAELIALTQALKMAEGKKLNVYTDSRYAFATAHIHGEIYRRRGWLTSEGKEIKNKDEILALLKALFLPKRLSIIHCPGHQKGNSAEARGNRMADQAAREVATRETPETSTLLAGKRTADGSEFEKRTADGSEFESPKKKAKVE

SEQ ID NO: 2291 - protein, 2097 aa, synthetic construct
MPAAKRVKLDGGDKKYSIGLDIGTNSVGWAVITDEYKVPSKKFKVLGNTDRHSIKKNLIGALLFDSGETAEATRLKRTARRRYTRRKNRICYLQEIFSNEMAKVDDSFFHRLEESFLVEEDKKHERHPIFGNIVDEVAYHEKYPTIYHLRKKLVDSTDKADLRLIYLALAHMIKFRGHFLIEGDLNPDNSDVDKLFIQLVQTYNQLFEENPINASGVDAKAILSARLSKSRRLENLIAQLPGEKKNGLFGNLIALSLGLTPNFKSNFDLAEDAKLQLSKDTYDDDLDNLLAQIGDQYADLFLAAKNLSDAILLSDILRVNTEITKAPLSASMIKRYDEHHQDLTLLKALVRQQLPEKYKEIFFDQSKNGYAGYIDGGASQEEFYKFIKPILEKMDGTEELLVKLNREDLLRKQRTFDNGSIPHQIHLGELHAILRRQEDFYPFLKDNREKIEKILTFRIPYYVGPLARGNSRFAWMTRKSEETITPWNFEEVVDKGASAQSFIERMTNFDKNLPNEKVLPKHSLLYEYFTVYNELTKVKYVTEGMRKPAFLSGEQKKAIVDLLFKTNRKVTVKQLKEDYFKKIECFDSVEISGVEDRFNASLGTYHDLLKIIKDKDFLDNEENEDILEDIVLTLTLFEDREMIEERLKTYAHLFDDKVMKQLKRRRYTGWGRLSRKLINGIRDKQSGKTILDFLKSDGFANRNFMQLIHDDSLTFKEDIQKAQVSGQGDSLHEHIANLAGSPAIKKGILQTVKVVDELVKVMGRHKPENIVIEMARENQTTQKGQKNSRERMKRIEEGIKELGSQILKEHPVENTQLQNEKLYLYYLQNGRDMYVDQELDINRLSDYDVDHIVPQSFLKDDSIDNKVLTRSDKARGKSDNVPSEEVVKKMKNYWRQLLNAKLITQRKFDNLTKAERGGLSELDKAGFIKRQLVETRQITKHVAQILDSRMNTKYDENDKLIREVKVITLKSKLVSDFRKDFQFYKVREINNYHHAHDAYLNAVVGTALIKKYPKLESEFVYGDYKVYDVRKMIAKSEQEIGKATAKYFFYSNIMNFFKTEITLANGEIRKRPLIETNGETGEIVWDKGRDFATVRKVLSMPQVNIVKKTEVQTGGFSKESILPKRNSDKLIARKKDWDPKKYGGFDSPTVAYSVLVVAKVEKGKSKKLKSVKELLGITIMERSSFEKNPIDFLEAKGYKEVKKDLIIKLPKYSLFELENGRKRMLASAGELQKGNELALPSKYVNFLYLASHYEKLKGSPEDNEQKQLFVEQHKHYLDEIIEQISEFSKRVILADANLDKVLSAYNKHRDKPIREQAENIIHLFTLTNLGAPAAFKYFDTTIDRKRYTSTKEVLDATLIHQSITGLYETRIDLSQLGGDGGGSSGSSGSSGSSGGTLNIEDEYRLHETSKEPDVSLGSTWLSDFPQAWAETGGMGLAVRQAPLIIPLKATSTPVSIKQYPMSQEARLGIKPHIQRLLDQGILVPCQSPWNTPLLPVKKPGTNDYRPVQDLREVNKRVEDIHPTVPNPYNLLSGLPPSHQWYTVLDLKDAFFCLRLHPTSQPLFAFEWRDPEMGISGQLTWTRLPQGFKNSPTLFNEALHRDLAGFRIQHPDLILLQYVDDLLLAATSELDCQQGTRALLQTLGDLGYRASAKKAQICQKQVKYLGYLLKEGQRWLTEARKETVMGQPIPKTPRQLREFLGTAGFCRLWIPGFAEMAAPLYPLTKPGTLFNWGPDQQKAFQEIKQALLTAPALGLPDLTKPFELFVDEKQGYAKGVLTQKLGPWRRPVAYLSKKLDPVAAGWPPCLRMVAAIAVLTKDAGKLTMGQPLVILAPHAVEALVKQPPDRWLSNARMTHYQALLLDTDRVQFGPVVALNPATLLPLPEEGLQHDCLDILAEAHGTRSDLMDQPLPDADHTWYTDGSSFLQEGQRKAGAAVTTETEVIWARALPAGTSAQRAELIALTQALKMAEGKKLNVYTDSRYAFATAHIHGEIYRRRGWLTSEGKEIKNKDEILALLKALFLPKRLSIIHCPGHQKGNSAEARGNRMADQAAREVATRETPETSTLLAGKRTADGSEFEKRTADGSEFESPKKKAKVE

SEQ ID NO: 2292 - protein, 2096 aa, synthetic construct
MPAAKRVKLDGGDKKYSIGLDIGTNSVGWAVITDEYKVPSKKFKVLGNTDRHSIKKNLIGALLFDSGETAEATRLKRTARRRYTRRKNRICYLQEIFSNEMAKVDDSFFHRLEESFLVEEDKKHERHPIFGNIVDEVAYHEKYPTIYHLRKKLVDSTDKADLRLIYLALAHMIKFRGHFLIEGDLNPDNSDVDKLFIQLVQTYNQLFEENPINASGVDAKAILSARLSKSRRLENLIAQLPGEKKNGLFGNLIALSLGLTPNFKSNFDLAEDAKLQLSKDTYDDDLDNLLAQIGDQYADLFLAAKNLSDAILLSDILRVNTEITKAPLSASMIKRYDEHHQDLTLLKALVRQQLPEKYKEIFFDQSKNGYAGYIDGGASQEEFYKFIKPILEKMDGTEELLVKLNREDLLRKQRTFDNGSIPHQIHLGELHAILRRQEDFYPFLKDNREKIEKILTFRIPYYVGPLARGNSRFAWMTRKSEETITPWNFEEVVDKGASAQSFIERMTNFDKNLPNEKVLPKHSLLYEYFTVYNELTKVKYVTEGMRKPAFLSGEQKKAIVDLLFKTNRKVTVKQLKEDYFKKIECFDSVEISGVEDRFNASLGTYHDLLKIIKDKDFLDNEENEDILEDIVLTLTLFEDREMIEERLKTYAHLFDDKVMKQLKRRRYTGWGRLSRKLINGIRDKQSGKTILDFLKSDGFANRNFMQLIHDDSLTFKEDIQKAQVSGQGDSLHEHIANLAGSPAIKKGILQTVKVVDELVKVMGRHKPENIVIEMARENQTTQKGQKNSRERMKRIEEGIKELGSQILKEHPVENTQLQNEKLYLYYLQNGRDMYVDQELDINRLSDYDVDHIVPQSFLKDDSIDNKVLTRSDKARGKSDNVPSEEVVKKMKNYWRQLLNAKLITQRKFDNLTKAERGGLSELDKAGFIKRQLVETRQITKHVAQILDSRMNTKYDENDKLIREVKVITLKSKLVSDFRKDFQFYKVREINNYHHAHDAYLNAVVGTALIKKYPKLESEFVYGDYKVYDVRKMIAKSEQEIGKATAKYFFYSNIMNFFKTEITLANGEIRKRPLIETNGETGEIVWDKGRDFATVRKVLSMPQVNIVKKTEVQTGGFSKESILPKRNSDKLIARKKDWDPKKYGGFDSPTVAYSVLVVAKVEKGKSKKLKSVKELLGITIMERSSFEKNPIDFLEAKGYKEVKKDLIIKLPKYSLFELENGRKRMLASAGELQKGNELALPSKYVNFLYLASHYEKLKGSPEDNEQKQLFVEQHKHYLDEIIEQISEFSKRVILADANLDKVLSAYNKHRDKPIREQAENIIHLFTLTNLGAPAAFKYFDTTIDRKRYTSTKEVLDATLIHQSITGLYETRIDLSQLGGDGGGSSGGGEAAAKGGTLNIEDEYRLHETSKEPDVSLGSTWLSDFPQAWAETGGMGLAVRQAPLIIPLKATSTPVSIKQYPMSQEARLGIKPHIQRLLDQGILVPCQSPWNTPLLPVKKPGTNDYRPVQDLREVNKRVEDIHPTVPNPYNLLSGLPPSHQWYTVLDLKDAFFCLRLHPTSQPLFAFEWRDPEMGISGQLTWTRLPQGFKNSPTLFNEALHRDLAGFRIQHPDLILLQYVDDLLLAATSELDCQQGTRALLQTLGDLGYRASAKKAQICQKQVKYLGYLLKEGQRWLTEARKETVMGQPIPKTPRQLREFLGTAGFCRLWIPGFAEMAAPLYPLTKPGTLFNWGPDQQKAFQEIKQALLTAPALGLPDLTKPFELFVDEKQGYAKGVLTQKLGPWRRPVAYLSKKLDPVAAGWPPCLRMVAAIAVLTKDAGKLTMGQPLVILAPHAVEALVKQPPDRWLSNARMTHYQALLLDTDRVQFGPVVALNPATLLPLPEEGLQHDCLDILAEAHGTRSDLMDQPLPDADHTWYTDGSSFLQEGQRKAGAAVTTETEVIWARALPAGTSAQRAELIALTQALKMAEGKKLNVYTDSRYAFATAHIHGEIYRRRGWLTSEGKEIKNKDEILALLKALFLPKRLSIIHCPGHQKGNSAEARGNRMADQAAREVATRETPETSTLLAGKRTADGSEFEKRTADGSEFESPKKKAKVE

SEQ ID NO: 2293 - protein, 2094 aa, synthetic construct
MPAAKRVKLDGGDKKYSIGLDIGTNSVGWAVITDEYKVPSKKFKVLGNTDRHSIKKNLIGALLFDSGETAEATRLKRTARRRYTRRKNRICYLQEIFSNEMAKVDDSFFHRLEESFLVEEDKKHERHPIFGNIVDEVAYHEKYPTIYHLRKKLVDSTDKADLRLIYLALAHMIKFRGHFLIEGDLNPDNSDVDKLFIQLVQTYNQLFEENPINASGVDAKAILSARLSKSRRLENLIAQLPGEKKNGLFGNLIALSLGLTPNFKSNFDLAEDAKLQLSKDTYDDDLDNLLAQIGDQYADLFLAAKNLSDAILLSDILRVNTEITKAPLSASMIKRYDEHHQDLTLLKALVRQQLPEKYKEIFFDQSKNGYAGYIDGGASQEEFYKFIKPILEKMDGTEELLVKLNREDLLRKQRTFDNGSIPHQIHLGELHAILRRQEDFYPFLKDNREKIEKILTFRIPYYVGPLARGNSRFAWMTRKSEETITPWNFEEVVDKGASAQSFIERMTNFDKNLPNEKVLPKHSLLYEYFTVYNELTKVKYVTEGMRKPAFLSGEQKKAIVDLLFKTNRKVTVKQLKEDYFKKIECFDSVEISGVEDRFNASLGTYHDLLKIIKDKDFLDNEENEDILEDIVLTLTLFEDREMIEERLKTYAHLFDDKVMKQLKRRRYTGWGRLSRKLINGIRDKQSGKTILDFLKSDGFANRNFMQLIHDDSLTFKEDIQKAQVSGQGDSLHEHIANLAGSPAIKKGILQTVKVVDELVKVMGRHKPENIVIEMARENQTTQKGQKNSRERMKRIEEGIKELGSQILKEHPVENTQLQNEKLYLYYLQNGRDMYVDQELDINRLSDYDVDHIVPQSFLKDDSIDNKVLTRSDKARGKSDNVPSEEVVKKMKNYWRQLLNAKLITQRKFDNLTKAERGGLSELDKAGFIKRQLVETRQITKHVAQILDSRMNTKYDENDKLIREVKVITLKSKLVSDFRKDFQFYKVREINNYHHAHDAYLNAVVGTALIKKYPKLESEFVYGDYKVYDVRKMIAKSEQEIGKATAKYFFYSNIMNFFKTEITLANGEIRKRPLIETNGETGEIVWDKGRDFATVRKVLSMPQVNIVKKTEVQTGGFSKESILPKRNSDKLIARKKDWDPKKYGGFDSPTVAYSVLVVAKVEKGKSKKLKSVKELLGITIMERSSFEKNPIDFLEAKGYKEVKKDLIIKLPKYSLFELENGRKRMLASAGELQKGNELALPSKYVNFLYLASHYEKLKGSPEDNEQKQLFVEQHKHYLDEIIEQISEFSKRVILADANLDKVLSAYNKHRDKPIREQAENIIHLFTLTNLGAPAAFKYFDTTIDRKRYTSTKEVLDATLIHQSITGLYETRIDLSQLGGDGGGGSGSSGGGGGTLNIEDEYRLHETSKEPDVSLGSTWLSDFPQAWAETGGMGLAVRQAPLIIPLKATSTPVSIKQYPMSQEARLGIKPHIQRLLDQGILVPCQSPWNTPLLPVKKPGTNDYRPVQDLREVNKRVEDIHPTVPNPYNLLSGLPPSHQWYTVLDLKDAFFCLRLHPTSQPLFAFEWRDPEMGISGQLTWTRLPQGFKNSPTLFNEALHRDLAGFRIQHPDLILLQYVDDLLLAATSELDCQQGTRALLQTLGDLGYRASAKKAQICQKQVKYLGYLLKEGQRWLTEARKETVMGQPIPKTPRQLREFLGTAGFCRLWIPGFAEMAAPLYPLTKPGTLFNWGPDQQKAFQEIKQALLTAPALGLPDLTKPFELFVDEKQGYAKGVLTQKLGPWRRPVAYLSKKLDPVAAGWPPCLRMVAAIAVLTKDAGKLTMGQPLVILAPHAVEALVKQPPDRWLSNARMTHYQALLLDTDRVQFGPVVALNPATLLPLPEEGLQHDCLDILAEAHGTRSDLMDQPLPDADHTWYTDGSSFLQEGQRKAGAAVTTETEVIWARALPAGTSAQRAELIALTQALKMAEGKKLNVYTDSRYAFATAHIHGEIYRRRGWLTSEGKEIKNKDEILALLKALFLPKRLSIIHCPGHQKGNSAEARGNRMADQAAREVATRETPETSTLLAGKRTADGSEFEKRTADGSEFESPKKKAKVE

SEQ ID NO: 2294 - protein, 2092 aa, synthetic construct
MPAAKRVKLDGGDKKYSIGLDIGTNSVGWAVITDEYKVPSKKFKVLGNTDRHSIKKNLIGALLFDSGETAEATRLKRTARRRYTRRKNRICYLQEIFSNEMAKVDDSFFHRLEESFLVEEDKKHERHPIFGNIVDEVAYHEKYPTIYHLRKKLVDSTDKADLRLIYLALAHMIKFRGHFLIEGDLNPDNSDVDKLFIQLVQTYNQLFEENPINASGVDAKAILSARLSKSRRLENLIAQLPGEKKNGLFGNLIALSLGLTPNFKSNFDLAEDAKLQLSKDTYDDDLDNLLAQIGDQYADLFLAAKNLSDAILLSDILRVNTEITKAPLSASMIKRYDEHHQDLTLLKALVRQQLPEKYKEIFFDQSKNGYAGYIDGGASQEEFYKFIKPILEKMDGTEELLVKLNREDLLRKQRTFDNGSIPHQIHLGELHAILRRQEDFYPFLKDNREKIEKILTFRIPYYVGPLARGNSRFAWMTRKSEETITPWNFEEVVDKGASAQSFIERMTNFDKNLPNEKVLPKHSLLYEYFTVYNELTKVKYVTEGMRKPAFLSGEQKKAIVDLLFKTNRKVTVKQLKEDYFKKIECFDSVEISGVEDRFNASLGTYHDLLKIIKDKDFLDNEENEDILEDIVLTLTLFEDREMIEERLKTYAHLFDDKVMKQLKRRRYTGWGRLSRKLINGIRDKQSGKTILDFLKSDGFANRNFMQLIHDDSLTFKEDIQKAQVSGQGDSLHEHIANLAGSPAIKKGILQTVKVVDELVKVMGRHKPENIVIEMARENQTTQKGQKNSRERMKRIEEGIKELGSQILKEHPVENTQLQNEKLYLYYLQNGRDMYVDQELDINRLSDYDVDHIVPQSFLKDDSIDNKVLTRSDKARGKSDNVPSEEVVKKMKNYWRQLLNAKLITQRKFDNLTKAERGGLSELDKAGFIKRQLVETRQITKHVAQILDSRMNTKYDENDKLIREVKVITLKSKLVSDFRKDFQFYKVREINNYHHAHDAYLNAVVGTALIKKYPKLESEFVYGDYKVYDVRKMIAKSEQEIGKATAKYFFYSNIMNFFKTEITLANGEIRKRPLIETNGETGEIVWDKGRDFATVRKVLSMPQVNIVKKTEVQTGGFSKESILPKRNSDKLIARKKDWDPKKYGGFDSPTVAYSVLVVAKVEKGKSKKLKSVKELLGITIMERSSFEKNPIDFLEAKGYKEVKKDLIIKLPKYSLFELENGRKRMLASAGELQKGNELALPSKYVNFLYLASHYEKLKGSPEDNEQKQLFVEQHKHYLDEIIEQISEFSKRVILADANLDKVLSAYNKHRDKPIREQAENIIHLFTLTNLGAPAAFKYFDTTIDRKRYTSTKEVLDATLIHQSITGLYETRIDLSQLGGDGGPAPAPAPGGTLNIEDEYRLHETSKEPDVSLGSTWLSDFPQAWAETGGMGLAVRQAPLIIPLKATSTPVSIKQYPMSQEARLGIKPHIQRLLDQGILVPCQSPWNTPLLPVKKPGTNDYRPVQDLREVNKRVEDIHPTVPNPYNLLSGLPPSHQWYTVLDLKDAFFCLRLHPTSQPLFAFEWRDPEMGISGQLTWTRLPQGFKNSPTLFNEALHRDLAGFRIQHPDLILLQYVDDLLLAATSELDCQQGTRALLQTLGDLGYRASAKKAQICQKQVKYLGYLLKEGQRWLTEARKETVMGQPIPKTPRQLREFLGTAGFCRLWIPGFAEMAAPLYPLTKPGTLFNWGPDQQKAFQEIKQALLTAPALGLPDLTKPFELFVDEKQGYAKGVLTQKLGPWRRPVAYLSKKLDPVAAGWPPCLRMVAAIAVLTKDAGKLTMGQPLVILAPHAVEALVKQPPDRWLSNARMTHYQALLLDTDRVQFGPVVALNPATLLPLPEEGLQHDCLDILAEAHGTRSDLMDQPLPDADHTWYTDGSSFLQEGQRKAGAAVTTETEVIWARALPAGTSAQRAELIALTQALKMAEGKKLNVYTDSRYAFATAHIHGEIYRRRGWLTSEGKEIKNKDEILALLKALFLPKRLSIIHCPGHQKGNSAEARGNRMADQAAREVATRETPETSTLLAGKRTADGSEFEKRTADGSEFESPKKKAKVE

SEQ ID NO: 2295 - protein, 2094 aa, synthetic construct
MPAAKRVKLDGGDKKYSIGLDIGTNSVGWAVITDEYKVPSKKFKVLGNTDRHSIKKNLIGALLFDSGETAEATRLKRTARRRYTRRKNRICYLQEIFSNEMAKVDDSFFHRLEESFLVEEDKKHERHPIFGNIVDEVAYHEKYPTIYHLRKKLVDSTDKADLRLIYLALAHMIKFRGHFLIEGDLNPDNSDVDKLFIQLVQTYNQLFEENPINASGVDAKAILSARLSKSRRLENLIAQLPGEKKNGLFGNLIALSLGLTPNFKSNFDLAEDAKLQLSKDTYDDDLDNLLAQIGDQYADLFLAAKNLSDAILLSDILRVNTEITKAPLSASMIKRYDEHHQDLTLLKALVRQQLPEKYKEIFFDQSKNGYAGYIDGGASQEEFYKFIKPILEKMDGTEELLVKLNREDLLRKQRTFDNGSIPHQIHLGELHAILRRQEDFYPFLKDNREKIEKILTFRIPYYVGPLARGNSRFAWMTRKSEETITPWNFEEVVDKGASAQSFIERMTNFDKNLPNEKVLPKHSLLYEYFTVYNELTKVKYVTEGMRKPAFLSGEQKKAIVDLLFKTNRKVTVKQLKEDYFKKIECFDSVEISGVEDRFNASLGTYHDLLKIIKDKDFLDNEENEDILEDIVLTLTLFEDREMIEERLKTYAHLFDDKVMKQLKRRRYTGWGRLSRKLINGIRDKQSGKTILDFLKSDGFANRNFMQLIHDDSLTFKEDIQKAQVSGQGDSLHEHIANLAGSPAIKKGILQTVKVVDELVKVMGRHKPENIVIEMARENQTTQKGQKNSRERMKRIEEGIKELGSQILKEHPVENTQLQNEKLYLYYLQNGRDMYVDQELDINRLSDYDVDHIVPQSFLKDDSIDNKVLTRSDKARGKSDNVPSEEVVKKMKNYWRQLLNAKLITQRKFDNLTKAERGGLSELDKAGFIKRQLVETRQITKHVAQILDSRMNTKYDENDKLIREVKVITLKSKLVSDFRKDFQFYKVREINNYHHAHDAYLNAVVGTALIKKYPKLESEFVYGDYKVYDVRKMIAKSEQEIGKATAKYFFYSNIMNFFKTEITLANGEIRKRPLIETNGETGEIVWDKGRDFATVRKVLSMPQVNIVKKTEVQTGGFSKESILPKRNSDKLIARKKDWDPKKYGGFDSPTVAYSVLVVAKVEKGKSKKLKSVKELLGITIMERSSFEKNPIDFLEAKGYKEVKKDLIIKLPKYSLFELENGRKRMLASAGELQKGNELALPSKYVNFLYLASHYEKLKGSPEDNEQKQLFVEQHKHYLDEIIEQISEFSKRVILADANLDKVLSAYNKHRDKPIREQAENIIHLFTLTNLGAPAAFKYFDTTIDRKRYTSTKEVLDATLIHQSITGLYETRIDLSQLGGDGGPAPAPAPAPGGTLNIEDEYRLHETSKEPDVSLGSTWLSDFPQAWAETGGMGLAVRQAPLIIPLKATSTPVSIKQYPMSQEARLGIKPHIQRLLDQGILVPCQSPWNTPLLPVKKPGTNDYRPVQDLREVNKRVEDIHPTVPNPYNLLSGLPPSHQWYTVLDLKDAFFCLRLHPTSQPLFAFEWRDPEMGISGQLTWTRLPQGFKNSPTLFNEALHRDLAGFRIQHPDLILLQYVDDLLLAATSELDCQQGTRALLQTLGDLGYRASAKKAQICQKQVKYLGYLLKEGQRWLTEARKETVMGQPIPKTPRQLREFLGTAGFCRLWIPGFAEMAAPLYPLTKPGTLFNWGPDQQKAFQEIKQALLTAPALGLPDLTKPFELFVDEKQGYAKGVLTQKLGPWRRPVAYLSKKLDPVAAGWPPCLRMVAAIAVLTKDAGKLTMGQPLVILAPHAVEALVKQPPDRWLSNARMTHYQALLLDTDRVQFGPVVALNPATLLPLPEEGLQHDCLDILAEAHGTRSDLMDQPLPDADHTWYTDGSSFLQEGQRKAGAAVTTETEVIWARALPAGTSAQRAELIALTQALKMAEGKKLNVYTDSRYAFATAHIHGEIYRRRGWLTSEGKEIKNKDEILALLKALFLPKRLSIIHCPGHQKGNSAEARGNRMADQAAREVATRETPETSTLLAGKRTADGSEFEKRTADGSEFESPKKKAKVE

SEQ ID NO: 2296 - protein, 2096 aa, synthetic construct
MPAAKRVKLDGGDKKYSIGLDIGTNSVGWAVITDEYKVPSKKFKVLGNTDRHSIKKNLIGALLFDSGETAEATRLKRTARRRYTRRKNRICYLQEIFSNEMAKVDDSFFHRLEESFLVEEDKKHERHPIFGNIVDEVAYHEKYPTIYHLRKKLVDSTDKADLRLIYLALAHMIKFRGHFLIEGDLNPDNSDVDKLFIQLVQTYNQLFEENPINASGVDAKAILSARLSKSRRLENLIAQLPGEKKNGLFGNLIALSLGLTPNFKSNFDLAEDAKLQLSKDTYDDDLDNLLAQIGDQYADLFLAAKNLSDAILLSDILRVNTEITKAPLSASMIKRYDEHHQDLTLLKALVRQQLPEKYKEIFFDQSKNGYAGYIDGGASQEEFYKFIKPILEKMDGTEELLVKLNREDLLRKQRTFDNGSIPHQIHLGELHAILRRQEDFYPFLKDNREKIEKILTFRIPYYVGPLARGNSRFAWMTRKSEETITPWNFEEVVDKGASAQSFIERMTNFDKNLPNEKVLPKHSLLYEYFTVYNELTKVKYVTEGMRKPAFLSGEQKKAIVDLLFKTNRKVTVKQLKEDYFKKIECFDSVEISGVEDRFNASLGTYHDLLKIIKDKDFLDNEENEDILEDIVLTLTLFEDREMIEERLKTYAHLFDDKVMKQLKRRRYTGWGRLSRKLINGIRDKQSGKTILDFLKSDGFANRNFMQLIHDDSLTFKEDIQKAQVSGQGDSLHEHIANLAGSPAIKKGILQTVKVVDELVKVMGRHKPENIVIEMARENQTTQKGQKNSRERMKRIEEGIKELGSQILKEHPVENTQLQNEKLYLYYLQNGRDMYVDQELDINRLSDYDVDHIVPQSFLKDDSIDNKVLTRSDKARGKSDNVPSEEVVKKMKNYWRQLLNAKLITQRKFDNLTKAERGGLSELDKAGFIKRQLVETRQITKHVAQILDSRMNTKYDENDKLIREVKVITLKSKLVSDFRKDFQFYKVREINNYHHAHDAYLNAVVGTALIKKYPKLESEFVYGDYKVYDVRKMIAKSEQEIGKATAKYFFYSNIMNFFKTEITLANGEIRKRPLIETNGETGEIVWDKGRDFATVRKVLSMPQVNIVKKTEVQTGGFSKESILPKRNSDKLIARKKDWDPKKYGGFDSPTVAYSVLVVAKVEKGKSKKLKSVKELLGITIMERSSFEKNPIDFLEAKGYKEVKKDLIIKLPKYSLFELENGRKRMLASAGELQKGNELALPSKYVNFLYLASHYEKLKGSPEDNEQKQLFVEQHKHYLDEIIEQISEFSKRVILADANLDKVLSAYNKHRDKPIREQAENIIHLFTLTNLGAPAAFKYFDTTIDRKRYTSTKEVLDATLIHQSITGLYETRIDLSQLGGDGGGGSEAAAKGSSGGTLNIEDEYRLHETSKEPDVSLGSTWLSDFPQAWAETGGMGLAVRQAPLIIPLKATSTPVSIKQYPMSQEARLGIKPHIQRLLDQGILVPCQSPWNTPLLPVKKPGTNDYRPVQDLREVNKRVEDIHPTVPNPYNLLSGLPPSHQWYTVLDLKDAFFCLRLHPTSQPLFAFEWRDPEMGISGQLTWTRLPQGFKNSPTLFNEALHRDLAGFRIQHPDLILLQYVDDLLLAATSELDCQQGTRALLQTLGDLGYRASAKKAQICQKQVKYLGYLLKEGQRWLTEARKETVMGQPIPKTPRQLREFLGTAGFCRLWIPGFAEMAAPLYPLTKPGTLFNWGPDQQKAFQEIKQALLTAPALGLPDLTKPFELFVDEKQGYAKGVLTQKLGPWRRPVAYLSKKLDPVAAGWPPCLRMVAAIAVLTKDAGKLTMGQPLVILAPHAVEALVKQPPDRWLSNARMTHYQALLLDTDRVQFGPVVALNPATLLPLPEEGLQHDCLDILAEAHGTRSDLMDQPLPDADHTWYTDGSSFLQEGQRKAGAAVTTETEVIWARALPAGTSAQRAELIALTQALKMAEGKKLNVYTDSRYAFATAHIHGEIYRRRGWLTSEGKEIKNKDEILALLKALFLPKRLSIIHCPGHQKGNSAEARGNRMADQAAREVATRETPETSTLLAGKRTADGSEFEKRTADGSEFESPKKKAKVE

SEQ ID NO: 2297 - protein, 2093 aa, synthetic construct
MPAAKRVKLDGGDKKYSIGLDIGTNSVGWAVITDEYKVPSKKFKVLGNTDRHSIKKNLIGALLFDSGETAEATRLKRTARRRYTRRKNRICYLQEIFSNEMAKVDDSFFHRLEESFLVEEDKKHERHPIFGNIVDEVAYHEKYPTIYHLRKKLVDSTDKADLRLIYLALAHMIKFRGHFLIEGDLNPDNSDVDKLFIQLVQTYNQLFEENPINASGVDAKAILSARLSKSRRLENLIAQLPGEKKNGLFGNLIALSLGLTPNFKSNFDLAEDAKLQLSKDTYDDDLDNLLAQIGDQYADLFLAAKNLSDAILLSDILRVNTEITKAPLSASMIKRYDEHHQDLTLLKALVRQQLPEKYKEIFFDQSKNGYAGYIDGGASQEEFYKFIKPILEKMDGTEELLVKLNREDLLRKQRTFDNGSIPHQIHLGELHAILRRQEDFYPFLKDNREKIEKILTFRIPYYVGPLARGNSRFAWMTRKSEETITPWNFEEVVDKGASAQSFIERMTNFDKNLPNEKVLPKHSLLYEYFTVYNELTKVKYVTEGMRKPAFLSGEQKKAIVDLLFKTNRKVTVKQLKEDYFKKIECFDSVEISGVEDRFNASLGTYHDLLKIIKDKDFLDNEENEDILEDIVLTLTLFEDREMIEERLKTYAHLFDDKVMKQLKRRRYTGWGRLSRKLINGIRDKQSGKTILDFLKSDGFANRNFMQLIHDDSLTFKEDIQKAQVSGQGDSLHEHIANLAGSPAIKKGILQTVKVVDELVKVMGRHKPENIVIEMARENQTTQKGQKNSRERMKRIEEGIKELGSQILKEHPVENTQLQNEKLYLYYLQNGRDMYVDQELDINRLSDYDVDHIVPQSFLKDDSIDNKVLTRSDKARGKSDNVPSEEVVKKMKNYWRQLLNAKLITQRKFDNLTKAERGGLSELDKAGFIKRQLVETRQITKHVAQILDSRMNTKYDENDKLIREVKVITLKSKLVSDFRKDFQFYKVREINNYHHAHDAYLNAVVGTALIKKYPKLESEFVYGDYKVYDVRKMIAKSEQEIGKATAKYFFYSNIMNFFKTEITLANGEIRKRPLIETNGETGEIVWDKGRDFATVRKVLSMPQVNIVKKTEVQTGGFSKESILPKRNSDKLIARKKDWDPKKYGGFDSPTVAYSVLVVAKVEKGKSKKLKSVKELLGITIMERSSFEKNPIDFLEAKGYKEVKKDLIIKLPKYSLFELENGRKRMLASAGELQKGNELALPSKYVNFLYLASHYEKLKGSPEDNEQKQLFVEQHKHYLDEIIEQISEFSKRVILADANLDKVLSAYNKHRDKPIREQAENIIHLFTLTNLGAPAAFKYFDTTIDRKRYTSTKEVLDATLIHQSITGLYETRIDLSQLGGDGGEAAAKGSSGGTLNIEDEYRLHETSKEPDVSLGSTWLSDFPQAWAETGGMGLAVRQAPLIIPLKATSTPVSIKQYPMSQEARLGIKPHIQRLLDQGILVPCQSPWNTPLLPVKKPGTNDYRPVQDLREVNKRVEDIHPTVPNPYNLLSGLPPSHQWYTVLDLKDAFFCLRLHPTSQPLFAFEWRDPEMGISGQLTWTRLPQGFKNSPTLFNEALHRDLAGFRIQHPDLILLQYVDDLLLAATSELDCQQGTRALLQTLGDLGYRASAKKAQICQKQVKYLGYLLKEGQRWLTEARKETVMGQPIPKTPRQLREFLGTAGFCRLWIPGFAEMAAPLYPLTKPGTLFNWGPDQQKAFQEIKQALLTAPALGLPDLTKPFELFVDEKQGYAKGVLTQKLGPWRRPVAYLSKKLDPVAAGWPPCLRMVAAIAVLTKDAGKLTMGQPLVILAPHAVEALVKQPPDRWLSNARMTHYQALLLDTDRVQFGPVVALNPATLLPLPEEGLQHDCLDILAEAHGTRSDLMDQPLPDADHTWYTDGSSFLQEGQRKAGAAVTTETEVIWARALPAGTSAQRAELIALTQALKMAEGKKLNVYTDSRYAFATAHIHGEIYRRRGWLTSEGKEIKNKDEILALLKALFLPKRLSIIHCPGHQKGNSAEARGNRMADQAAREVATRETPETSTLLAGKRTADGSEFEKRTADGSEFESPKKKAKVE

SEQ ID NO: 2298 - protein, 2091 aa, synthetic construct
MPAAKRVKLDGGDKKYSIGLDIGTNSVGWAVITDEYKVPSKKFKVLGNTDRHSIKKNLIGALLFDSGETAEATRLKRTARRRYTRRKNRICYLQEIFSNEMAKVDDSFFHRLEESFLVEEDKKHERHPIFGNIVDEVAYHEKYPTIYHLRKKLVDSTDKADLRLIYLALAHMIKFRGHFLIEGDLNPDNSDVDKLFIQLVQTYNQLFEENPINASGVDAKAILSARLSKSRRLENLIAQLPGEKKNGLFGNLIALSLGLTPNFKSNFDLAEDAKLQLSKDTYDDDLDNLLAQIGDQYADLFLAAKNLSDAILLSDILRVNTEITKAPLSASMIKRYDEHHQDLTLLKALVRQQLPEKYKEIFFDQSKNGYAGYIDGGASQEEFYKFIKPILEKMDGTEELLVKLNREDLLRKQRTFDNGSIPHQIHLGELHAILRRQEDFYPFLKDNREKIEKILTFRIPYYVGPLARGNSRFAWMTRKSEETITPWNFEEVVDKGASAQSFIERMTNFDKNLPNEKVLPKHSLLYEYFTVYNELTKVKYVTEGMRKPAFLSGEQKKAIVDLLFKTNRKVTVKQLKEDYFKKIECFDSVEISGVEDRFNASLGTYHDLLKIIKDKDFLDNEENEDILEDIVLTLTLFEDREMIEERLKTYAHLFDDKVMKQLKRRRYTGWGRLSRKLINGIRDKQSGKTILDFLKSDGFANRNFMQLIHDDSLTFKEDIQKAQVSGQGDSLHEHIANLAGSPAIKKGILQTVKVVDELVKVMGRHKPENIVIEMARENQTTQKGQKNSRERMKRIEEGIKELGSQILKEHPVENTQLQNEKLYLYYLQNGRDMYVDQELDINRLSDYDVDHIVPQSFLKDDSIDNKVLTRSDKARGKSDNVPSEEVVKKMKNYWRQLLNAKLITQRKFDNLTKAERGGLSELDKAGFIKRQLVETRQITKHVAQILDSRMNTKYDENDKLIREVKVITLKSKLVSDFRKDFQFYKVREINNYHHAHDAYLNAVVGTALIKKYPKLESEFVYGDYKVYDVRKMIAKSEQEIGKATAKYFFYSNIMNFFKTEITLANGEIRKRPLIETNGETGEIVWDKGRDFATVRKVLSMPQVNIVKKTEVQTGGFSKESILPKRNSDKLIARKKDWDPKKYGGFDSPTVAYSVLVVAKVEKGKSKKLKSVKELLGITIMERSSFEKNPIDFLEAKGYKEVKKDLIIKLPKYSLFELENGRKRMLASAGELQKGNELALPSKYVNFLYLASHYEKLKGSPEDNEQKQLFVEQHKHYLDEIIEQISEFSKRVILADANLDKVLSAYNKHRDKPIREQAENIIHLFTLTNLGAPAAFKYFDTTIDRKRYTSTKEVLDATLIHQSITGLYETRIDLSQLGGDGGPAPGGGGGTLNIEDEYRLHETSKEPDVSLGSTWLSDFPQAWAETGGMGLAVRQAPLIIPLKATSTPVSIKQYPMSQEARLGIKPHIQRLLDQGILVPCQSPWNTPLLPVKKPGTNDYRPVQDLREVNKRVEDIHPTVPNPYNLLSGLPPSHQWYTVLDLKDAFFCLRLHPTSQPLFAFEWRDPEMGISGQLTWTRLPQGFKNSPTLFNEALHRDLAGFRIQHPDLILLQYVDDLLLAATSELDCQQGTRALLQTLGDLGYRASAKKAQICQKQVKYLGYLLKEGQRWLTEARKETVMGQPIPKTPRQLREFLGTAGFCRLWIPGFAEMAAPLYPLTKPGTLFNWGPDQQKAFQEIKQALLTAPALGLPDLTKPFELFVDEKQGYAKGVLTQKLGPWRRPVAYLSKKLDPVAAGWPPCLRMVAAIAVLTKDAGKLTMGQPLVILAPHAVEALVKQPPDRWLSNARMTHYQALLLDTDRVQFGPVVALNPATLLPLPEEGLQHDCLDILAEAHGTRSDLMDQPLPDADHTWYTDGSSFLQEGQRKAGAAVTTETEVIWARALPAGTSAQRAELIALTQALKMAEGKKLNVYTDSRYAFATAHIHGEIYRRRGWLTSEGKEIKNKDEILALLKALFLPKRLSIIHCPGHQKGNSAEARGNRMADQAAREVATRETPETSTLLAGKRTADGSEFEKRTADGSEFESPKKKAKVE

SEQ ID NO: 2299 - protein, 2088 aa, synthetic construct
MPAAKRVKLDGGDKKYSIGLDIGTNSVGWAVITDEYKVPSKKFKVLGNTDRHSIKKNLIGALLFDSGETAEATRLKRTARRRYTRRKNRICYLQEIFSNEMAKVDDSFFHRLEESFLVEEDKKHERHPIFGNIVDEVAYHEKYPTIYHLRKKLVDSTDKADLRLIYLALAHMIKFRGHFLIEGDLNPDNSDVDKLFIQLVQTYNQLFEENPINASGVDAKAILSARLSKSRRLENLIAQLPGEKKNGLFGNLIALSLGLTPNFKSNFDLAEDAKLQLSKDTYDDDLDNLLAQIGDQYADLFLAAKNLSDAILLSDILRVNTEITKAPLSASMIKRYDEHHQDLTLLKALVRQQLPEKYKEIFFDQSKNGYAGYIDGGASQEEFYKFIKPILEKMDGTEELLVKLNREDLLRKQRTFDNGSIPHQIHLGELHAILRRQEDFYPFLKDNREKIEKILTFRIPYYVGPLARGNSRFAWMTRKSEETITPWNFEEVVDKGASAQSFIERMTNFDKNLPNEKVLPKHSLLYEYFTVYNELTKVKYVTEGMRKPAFLSGEQKKAIVDLLFKTNRKVTVKQLKEDYFKKIECFDSVEISGVEDRFNASLGTYHDLLKIIKDKDFLDNEENEDILEDIVLTLTLFEDREMIEERLKTYAHLFDDKVMKQLKRRRYTGWGRLSRKLINGIRDKQSGKTILDFLKSDGFANRNFMQLIHDDSLTFKEDIQKAQVSGQGDSLHEHIANLAGSPAIKKGILQTVKVVDELVKVMGRHKPENIVIEMARENQTTQKGQKNSRERMKRIEEGIKELGSQILKEHPVENTQLQNEKLYLYYLQNGRDMYVDQELDINRLSDYDVDHIVPQSFLKDDSIDNKVLTRSDKARGKSDNVPSEEVVKKMKNYWRQLLNAKLITQRKFDNLTKAERGGLSELDKAGFIKRQLVETRQITKHVAQILDSRMNTKYDENDKLIREVKVITLKSKLVSDFRKDFQFYKVREINNYHHAHDAYLNAVVGTALIKKYPKLESEFVYGDYKVYDVRKMIAKSEQEIGKATAKYFFYSNIMNFFKTEITLANGEIRKRPLIETNGETGEIVWDKGRDFATVRKVLSMPQVNIVKKTEVQTGGFSKESILPKRNSDKLIARKKDWDPKKYGGFDSPTVAYSVLVVAKVEKGKSKKLKSVKELLGITIMERSSFEKNPIDFLEAKGYKEVKKDLIIKLPKYSLFELENGRKRMLASAGELQKGNELALPSKYVNFLYLASHYEKLKGSPEDNEQKQLFVEQHKHYLDEIIEQISEFSKRVILADANLDKVLSAYNKHRDKPIREQAENIIHLFTLTNLGAPAAFKYFDTTIDRKRYTSTKEVLDATLIHQSITGLYETRIDLSQLGGDGGPAPGGTLNIEDEYRLHETSKEPDVSLGSTWLSDFPQAWAETGGMGLAVRQAPLIIPLKATSTPVSIKQYPMSQEARLGIKPHIQRLLDQGILVPCQSPWNTPLLPVKKPGTNDYRPVQDLREVNKRVEDIHPTVPNPYNLLSGLPPSHQWYTVLDLKDAFFCLRLHPTSQPLFAFEWRDPEMGISGQLTWTRLPQGFKNSPTLFNEALHRDLAGFRIQHPDLILLQYVDDLLLAATSELDCQQGTRALLQTLGDLGYRASAKKAQICQKQVKYLGYLLKEGQRWLTEARKETVMGQPIPKTPRQLREFLGKAGFCRLFIPGFAEMAAPLYPLTKPGTLFNWGPDQQKAFQEIKQALLTAPALGLPDLTKPFELFVDEKQGYAKGVLTQKLGPWRRPVAYLSKKLDPVAAGWPPCLRMVAAIAVLTKDAGKLTMGQPLVILAPHAVEALVKQPPDRWLSNARMTHYQALLLDTDRVQFGPVVALNPATLLPLPEEGLQHDCLDILAEAHGTRSDLMDQPLPDADHTWYTDGSSFLQEGQRKAGAAVTTETEVIWARALPAGTSAQRAELIALTQALKMAEGKKLNVYTDSRYAFATAHIHGEIYRRRGWLTSEGKEIKNKDEILALLKALFLPKRLSIIHCPGHQKGNSAEARGNRMADQAAREVATRETPETSTLLAGKRTADGSEFEKRTADGSEFESPKKKAKVE

SEQ ID NO: 2300 - protein, 2103 aa, synthetic construct
MPAAKRVKLDGGDKKYSIGLDIGTNSVGWAVITDEYKVPSKKFKVLGNTDRHSIKKNLIGALLFDSGETAEATRLKRTARRRYTRRKNRICYLQEIFSNEMAKVDDSFFHRLEESFLVEEDKKHERHPIFGNIVDEVAYHEKYPTIYHLRKKLVDSTDKADLRLIYLALAHMIKFRGHFLIEGDLNPDNSDVDKLFIQLVQTYNQLFEENPINASGVDAKAILSARLSKSRRLENLIAQLPGEKKNGLFGNLIALSLGLTPNFKSNFDLAEDAKLQLSKDTYDDDLDNLLAQIGDQYADLFLAAKNLSDAILLSDILRVNTEITKAPLSASMIKRYDEHHQDLTLLKALVRQQLPEKYKEIFFDQSKNGYAGYIDGGASQEEFYKFIKPILEKMDGTEELLVKLNREDLLRKQRTFDNGSIPHQIHLGELHAILRRQEDFYPFLKDNREKIEKILTFRIPYYVGPLARGNSRFAWMTRKSEETITPWNFEEVVDKGASAQSFIERMTNFDKNLPNEKVLPKHSLLYEYFTVYNELTKVKYVTEGMRKPAFLSGEQKKAIVDLLFKTNRKVTVKQLKEDYFKKIECFDSVEISGVEDRFNASLGTYHDLLKIIKDKDFLDNEENEDILEDIVLTLTLFEDREMIEERLKTYAHLFDDKVMKQLKRRRYTGWGRLSRKLINGIRDKQSGKTILDFLKSDGFANRNFMQLIHDDSLTFKEDIQKAQVSGQGDSLHEHIANLAGSPAIKKGILQTVKVVDELVKVMGRHKPENIVIEMARENQTTQKGQKNSRERMKRIEEGIKELGSQILKEHPVENTQLQNEKLYLYYLQNGRDMYVDQELDINRLSDYDVDHIVPQSFLKDDSIDNKVLTRSDKARGKSDNVPSEEVVKKMKNYWRQLLNAKLITQRKFDNLTKAERGGLSELDKAGFIKRQLVETRQITKHVAQILDSRMNTKYDENDKLIREVKVITLKSKLVSDFRKDFQFYKVREINNYHHAHDAYLNAVVGTALIKKYPKLESEFVYGDYKVYDVRKMIAKSEQEIGKATAKYFFYSNIMNFFKTEITLANGEIRKRPLIETNGETGEIVWDKGRDFATVRKVLSMPQVNIVKKTEVQTGGFSKESILPKRNSDKLIARKKDWDPKKYGGFDSPTVAYSVLVVAKVEKGKSKKLKSVKELLGITIMERSSFEKNPIDFLEAKGYKEVKKDLIIKLPKYSLFELENGRKRMLASAGELQKGNELALPSKYVNFLYLASHYEKLKGSPEDNEQKQLFVEQHKHYLDEIIEQISEFSKRVILADANLDKVLSAYNKHRDKPIREQAENIIHLFTLTNLGAPAAFKYFDTTIDRKRYTSTKEVLDATLIHQSITGLYETRIDLSQLGGDGGGGSGGSGGSGGSGGSGGSGGTLNIEDEYRLHETSKEPDVSLGSTWLSDFPQAWAETGGMGLAVRQAPLIIPLKATSTPVSIKQYPMSQEARLGIKPHIQRLLDQGILVPCQSPWNTPLLPVKKPGTNDYRPVQDLREVNKRVEDIHPTVPNPYNLLSGLPPSHQWYTVLDLKDAFFCLRLHPTSQPLFAFEWRDPEMGISGQLTWTRLPQGFKNSPTLFNEALHRDLAGFRIQHPDLILLQYVDDLLLAATSELDCQQGTRALLQTLGDLGYRASAKKAQICQKQVKYLGYLLKEGQRWLTEARKETVMGQPIPKTPRQLREFLGKAGFCRLFIPGFAEMAAPLYPLTKPGTLFNWGPDQQKAFQEIKQALLTAPALGLPDLTKPFELFVDEKQGYAKGVLTQKLGPWRRPVAYLSKKLDPVAAGWPPCLRMVAAIAVLTKDAGKLTMGQPLVILAPHAVEALVKQPPDRWLSNARMTHYQALLLDTDRVQFGPVVALNPATLLPLPEEGLQHDCLDILAEAHGTRSDLMDQPLPDADHTWYTDGSSFLQEGQRKAGAAVTTETEVIWARALPAGTSAQRAELIALTQALKMAEGKKLNVYTDSRYAFATAHIHGEIYRRRGWLTSEGKEIKNKDEILALLKALFLPKRLSIIHCPGHQKGNSAEARGNRMADQAAREVATRETPETSTLLAGKRTADGSEFEKRTADGSEFESPKKKAKVE

SEQ ID NO: 2301 - protein, 2096 aa, synthetic construct
MPAAKRVKLDGGDKKYSIGLDIGTNSVGWAVITDEYKVPSKKFKVLGNTDRHSIKKNLIGALLFDSGETAEATRLKRTARRRYTRRKNRICYLQEIFSNEMAKVDDSFFHRLEESFLVEEDKKHERHPIFGNIVDEVAYHEKYPTIYHLRKKLVDSTDKADLRLIYLALAHMIKFRGHFLIEGDLNPDNSDVDKLFIQLVQTYNQLFEENPINASGVDAKAILSARLSKSRRLENLIAQLPGEKKNGLFGNLIALSLGLTPNFKSNFDLAEDAKLQLSKDTYDDDLDNLLAQIGDQYADLFLAAKNLSDAILLSDILRVNTEITKAPLSASMIKRYDEHHQDLTLLKALVRQQLPEKYKEIFFDQSKNGYAGYIDGGASQEEFYKFIKPILEKMDGTEELLVKLNREDLLRKQRTFDNGSIPHQIHLGELHAILRRQEDFYPFLKDNREKIEKILTFRIPYYVGPLARGNSRFAWMTRKSEETITPWNFEEVVDKGASAQSFIERMTNFDKNLPNEKVLPKHSLLYEYFTVYNELTKVKYVTEGMRKPAFLSGEQKKAIVDLLFKTNRKVTVKQLKEDYFKKIECFDSVEISGVEDRFNASLGTYHDLLKIIKDKDFLDNEENEDILEDIVLTLTLFEDREMIEERLKTYAHLFDDKVMKQLKRRRYTGWGRLSRKLINGIRDKQSGKTILDFLKSDGFANRNFMQLIHDDSLTFKEDIQKAQVSGQGDSLHEHIANLAGSPAIKKGILQTVKVVDELVKVMGRHKPENIVIEMARENQTTQKGQKNSRERMKRIEEGIKELGSQILKEHPVENTQLQNEKLYLYYLQNGRDMYVDQELDINRLSDYDVDHIVPQSFLKDDSIDNKVLTRSDKARGKSDNVPSEEVVKKMKNYWRQLLNAKLITQRKFDNLTKAERGGLSELDKAGFIKRQLVETRQITKHVAQILDSRMNTKYDENDKLIREVKVITLKSKLVSDFRKDFQFYKVREINNYHHAHDAYLNAVVGTALIKKYPKLESEFVYGDYKVYDVRKMIAKSEQEIGKATAKYFFYSNIMNFFKTEITLANGEIRKRPLIETNGETGEIVWDKGRDFATVRKVLSMPQVNIVKKTEVQTGGFSKESILPKRNSDKLIARKKDWDPKKYGGFDSPTVAYSVLVVAKVEKGKSKKLKSVKELLGITIMERSSFEKNPIDFLEAKGYKEVKKDLIIKLPKYSLFELENGRKRMLASAGELQKGNELALPSKYVNFLYLASHYEKLKGSPEDNEQKQLFVEQHKHYLDEIIEQISEFSKRVILADANLDKVLSAYNKHRDKPIREQAENIIHLFTLTNLGAPAAFKYFDTTIDRKRYTSTKEVLDATLIHQSITGLYETRIDLSQLGGDGGPAPAPAPAPAPGGTLNIEDEYRLHETSKEPDVSLGSTWLSDFPQAWAETGGMGLAVRQAPLIIPLKATSTPVSIKQYPMSQEARLGIKPHIQRLLDQGILVPCQSPWNTPLLPVKKPGTNDYRPVQDLREVNKRVEDIHPTVPNPYNLLSGLPPSHQWYTVLDLKDAFFCLRLHPTSQPLFAFEWRDPEMGISGQLTWTRLPQGFKNSPTLFNEALHRDLAGFRIQHPDLILLQYVDDLLLAATSELDCQQGTRALLQTLGDLGYRASAKKAQICQKQVKYLGYLLKEGQRWLTEARKETVMGQPIPKTPRQLREFLGKAGFCRLFIPGFAEMAAPLYPLTKPGTLFNWGPDQQKAFQEIKQALLTAPALGLPDLTKPFELFVDEKQGYAKGVLTQKLGPWRRPVAYLSKKLDPVAAGWPPCLRMVAAIAVLTKDAGKLTMGQPLVILAPHAVEALVKQPPDRWLSNARMTHYQALLLDTDRVQFGPVVALNPATLLPLPEEGLQHDCLDILAEAHGTRSDLMDQPLPDADHTWYTDGSSFLQEGQRKAGAAVTTETEVIWARALPAGTSAQRAELIALTQALKMAEGKKLNVYTDSRYAFATAHIHGEIYRRRGWLTSEGKEIKNKDEILALLKALFLPKRLSIIHCPGHQKGNSAEARGNRMADQAAREVATRETPETSTLLAGKRTADGSEFEKRTADGSEFESPKKKAKVE

SEQ ID NO: 2302 - protein, 2091 aa, synthetic construct
MPAAKRVKLDGGDKKYSIGLDIGTNSVGWAVITDEYKVPSKKFKVLGNTDRHSIKKNLIGALLFDSGETAEATRLKRTARRRYTRRKNRICYLQEIFSNEMAKVDDSFFHRLEESFLVEEDKKHERHPIFGNIVDEVAYHEKYPTIYHLRKKLVDSTDKADLRLIYLALAHMIKFRGHFLIEGDLNPDNSDVDKLFIQLVQTYNQLFEENPINASGVDAKAILSARLSKSRRLENLIAQLPGEKKNGLFGNLIALSLGLTPNFKSNFDLAEDAKLQLSKDTYDDDLDNLLAQIGDQYADLFLAAKNLSDAILLSDILRVNTEITKAPLSASMIKRYDEHHQDLTLLKALVRQQLPEKYKEIFFDQSKNGYAGYIDGGASQEEFYKFIKPILEKMDGTEELLVKLNREDLLRKQRTFDNGSIPHQIHLGELHAILRRQEDFYPFLKDNREKIEKILTFRIPYYVGPLARGNSRFAWMTRKSEETITPWNFEEVVDKGASAQSFIERMTNFDKNLPNEKVLPKHSLLYEYFTVYNELTKVKYVTEGMRKPAFLSGEQKKAIVDLLFKTNRKVTVKQLKEDYFKKIECFDSVEISGVEDRFNASLGTYHDLLKIIKDKDFLDNEENEDILEDIVLTLTLFEDREMIEERLKTYAHLFDDKVMKQLKRRRYTGWGRLSRKLINGIRDKQSGKTILDFLKSDGFANRNFMQLIHDDSLTFKEDIQKAQVSGQGDSLHEHIANLAGSPAIKKGILQTVKVVDELVKVMGRHKPENIVIEMARENQTTQKGQKNSRERMKRIEEGIKELGSQILKEHPVENTQLQNEKLYLYYLQNGRDMYVDQELDINRLSDYDVDHIVPQSFLKDDSIDNKVLTRSDKARGKSDNVPSEEVVKKMKNYWRQLLNAKLITQRKFDNLTKAERGGLSELDKAGFIKRQLVETRQITKHVAQILDSRMNTKYDENDKLIREVKVITLKSKLVSDFRKDFQFYKVREINNYHHAHDAYLNAVVGTALIKKYPKLESEFVYGDYKVYDVRKMIAKSEQEIGKATAKYFFYSNIMNFFKTEITLANGEIRKRPLIETNGETGEIVWDKGRDFATVRKVLSMPQVNIVKKTEVQTGGFSKESILPKRNSDKLIARKKDWDPKKYGGFDSPTVAYSVLVVAKVEKGKSKKLKSVKELLGITIMERSSFEKNPIDFLEAKGYKEVKKDLIIKLPKYSLFELENGRKRMLASAGELQKGNELALPSKYVNFLYLASHYEKLKGSPEDNEQKQLFVEQHKHYLDEIIEQISEFSKRVILADANLDKVLSAYNKHRDKPIREQAENIIHLFTLTNLGAPAAFKYFDTTIDRKRYTSTKEVLDATLIHQSITGLYETRIDLSQLGGDGGGGGPAPGGTLNIEDEYRLHETSKEPDVSLGSTWLSDFPQAWAETGGMGLAVRQAPLIIPLKATSTPVSIKQYPMSQEARLGIKPHIQRLLDQGILVPCQSPWNTPLLPVKKPGTNDYRPVQDLREVNKRVEDIHPTVPNPYNLLSGLPPSHQWYTVLDLKDAFFCLRLHPTSQPLFAFEWRDPEMGISGQLTWTRLPQGFKNSPTLFNEALHRDLAGFRIQHPDLILLQYVDDLLLAATSELDCQQGTRALLQTLGDLGYRASAKKAQICQKQVKYLGYLLKEGQRWLTEARKETVMGQPIPKTPRQLREFLGKAGFCRLFIPGFAEMAAPLYPLTKPGTLFNWGPDQQKAFQEIKQALLTAPALGLPDLTKPFELFVDEKQGYAKGVLTQKLGPWRRPVAYLSKKLDPVAAGWPPCLRMVAAIAVLTKDAGKLTMGQPLVILAPHAVEALVKQPPDRWLSNARMTHYQALLLDTDRVQFGPVVALNPATLLPLPEEGLQHDCLDILAEAHGTRSDLMDQPLPDADHTWYTDGSSFLQEGQRKAGAAVTTETEVIWARALPAGTSAQRAELIALTQALKMAEGKKLNVYTDSRYAFATAHIHGEIYRRRGWLTSEGKEIKNKDEILALLKALFLPKRLSIIHCPGHQKGNSAEARGNRMADQAAREVATRETPETSTLLAGKRTADGSEFEKRTADGSEFESPKKKAKVE

SEQ ID NO: 2303 - protein, 2115 aa, synthetic construct
MPAAKRVKLDGGDKKYSIGLDIGTNSVGWAVITDEYKVPSKKFKVLGNTDRHSIKKNLIGALLFDSGETAEATRLKRTARRRYTRRKNRICYLQEIFSNEMAKVDDSFFHRLEESFLVEEDKKHERHPIFGNIVDEVAYHEKYPTIYHLRKKLVDSTDKADLRLIYLALAHMIKFRGHFLIEGDLNPDNSDVDKLFIQLVQTYNQLFEENPINASGVDAKAILSARLSKSRRLENLIAQLPGEKKNGLFGNLIALSLGLTPNFKSNFDLAEDAKLQLSKDTYDDDLDNLLAQIGDQYADLFLAAKNLSDAILLSDILRVNTEITKAPLSASMIKRYDEHHQDLTLLKALVRQQLPEKYKEIFFDQSKNGYAGYIDGGASQEEFYKFIKPILEKMDGTEELLVKLNREDLLRKQRTFDNGSIPHQIHLGELHAILRRQEDFYPFLKDNREKIEKILTFRIPYYVGPLARGNSRFAWMTRKSEETITPWNFEEVVDKGASAQSFIERMTNFDKNLPNEKVLPKHSLLYEYFTVYNELTKVKYVTEGMRKPAFLSGEQKKAIVDLLFKTNRKVTVKQLKEDYFKKIECFDSVEISGVEDRFNASLGTYHDLLKIIKDKDFLDNEENEDILEDIVLTLTLFEDREMIEERLKTYAHLFDDKVMKQLKRRRYTGWGRLSRKLINGIRDKQSGKTILDFLKSDGFANRNFMQLIHDDSLTFKEDIQKAQVSGQGDSLHEHIANLAGSPAIKKGILQTVKVVDELVKVMGRHKPENIVIEMARENQTTQKGQKNSRERMKRIEEGIKELGSQILKEHPVENTQLQNEKLYLYYLQNGRDMYVDQELDINRLSDYDVDHIVPQSFLKDDSIDNKVLTRSDKARGKSDNVPSEEVVKKMKNYWRQLLNAKLITQRKFDNLTKAERGGLSELDKAGFIKRQLVETRQITKHVAQILDSRMNTKYDENDKLIREVKVITLKSKLVSDFRKDFQFYKVREINNYHHAHDAYLNAVVGTALIKKYPKLESEFVYGDYKVYDVRKMIAKSEQEIGKATAKYFFYSNIMNFFKTEITLANGEIRKRPLIETNGETGEIVWDKGRDFATVRKVLSMPQVNIVKKTEVQTGGFSKESILPKRNSDKLIARKKDWDPKKYGGFDSPTVAYSVLVVAKVEKGKSKKLKSVKELLGITIMERSSFEKNPIDFLEAKGYKEVKKDLIIKLPKYSLFELENGRKRMLASAGELQKGNELALPSKYVNFLYLASHYEKLKGSPEDNEQKQLFVEQHKHYLDEIIEQISEFSKRVILADANLDKVLSAYNKHRDKPIREQAENIIHLFTLTNLGAPAAFKYFDTTIDRKRYTSTKEVLDATLIHQSITGLYETRIDLSQLGGDGGGGGGSGGGGSGGGGSGGGGSGGGGSGGGGSGGTLNIEDEYRLHETSKEPDVSLGSTWLSDFPQAWAETGGMGLAVRQAPLIIPLKATSTPVSIKQYPMSQEARLGIKPHIQRLLDQGILVPCQSPWNTPLLPVKKPGTNDYRPVQDLREVNKRVEDIHPTVPNPYNLLSGLPPSHQWYTVLDLKDAFFCLRLHPTSQPLFAFEWRDPEMGISGQLTWTRLPQGFKNSPTLFNEALHRDLAGFRIQHPDLILLQYVDDLLLAATSELDCQQGTRALLQTLGDLGYRASAKKAQICQKQVKYLGYLLKEGQRWLTEARKETVMGQPIPKTPRQLREFLGKAGFCRLFIPGFAEMAAPLYPLTKPGTLFNWGPDQQKAFQEIKQALLTAPALGLPDLTKPFELFVDEKQGYAKGVLTQKLGPWRRPVAYLSKKLDPVAAGWPPCLRMVAAIAVLTKDAGKLTMGQPLVILAPHAVEALVKQPPDRWLSNARMTHYQALLLDTDRVQFGPVVALNPATLLPLPEEGLQHDCLDILAEAHGTRSDLMDQPLPDADHTWYTDGSSFLQEGQRKAGAAVTTETEVIWARALPAGTSAQRAELIALTQALKMAEGKKLNVYTDSRYAFATAHIHGEIYRRRGWLTSEGKEIKNKDEILALLKALFLPKRLSIIHCPGHQKGNSAEARGNRMADQAAREVATRETPETSTLLAGKRTADGSEFEKRTADGSEFESPKKKAKVE

SEQ ID NO: 2304 - protein, 2103 aa, synthetic construct
MPAAKRVKLDGGDKKYSIGLDIGTNSVGWAVITDEYKVPSKKFKVLGNTDRHSIKKNLIGALLFDSGETAEATRLKRTARRRYTRRKNRICYLQEIFSNEMAKVDDSFFHRLEESFLVEEDKKHERHPIFGNIVDEVAYHEKYPTIYHLRKKLVDSTDKADLRLIYLALAHMIKFRGHFLIEGDLNPDNSDVDKLFIQLVQTYNQLFEENPINASGVDAKAILSARLSKSRRLENLIAQLPGEKKNGLFGNLIALSLGLTPNFKSNFDLAEDAKLQLSKDTYDDDLDNLLAQIGDQYADLFLAAKNLSDAILLSDILRVNTEITKAPLSASMIKRYDEHHQDLTLLKALVRQQLPEKYKEIFFDQSKNGYAGYIDGGASQEEFYKFIKPILEKMDGTEELLVKLNREDLLRKQRTFDNGSIPHQIHLGELHAILRRQEDFYPFLKDNREKIEKILTFRIPYYVGPLARGNSRFAWMTRKSEETITPWNFEEVVDKGASAQSFIERMTNFDKNLPNEKVLPKHSLLYEYFTVYNELTKVKYVTEGMRKPAFLSGEQKKAIVDLLFKTNRKVTVKQLKEDYFKKIECFDSVEISGVEDRFNASLGTYHDLLKIIKDKDFLDNEENEDILEDIVLTLTLFEDREMIEERLKTYAHLFDDKVMKQLKRRRYTGWGRLSRKLINGIRDKQSGKTILDFLKSDGFANRNFMQLIHDDSLTFKEDIQKAQVSGQGDSLHEHIANLAGSPAIKKGILQTVKVVDELVKVMGRHKPENIVIEMARENQTTQKGQKNSRERMKRIEEGIKELGSQILKEHPVENTQLQNEKLYLYYLQNGRDMYVDQELDINRLSDYDVDHIVPQSFLKDDSIDNKVLTRSDKARGKSDNVPSEEVVKKMKNYWRQLLNAKLITQRKFDNLTKAERGGLSELDKAGFIKRQLVETRQITKHVAQILDSRMNTKYDENDKLIREVKVITLKSKLVSDFRKDFQFYKVREINNYHHAHDAYLNAVVGTALIKKYPKLESEFVYGDYKVYDVRKMIAKSEQEIGKATAKYFFYSNIMNFFKTEITLANGEIRKRPLIETNGETGEIVWDKGRDFATVRKVLSMPQVNIVKKTEVQTGGFSKESILPKRNSDKLIARKKDWDPKKYGGFDSPTVAYSVLVVAKVEKGKSKKLKSVKELLGITIMERSSFEKNPIDFLEAKGYKEVKKDLIIKLPKYSLFELENGRKRMLASAGELQKGNELALPSKYVNFLYLASHYEKLKGSPEDNEQKQLFVEQHKHYLDEIIEQISEFSKRVILADANLDKVLSAYNKHRDKPIREQAENIIHLFTLTNLGAPAAFKYFDTTIDRKRYTSTKEVLDATLIHQSITGLYETRIDLSQLGGDGGGSSGSSGSSGSSGSSGSSGGTLNIEDEYRLHETSKEPDVSLGSTWLSDFPQAWAETGGMGLAVRQAPLIIPLKATSTPVSIKQYPMSQEARLGIKPHIQRLLDQGILVPCQSPWNTPLLPVKKPGTNDYRPVQDLREVNKRVEDIHPTVPNPYNLLSGLPPSHQWYTVLDLKDAFFCLRLHPTSQPLFAFEWRDPEMGISGQLTWTRLPQGFKNSPTLFNEALHRDLAGFRIQHPDLILLQYVDDLLLAATSELDCQQGTRALLQTLGDLGYRASAKKAQICQKQVKYLGYLLKEGQRWLTEARKETVMGQPIPKTPRQLREFLGKAGFCRLFIPGFAEMAAPLYPLTKPGTLFNWGPDQQKAFQEIKQALLTAPALGLPDLTKPFELFVDEKQGYAKGVLTQKLGPWRRPVAYLSKKLDPVAAGWPPCLRMVAAIAVLTKDAGKLTMGQPLVILAPHAVEALVKQPPDRWLSNARMTHYQALLLDTDRVQFGPVVALNPATLLPLPEEGLQHDCLDILAEAHGTRSDLMDQPLPDADHTWYTDGSSFLQEGQRKAGAAVTTETEVIWARALPAGTSAQRAELIALTQALKMAEGKKLNVYTDSRYAFATAHIHGEIYRRRGWLTSEGKEIKNKDEILALLKALFLPKRLSIIHCPGHQKGNSAEARGNRMADQAAREVATRETPETSTLLAGKRTADGSEFEKRTADGSEFESPKKKAKVE

SEQ ID NO: 2305 - protein, 2100 aa, synthetic construct
MPAAKRVKLDGGDKKYSIGLDIGTNSVGWAVITDEYKVPSKKFKVLGNTDRHSIKKNLIGALLFDSGETAEATRLKRTARRRYTRRKNRICYLQEIFSNEMAKVDDSFFHRLEESFLVEEDKKHERHPIFGNIVDEVAYHEKYPTIYHLRKKLVDSTDKADLRLIYLALAHMIKFRGHFLIEGDLNPDNSDVDKLFIQLVQTYNQLFEENPINASGVDAKAILSARLSKSRRLENLIAQLPGEKKNGLFGNLIALSLGLTPNFKSNFDLAEDAKLQLSKDTYDDDLDNLLAQIGDQYADLFLAAKNLSDAILLSDILRVNTEITKAPLSASMIKRYDEHHQDLTLLKALVRQQLPEKYKEIFFDQSKNGYAGYIDGGASQEEFYKFIKPILEKMDGTEELLVKLNREDLLRKQRTFDNGSIPHQIHLGELHAILRRQEDFYPFLKDNREKIEKILTFRIPYYVGPLARGNSRFAWMTRKSEETITPWNFEEVVDKGASAQSFIERMTNFDKNLPNEKVLPKHSLLYEYFTVYNELTKVKYVTEGMRKPAFLSGEQKKAIVDLLFKTNRKVTVKQLKEDYFKKIECFDSVEISGVEDRFNASLGTYHDLLKIIKDKDFLDNEENEDILEDIVLTLTLFEDREMIEERLKTYAHLFDDKVMKQLKRRRYTGWGRLSRKLINGIRDKQSGKTILDFLKSDGFANRNFMQLIHDDSLTFKEDIQKAQVSGQGDSLHEHIANLAGSPAIKKGILQTVKVVDELVKVMGRHKPENIVIEMARENQTTQKGQKNSRERMKRIEEGIKELGSQILKEHPVENTQLQNEKLYLYYLQNGRDMYVDQELDINRLSDYDVDHIVPQSFLKDDSIDNKVLTRSDKARGKSDNVPSEEVVKKMKNYWRQLLNAKLITQRKFDNLTKAERGGLSELDKAGFIKRQLVETRQITKHVAQILDSRMNTKYDENDKLIREVKVITLKSKLVSDFRKDFQFYKVREINNYHHAHDAYLNAVVGTALIKKYPKLESEFVYGDYKVYDVRKMIAKSEQEIGKATAKYFFYSNIMNFFKTEITLANGEIRKRPLIETNGETGEIVWDKGRDFATVRKVLSMPQVNIVKKTEVQTGGFSKESILPKRNSDKLIARKKDWDPKKYGGFDSPTVAYSVLVVAKVEKGKSKKLKSVKELLGITIMERSSFEKNPIDFLEAKGYKEVKKDLIIKLPKYSLFELENGRKRMLASAGELQKGNELALPSKYVNFLYLASHYEKLKGSPEDNEQKQLFVEQHKHYLDEIIEQISEFSKRVILADANLDKVLSAYNKHRDKPIREQAENIIHLFTLTNLGAPAAFKYFDTTIDRKRYTSTKEVLDATLIHQSITGLYETRIDLSQLGGDGGEAAAKGGGGSEAAAKGGTLNIEDEYRLHETSKEPDVSLGSTWLSDFPQAWAETGGMGLAVRQAPLIIPLKATSTPVSIKQYPMSQEARLGIKPHIQRLLDQGILVPCQSPWNTPLLPVKKPGTNDYRPVQDLREVNKRVEDIHPTVPNPYNLLSGLPPSHQWYTVLDLKDAFFCLRLHPTSQPLFAFEWRDPEMGISGQLTWTRLPQGFKNSPTLFNEALHRDLAGFRIQHPDLILLQYVDDLLLAATSELDCQQGTRALLQTLGDLGYRASAKKAQICQKQVKYLGYLLKEGQRWLTEARKETVMGQPIPKTPRQLREFLGKAGFCRLFIPGFAEMAAPLYPLTKPGTLFNWGPDQQKAFQEIKQALLTAPALGLPDLTKPFELFVDEKQGYAKGVLTQKLGPWRRPVAYLSKKLDPVAAGWPPCLRMVAAIAVLTKDAGKLTMGQPLVILAPHAVEALVKQPPDRWLSNARMTHYQALLLDTDRVQFGPVVALNPATLLPLPEEGLQHDCLDILAEAHGTRSDLMDQPLPDADHTWYTDGSSFLQEGQRKAGAAVTTETEVIWARALPAGTSAQRAELIALTQALKMAEGKKLNVYTDSRYAFATAHIHGEIYRRRGWLTSEGKEIKNKDEILALLKALFLPKRLSIIHCPGHQKGNSAEARGNRMADQAAREVATRETPETSTLLAGKRTADGSEFEKRTADGSEFESPKKKAKVE

SEQ ID NO: 2306 - protein, 2096 aa, synthetic construct
MPAAKRVKLDGGDKKYSIGLDIGTNSVGWAVITDEYKVPSKKFKVLGNTDRHSIKKNLIGALLFDSGETAEATRLKRTARRRYTRRKNRICYLQEIFSNEMAKVDDSFFHRLEESFLVEEDKKHERHPIFGNIVDEVAYHEKYPTIYHLRKKLVDSTDKADLRLIYLALAHMIKFRGHFLIEGDLNPDNSDVDKLFIQLVQTYNQLFEENPINASGVDAKAILSARLSKSRRLENLIAQLPGEKKNGLFGNLIALSLGLTPNFKSNFDLAEDAKLQLSKDTYDDDLDNLLAQIGDQYADLFLAAKNLSDAILLSDILRVNTEITKAPLSASMIKRYDEHHQDLTLLKALVRQQLPEKYKEIFFDQSKNGYAGYIDGGASQEEFYKFIKPILEKMDGTEELLVKLNREDLLRKQRTFDNGSIPHQIHLGELHAILRRQEDFYPFLKDNREKIEKILTFRIPYYVGPLARGNSRFAWMTRKSEETITPWNFEEVVDKGASAQSFIERMTNFDKNLPNEKVLPKHSLLYEYFTVYNELTKVKYVTEGMRKPAFLSGEQKKAIVDLLFKTNRKVTVKQLKEDYFKKIECFDSVEISGVEDRFNASLGTYHDLLKIIKDKDFLDNEENEDILEDIVLTLTLFEDREMIEERLKTYAHLFDDKVMKQLKRRRYTGWGRLSRKLINGIRDKQSGKTILDFLKSDGFANRNFMQLIHDDSLTFKEDIQKAQVSGQGDSLHEHIANLAGSPAIKKGILQTVKVVDELVKVMGRHKPENIVIEMARENQTTQKGQKNSRERMKRIEEGIKELGSQILKEHPVENTQLQNEKLYLYYLQNGRDMYVDQELDINRLSDYDVDHIVPQSFLKDDSIDNKVLTRSDKARGKSDNVPSEEVVKKMKNYWRQLLNAKLITQRKFDNLTKAERGGLSELDKAGFIKRQLVETRQITKHVAQILDSRMNTKYDENDKLIREVKVITLKSKLVSDFRKDFQFYKVREINNYHHAHDAYLNAVVGTALIKKYPKLESEFVYGDYKVYDVRKMIAKSEQEIGKATAKYFFYSNIMNFFKTEITLANGEIRKRPLIETNGETGEIVWDKGRDFATVRKVLSMPQVNIVKKTEVQTGGFSKESILPKRNSDKLIARKKDWDPKKYGGFDSPTVAYSVLVVAKVEKGKSKKLKSVKELLGITIMERSSFEKNPIDFLEAKGYKEVKKDLIIKLPKYSLFELENGRKRMLASAGELQKGNELALPSKYVNFLYLASHYEKLKGSPEDNEQKQLFVEQHKHYLDEIIEQISEFSKRVILADANLDKVLSAYNKHRDKPIREQAENIIHLFTLTNLGAPAAFKYFDTTIDRKRYTSTKEVLDATLIHQSITGLYETRIDLSQLGGDGGGGGEAAAKGGSGGTLNIEDEYRLHETSKEPDVSLGSTWLSDFPQAWAETGGMGLAVRQAPLIIPLKATSTPVSIKQYPMSQEARLGIKPHIQRLLDQGILVPCQSPWNTPLLPVKKPGTNDYRPVQDLREVNKRVEDIHPTVPNPYNLLSGLPPSHQWYTVLDLKDAFFCLRLHPTSQPLFAFEWRDPEMGISGQLTWTRLPQGFKNSPTLFNEALHRDLAGFRIQHPDLILLQYVDDLLLAATSELDCQQGTRALLQTLGDLGYRASAKKAQICQKQVKYLGYLLKEGQRWLTEARKETVMGQPIPKTPRQLREFLGKAGFCRLFIPGFAEMAAPLYPLTKPGTLFNWGPDQQKAFQEIKQALLTAPALGLPDLTKPFELFVDEKQGYAKGVLTQKLGPWRRPVAYLSKKLDPVAAGWPPCLRMVAAIAVLTKDAGKLTMGQPLVILAPHAVEALVKQPPDRWLSNARMTHYQALLLDTDRVQFGPVVALNPATLLPLPEEGLQHDCLDILAEAHGTRSDLMDQPLPDADHTWYTDGSSFLQEGQRKAGAAVTTETEVIWARALPAGTSAQRAELIALTQALKMAEGKKLNVYTDSRYAFATAHIHGEIYRRRGWLTSEGKEIKNKDEILALLKALFLPKRLSIIHCPGHQKGNSAEARGNRMADQAAREVATRETPETSTLLAGKRTADGSEFEKRTADGSEFESPKKKAKVE

SEQ ID NO: 2307 - protein, 2092 aa, synthetic construct
MPAAKRVKLDGGDKKYSIGLDIGTNSVGWAVITDEYKVPSKKFKVLGNTDRHSIKKNLIGALLFDSGETAEATRLKRTARRRYTRRKNRICYLQEIFSNEMAKVDDSFFHRLEESFLVEEDKKHERHPIFGNIVDEVAYHEKYPTIYHLRKKLVDSTDKADLRLIYLALAHMIKFRGHFLIEGDLNPDNSDVDKLFIQLVQTYNQLFEENPINASGVDAKAILSARLSKSRRLENLIAQLPGEKKNGLFGNLIALSLGLTPNFKSNFDLAEDAKLQLSKDTYDDDLDNLLAQIGDQYADLFLAAKNLSDAILLSDILRVNTEITKAPLSASMIKRYDEHHQDLTLLKALVRQQLPEKYKEIFFDQSKNGYAGYIDGGASQEEFYKFIKPILEKMDGTEELLVKLNREDLLRKQRTFDNGSIPHQIHLGELHAILRRQEDFYPFLKDNREKIEKILTFRIPYYVGPLARGNSRFAWMTRKSEETITPWNFEEVVDKGASAQSFIERMTNFDKNLPNEKVLPKHSLLYEYFTVYNELTKVKYVTEGMRKPAFLSGEQKKAIVDLLFKTNRKVTVKQLKEDYFKKIECFDSVEISGVEDRFNASLGTYHDLLKIIKDKDFLDNEENEDILEDIVLTLTLFEDREMIEERLKTYAHLFDDKVMKQLKRRRYTGWGRLSRKLINGIRDKQSGKTILDFLKSDGFANRNFMQLIHDDSLTFKEDIQKAQVSGQGDSLHEHIANLAGSPAIKKGILQTVKVVDELVKVMGRHKPENIVIEMARENQTTQKGQKNSRERMKRIEEGIKELGSQILKEHPVENTQLQNEKLYLYYLQNGRDMYVDQELDINRLSDYDVDHIVPQSFLKDDSIDNKVLTRSDKARGKSDNVPSEEVVKKMKNYWRQLLNAKLITQRKFDNLTKAERGGLSELDKAGFIKRQLVETRQITKHVAQILDSRMNTKYDENDKLIREVKVITLKSKLVSDFRKDFQFYKVREINNYHHAHDAYLNAVVGTALIKKYPKLESEFVYGDYKVYDVRKMIAKSEQEIGKATAKYFFYSNIMNFFKTEITLANGEIRKRPLIETNGETGEIVWDKGRDFATVRKVLSMPQVNIVKKTEVQTGGFSKESILPKRNSDKLIARKKDWDPKKYGGFDSPTVAYSVLVVAKVEKGKSKKLKSVKELLGITIMERSSFEKNPIDFLEAKGYKEVKKDLIIKLPKYSLFELENGRKRMLASAGELQKGNELALPSKYVNFLYLASHYEKLKGSPEDNEQKQLFVEQHKHYLDEIIEQISEFSKRVILADANLDKVLSAYNKHRDKPIREQAENIIHLFTLTNLGAPAAFKYFDTTIDRKRYTSTKEVLDATLIHQSITGLYETRIDLSQLGGDGGGGGGGGGGGTLNIEDEYRLHETSKEPDVSLGSTWLSDFPQAWAETGGMGLAVRQAPLIIPLKATSTPVSIKQYPMSQEARLGIKPHIQRLLDQGILVPCQSPWNTPLLPVKKPGTNDYRPVQDLREVNKRVEDIHPTVPNPYNLLSGLPPSHQWYTVLDLKDAFFCLRLHPTSQPLFAFEWRDPEMGISGQLTWTRLPQGFKNSPTLFNEALHRDLAGFRIQHPDLILLQYVDDLLLAATSELDCQQGTRALLQTLGDLGYRASAKKAQICQKQVKYLGYLLKEGQRWLTEARKETVMGQPIPKTPRQLREFLGKAGFCRLFIPGFAEMAAPLYPLTKPGTLFNWGPDQQKAFQEIKQALLTAPALGLPDLTKPFELFVDEKQGYAKGVLTQKLGPWRRPVAYLSKKLDPVAAGWPPCLRMVAAIAVLTKDAGKLTMGQPLVILAPHAVEALVKQPPDRWLSNARMTHYQALLLDTDRVQFGPVVALNPATLLPLPEEGLQHDCLDILAEAHGTRSDLMDQPLPDADHTWYTDGSSFLQEGQRKAGAAVTTETEVIWARALPAGTSAQRAELIALTQALKMAEGKKLNVYTDSRYAFATAHIHGEIYRRRGWLTSEGKEIKNKDEILALLKALFLPKRLSIIHCPGHQKGNSAEARGNRMADQAAREVATRETPETSTLLAGKRTADGSEFEKRTADGSEFESPKKKAKVE

SEQ ID NO: 2308 - protein, 2094 aa, synthetic construct
MPAAKRVKLDGGDKKYSIGLDIGTNSVGWAVITDEYKVPSKKFKVLGNTDRHSIKKNLIGALLFDSGETAEATRLKRTARRRYTRRKNRICYLQEIFSNEMAKVDDSFFHRLEESFLVEEDKKHERHPIFGNIVDEVAYHEKYPTIYHLRKKLVDSTDKADLRLIYLALAHMIKFRGHFLIEGDLNPDNSDVDKLFIQLVQTYNQLFEENPINASGVDAKAILSARLSKSRRLENLIAQLPGEKKNGLFGNLIALSLGLTPNFKSNFDLAEDAKLQLSKDTYDDDLDNLLAQIGDQYADLFLAAKNLSDAILLSDILRVNTEITKAPLSASMIKRYDEHHQDLTLLKALVRQQLPEKYKEIFFDQSKNGYAGYIDGGASQEEFYKFIKPILEKMDGTEELLVKLNREDLLRKQRTFDNGSIPHQIHLGELHAILRRQEDFYPFLKDNREKIEKILTFRIPYYVGPLARGNSRFAWMTRKSEETITPWNFEEVVDKGASAQSFIERMTNFDKNLPNEKVLPKHSLLYEYFTVYNELTKVKYVTEGMRKPAFLSGEQKKAIVDLLFKTNRKVTVKQLKEDYFKKIECFDSVEISGVEDRFNASLGTYHDLLKIIKDKDFLDNEENEDILEDIVLTLTLFEDREMIEERLKTYAHLFDDKVMKQLKRRRYTGWGRLSRKLINGIRDKQSGKTILDFLKSDGFANRNFMQLIHDDSLTFKEDIQKAQVSGQGDSLHEHIANLAGSPAIKKGILQTVKVVDELVKVMGRHKPENIVIEMARENQTTQKGQKNSRERMKRIEEGIKELGSQILKEHPVENTQLQNEKLYLYYLQNGRDMYVDQELDINRLSDYDVDHIVPQSFLKDDSIDNKVLTRSDKARGKSDNVPSEEVVKKMKNYWRQLLNAKLITQRKFDNLTKAERGGLSELDKAGFIKRQLVETRQITKHVAQILDSRMNTKYDENDKLIREVKVITLKSKLVSDFRKDFQFYKVREINNYHHAHDAYLNAVVGTALIKKYPKLESEFVYGDYKVYDVRKMIAKSEQEIGKATAKYFFYSNIMNFFKTEITLANGEIRKRPLIETNGETGEIVWDKGRDFATVRKVLSMPQVNIVKKTEVQTGGFSKESILPKRNSDKLIARKKDWDPKKYGGFDSPTVAYSVLVVAKVEKGKSKKLKSVKELLGITIMERSSFEKNPIDFLEAKGYKEVKKDLIIKLPKYSLFELENGRKRMLASAGELQKGNELALPSKYVNFLYLASHYEKLKGSPEDNEQKQLFVEQHKHYLDEIIEQISEFSKRVILADANLDKVLSAYNKHRDKPIREQAENIIHLFTLTNLGAPAAFKYFDTTIDRKRYTSTKEVLDATLIHQSITGLYETRIDLSQLGGDGGPAPGGGGSSGGTLNIEDEYRLHETSKEPDVSLGSTWLSDFPQAWAETGGMGLAVRQAPLIIPLKATSTPVSIKQYPMSQEARLGIKPHIQRLLDQGILVPCQSPWNTPLLPVKKPGTNDYRPVQDLREVNKRVEDIHPTVPNPYNLLSGLPPSHQWYTVLDLKDAFFCLRLHPTSQPLFAFEWRDPEMGISGQLTWTRLPQGFKNSPTLFNEALHRDLAGFRIQHPDLILLQYVDDLLLAATSELDCQQGTRALLQTLGDLGYRASAKKAQICQKQVKYLGYLLKEGQRWLTEARKETVMGQPIPKTPRQLREFLGKAGFCRLFIPGFAEMAAPLYPLTKPGTLFNWGPDQQKAFQEIKQALLTAPALGLPDLTKPFELFVDEKQGYAKGVLTQKLGPWRRPVAYLSKKLDPVAAGWPPCLRMVAAIAVLTKDAGKLTMGQPLVILAPHAVEALVKQPPDRWLSNARMTHYQALLLDTDRVQFGPVVALNPATLLPLPEEGLQHDCLDILAEAHGTRSDLMDQPLPDADHTWYTDGSSFLQEGQRKAGAAVTTETEVIWARALPAGTSAQRAELIALTQALKMAEGKKLNVYTDSRYAFATAHIHGEIYRRRGWLTSEGKEIKNKDEILALLKALFLPKRLSIIHCPGHQKGNSAEARGNRMADQAAREVATRETPETSTLLAGKRTADGSEFEKRTADGSEFESPKKKAKVE

SEQ ID NO: 2309 - protein, 2098 aa, synthetic construct
MPAAKRVKLDGGDKKYSIGLDIGTNSVGWAVITDEYKVPSKKFKVLGNTDRHSIKKNLIGALLFDSGETAEATRLKRTARRRYTRRKNRICYLQEIFSNEMAKVDDSFFHRLEESFLVEEDKKHERHPIFGNIVDEVAYHEKYPTIYHLRKKLVDSTDKADLRLIYLALAHMIKFRGHFLIEGDLNPDNSDVDKLFIQLVQTYNQLFEENPINASGVDAKAILSARLSKSRRLENLIAQLPGEKKNGLFGNLIALSLGLTPNFKSNFDLAEDAKLQLSKDTYDDDLDNLLAQIGDQYADLFLAAKNLSDAILLSDILRVNTEITKAPLSASMIKRYDEHHQDLTLLKALVRQQLPEKYKEIFFDQSKNGYAGYIDGGASQEEFYKFIKPILEKMDGTEELLVKLNREDLLRKQRTFDNGSIPHQIHLGELHAILRRQEDFYPFLKDNREKIEKILTFRIPYYVGPLARGNSRFAWMTRKSEETITPWNFEEVVDKGASAQSFIERMTNFDKNLPNEKVLPKHSLLYEYFTVYNELTKVKYVTEGMRKPAFLSGEQKKAIVDLLFKTNRKVTVKQLKEDYFKKIECFDSVEISGVEDRFNASLGTYHDLLKIIKDKDFLDNEENEDILEDIVLTLTLFEDREMIEERLKTYAHLFDDKVMKQLKRRRYTGWGRLSRKLINGIRDKQSGKTILDFLKSDGFANRNFMQLIHDDSLTFKEDIQKAQVSGQGDSLHEHIANLAGSPAIKKGILQTVKVVDELVKVMGRHKPENIVIEMARENQTTQKGQKNSRERMKRIEEGIKELGSQILKEHPVENTQLQNEKLYLYYLQNGRDMYVDQELDINRLSDYDVDHIVPQSFLKDDSIDNKVLTRSDKARGKSDNVPSEEVVKKMKNYWRQLLNAKLITQRKFDNLTKAERGGLSELDKAGFIKRQLVETRQITKHVAQILDSRMNTKYDENDKLIREVKVITLKSKLVSDFRKDFQFYKVREINNYHHAHDAYLNAVVGTALIKKYPKLESEFVYGDYKVYDVRKMIAKSEQEIGKATAKYFFYSNIMNFFKTEITLANGEIRKRPLIETNGETGEIVWDKGRDFATVRKVLSMPQVNIVKKTEVQTGGFSKESILPKRNSDKLIARKKDWDPKKYGGFDSPTVAYSVLVVAKVEKGKSKKLKSVKELLGITIMERSSFEKNPIDFLEAKGYKEVKKDLIIKLPKYSLFELENGRKRMLASAGELQKGNELALPSKYVNFLYLASHYEKLKGSPEDNEQKQLFVEQHKHYLDEIIEQISEFSKRVILADANLDKVLSAYNKHRDKPIREQAENIIHLFTLTNLGAPAAFKYFDTTIDRKRYTSTKEVLDATLIHQSITGLYETRIDLSQLGGDGGPAPAPAPAPAPAPGGTLNIEDEYRLHETSKEPDVSLGSTWLSDFPQAWAETGGMGLAVRQAPLIIPLKATSTPVSIKQYPMSQEARLGIKPHIQRLLDQGILVPCQSPWNTPLLPVKKPGTNDYRPVQDLREVNKRVEDIHPTVPNPYNLLSGLPPSHQWYTVLDLKDAFFCLRLHPTSQPLFAFEWRDPEMGISGQLTWTRLPQGFKNSPTLFNEALHRDLAGFRIQHPDLILLQYVDDLLLAATSELDCQQGTRALLQTLGDLGYRASAKKAQICQKQVKYLGYLLKEGQRWLTEARKETVMGQPIPKTPRQLREFLGKAGFCRLFIPGFAEMAAPLYPLTKPGTLFNWGPDQQKAFQEIKQALLTAPALGLPDLTKPFELFVDEKQGYAKGVLTQKLGPWRRPVAYLSKKLDPVAAGWPPCLRMVAAIAVLTKDAGKLTMGQPLVILAPHAVEALVKQPPDRWLSNARMTHYQALLLDTDRVQFGPVVALNPATLLPLPEEGLQHDCLDILAEAHGTRSDLMDQPLPDADHTWYTDGSSFLQEGQRKAGAAVTTETEVIWARALPAGTSAQRAELIALTQALKMAEGKKLNVYTDSRYAFATAHIHGEIYRRRGWLTSEGKEIKNKDEILALLKALFLPKRLSIIHCPGHQKGNSAEARGNRMADQAAREVATRETPETSTLLAGKRTADGSEFEKRTADGSEFESPKKKAKVE

SEQ ID NO: 2310 - protein, 2100 aa, synthetic construct
MPAAKRVKLDGGDKKYSIGLDIGTNSVGWAVITDEYKVPSKKFKVLGNTDRHSIKKNLIGALLFDSGETAEATRLKRTARRRYTRRKNRICYLQEIFSNEMAKVDDSFFHRLEESFLVEEDKKHERHPIFGNIVDEVAYHEKYPTIYHLRKKLVDSTDKADLRLIYLALAHMIKFRGHFLIEGDLNPDNSDVDKLFIQLVQTYNQLFEENPINASGVDAKAILSARLSKSRRLENLIAQLPGEKKNGLFGNLIALSLGLTPNFKSNFDLAEDAKLQLSKDTYDDDLDNLLAQIGDQYADLFLAAKNLSDAILLSDILRVNTEITKAPLSASMIKRYDEHHQDLTLLKALVRQQLPEKYKEIFFDQSKNGYAGYIDGGASQEEFYKFIKPILEKMDGTEELLVKLNREDLLRKQRTFDNGSIPHQIHLGELHAILRRQEDFYPFLKDNREKIEKILTFRIPYYVGPLARGNSRFAWMTRKSEETITPWNFEEVVDKGASAQSFIERMTNFDKNLPNEKVLPKHSLLYEYFTVYNELTKVKYVTEGMRKPAFLSGEQKKAIVDLLFKTNRKVTVKQLKEDYFKKIECFDSVEISGVEDRFNASLGTYHDLLKIIKDKDFLDNEENEDILEDIVLTLTLFEDREMIEERLKTYAHLFDDKVMKQLKRRRYTGWGRLSRKLINGIRDKQSGKTILDFLKSDGFANRNFMQLIHDDSLTFKEDIQKAQVSGQGDSLHEHIANLAGSPAIKKGILQTVKVVDELVKVMGRHKPENIVIEMARENQTTQKGQKNSRERMKRIEEGIKELGSQILKEHPVENTQLQNEKLYLYYLQNGRDMYVDQELDINRLSDYDVDHIVPQSFLKDDSIDNKVLTRSDKARGKSDNVPSEEVVKKMKNYWRQLLNAKLITQRKFDNLTKAERGGLSELDKAGFIKRQLVETRQITKHVAQILDSRMNTKYDENDKLIREVKVITLKSKLVSDFRKDFQFYKVREINNYHHAHDAYLNAVVGTALIKKYPKLESEFVYGDYKVYDVRKMIAKSEQEIGKATAKYFFYSNIMNFFKTEITLANGEIRKRPLIETNGETGEIVWDKGRDFATVRKVLSMPQVNIVKKTEVQTGGFSKESILPKRNSDKLIARKKDWDPKKYGGFDSPTVAYSVLVVAKVEKGKSKKLKSVKELLGITIMERSSFEKNPIDFLEAKGYKEVKKDLIIKLPKYSLFELENGRKRMLASAGELQKGNELALPSKYVNFLYLASHYEKLKGSPEDNEQKQLFVEQHKHYLDEIIEQISEFSKRVILADANLDKVLSAYNKHRDKPIREQAENIIHLFTLTNLGAPAAFKYFDTTIDRKRYTSTKEVLDATLIHQSITGLYETRIDLSQLGGDGGGGSGGSGGSGGSGGSGGTLNIEDEYRLHETSKEPDVSLGSTWLSDFPQAWAETGGMGLAVRQAPLIIPLKATSTPVSIKQYPMSQEARLGIKPHIQRLLDQGILVPCQSPWNTPLLPVKKPGTNDYRPVQDLREVNKRVEDIHPTVPNPYNLLSGLPPSHQWYTVLDLKDAFFCLRLHPTSQPLFAFEWRDPEMGISGQLTWTRLPQGFKNSPTLFNEALHRDLAGFRIQHPDLILLQYVDDLLLAATSELDCQQGTRALLQTLGDLGYRASAKKAQICQKQVKYLGYLLKEGQRWLTEARKETVMGQPIPKTPRQLREFLGKAGFCRLFIPGFAEMAAPLYPLTKPGTLFNWGPDQQKAFQEIKQALLTAPALGLPDLTKPFELFVDEKQGYAKGVLTQKLGPWRRPVAYLSKKLDPVAAGWPPCLRMVAAIAVLTKDAGKLTMGQPLVILAPHAVEALVKQPPDRWLSNARMTHYQALLLDTDRVQFGPVVALNPATLLPLPEEGLQHDCLDILAEAHGTRSDLMDQPLPDADHTWYTDGSSFLQEGQRKAGAAVTTETEVIWARALPAGTSAQRAELIALTQALKMAEGKKLNVYTDSRYAFATAHIHGEIYRRRGWLTSEGKEIKNKDEILALLKALFLPKRLSIIHCPGHQKGNSAEARGNRMADQAAREVATRETPETSTLLAGKRTADGSEFEKRTADGSEFESPKKKAKVE

SEQ ID NO: 2311 - protein, 2105 aa, synthetic construct
MPAAKRVKLDGGDKKYSIGLDIGTNSVGWAVITDEYKVPSKKFKVLGNTDRHSIKKNLIGALLFDSGETAEATRLKRTARRRYTRRKNRICYLQEIFSNEMAKVDDSFFHRLEESFLVEEDKKHERHPIFGNIVDEVAYHEKYPTIYHLRKKLVDSTDKADLRLIYLALAHMIKFRGHFLIEGDLNPDNSDVDKLFIQLVQTYNQLFEENPINASGVDAKAILSARLSKSRRLENLIAQLPGEKKNGLFGNLIALSLGLTPNFKSNFDLAEDAKLQLSKDTYDDDLDNLLAQIGDQYADLFLAAKNLSDAILLSDILRVNTEITKAPLSASMIKRYDEHHQDLTLLKALVRQQLPEKYKEIFFDQSKNGYAGYIDGGASQEEFYKFIKPILEKMDGTEELLVKLNREDLLRKQRTFDNGSIPHQIHLGELHAILRRQEDFYPFLKDNREKIEKILTFRIPYYVGPLARGNSRFAWMTRKSEETITPWNFEEVVDKGASAQSFIERMTNFDKNLPNEKVLPKHSLLYEYFTVYNELTKVKYVTEGMRKPAFLSGEQKKAIVDLLFKTNRKVTVKQLKEDYFKKIECFDSVEISGVEDRFNASLGTYHDLLKIIKDKDFLDNEENEDILEDIVLTLTLFEDREMIEERLKTYAHLFDDKVMKQLKRRRYTGWGRLSRKLINGIRDKQSGKTILDFLKSDGFANRNFMQLIHDDSLTFKEDIQKAQVSGQGDSLHEHIANLAGSPAIKKGILQTVKVVDELVKVMGRHKPENIVIEMARENQTTQKGQKNSRERMKRIEEGIKELGSQILKEHPVENTQLQNEKLYLYYLQNGRDMYVDQELDINRLSDYDVDHIVPQSFLKDDSIDNKVLTRSDKARGKSDNVPSEEVVKKMKNYWRQLLNAKLITQRKFDNLTKAERGGLSELDKAGFIKRQLVETRQITKHVAQILDSRMNTKYDENDKLIREVKVITLKSKLVSDFRKDFQFYKVREINNYHHAHDAYLNAVVGTALIKKYPKLESEFVYGDYKVYDVRKMIAKSEQEIGKATAKYFFYSNIMNFFKTEITLANGEIRKRPLIETNGETGEIVWDKGRDFATVRKVLSMPQVNIVKKTEVQTGGFSKESILPKRNSDKLIARKKDWDPKKYGGFDSPTVAYSVLVVAKVEKGKSKKLKSVKELLGITIMERSSFEKNPIDFLEAKGYKEVKKDLIIKLPKYSLFELENGRKRMLASAGELQKGNELALPSKYVNFLYLASHYEKLKGSPEDNEQKQLFVEQHKHYLDEIIEQISEFSKRVILADANLDKVLSAYNKHRDKPIREQAENIIHLFTLTNLGAPAAFKYFDTTIDRKRYTSTKEVLDATLIHQSITGLYETRIDLSQLGGDGGGGGGSGGGGSGGGGSGGGGSGGTLNIEDEYRLHETSKEPDVSLGSTWLSDFPQAWAETGGMGLAVRQAPLIIPLKATSTPVSIKQYPMSQEARLGIKPHIQRLLDQGILVPCQSPWNTPLLPVKKPGTNDYRPVQDLREVNKRVEDIHPTVPNPYNLLSGLPPSHQWYTVLDLKDAFFCLRLHPTSQPLFAFEWRDPEMGISGQLTWTRLPQGFKNSPTLFNEALHRDLAGFRIQHPDLILLQYVDDLLLAATSELDCQQGTRALLQTLGDLGYRASAKKAQICQKQVKYLGYLLKEGQRWLTEARKETVMGQPIPKTPRQLREFLGKAGFCRLFIPGFAEMAAPLYPLTKPGTLFNWGPDQQKAFQEIKQALLTAPALGLPDLTKPFELFVDEKQGYAKGVLTQKLGPWRRPVAYLSKKLDPVAAGWPPCLRMVAAIAVLTKDAGKLTMGQPLVILAPHAVEALVKQPPDRWLSNARMTHYQALLLDTDRVQFGPVVALNPATLLPLPEEGLQHDCLDILAEAHGTRSDLMDQPLPDADHTWYTDGSSFLQEGQRKAGAAVTTETEVIWARALPAGTSAQRAELIALTQALKMAEGKKLNVYTDSRYAFATAHIHGEIYRRRGWLTSEGKEIKNKDEILALLKALFLPKRLSIIHCPGHQKGNSAEARGNRMADQAAREVATRETPETSTLLAGKRTADGSEFEKRTADGSEFESPKKKAKVE

SEQ ID NO: 2312 - protein, 2094 aa, synthetic construct
MPAAKRVKLDGGDKKYSIGLDIGTNSVGWAVITDEYKVPSKKFKVLGNTDRHSIKKNLIGALLFDSGETAEATRLKRTARRRYTRRKNRICYLQEIFSNEMAKVDDSFFHRLEESFLVEEDKKHERHPIFGNIVDEVAYHEKYPTIYHLRKKLVDSTDKADLRLIYLALAHMIKFRGHFLIEGDLNPDNSDVDKLFIQLVQTYNQLFEENPINASGVDAKAILSARLSKSRRLENLIAQLPGEKKNGLFGNLIALSLGLTPNFKSNFDLAEDAKLQLSKDTYDDDLDNLLAQIGDQYADLFLAAKNLSDAILLSDILRVNTEITKAPLSASMIKRYDEHHQDLTLLKALVRQQLPEKYKEIFFDQSKNGYAGYIDGGASQEEFYKFIKPILEKMDGTEELLVKLNREDLLRKQRTFDNGSIPHQIHLGELHAILRRQEDFYPFLKDNREKIEKILTFRIPYYVGPLARGNSRFAWMTRKSEETITPWNFEEVVDKGASAQSFIERMTNFDKNLPNEKVLPKHSLLYEYFTVYNELTKVKYVTEGMRKPAFLSGEQKKAIVDLLFKTNRKVTVKQLKEDYFKKIECFDSVEISGVEDRFNASLGTYHDLLKIIKDKDFLDNEENEDILEDIVLTLTLFEDREMIEERLKTYAHLFDDKVMKQLKRRRYTGWGRLSRKLINGIRDKQSGKTILDFLKSDGFANRNFMQLIHDDSLTFKEDIQKAQVSGQGDSLHEHIANLAGSPAIKKGILQTVKVVDELVKVMGRHKPENIVIEMARENQTTQKGQKNSRERMKRIEEGIKELGSQILKEHPVENTQLQNEKLYLYYLQNGRDMYVDQELDINRLSDYDVDHIVPQSFLKDDSIDNKVLTRSDKARGKSDNVPSEEVVKKMKNYWRQLLNAKLITQRKFDNLTKAERGGLSELDKAGFIKRQLVETRQITKHVAQILDSRMNTKYDENDKLIREVKVITLKSKLVSDFRKDFQFYKVREINNYHHAHDAYLNAVVGTALIKKYPKLESEFVYGDYKVYDVRKMIAKSEQEIGKATAKYFFYSNIMNFFKTEITLANGEIRKRPLIETNGETGEIVWDKGRDFATVRKVLSMPQVNIVKKTEVQTGGFSKESILPKRNSDKLIARKKDWDPKKYGGFDSPTVAYSVLVVAKVEKGKSKKLKSVKELLGITIMERSSFEKNPIDFLEAKGYKEVKKDLIIKLPKYSLFELENGRKRMLASAGELQKGNELALPSKYVNFLYLASHYEKLKGSPEDNEQKQLFVEQHKHYLDEIIEQISEFSKRVILADANLDKVLSAYNKHRDKPIREQAENIIHLFTLTNLGAPAAFKYFDTTIDRKRYTSTKEVLDATLIHQSITGLYETRIDLSQLGGDGGGGGGGSGSSGGTLNIEDEYRLHETSKEPDVSLGSTWLSDFPQAWAETGGMGLAVRQAPLIIPLKATSTPVSIKQYPMSQEARLGIKPHIQRLLDQGILVPCQSPWNTPLLPVKKPGTNDYRPVQDLREVNKRVEDIHPTVPNPYNLLSGLPPSHQWYTVLDLKDAFFCLRLHPTSQPLFAFEWRDPEMGISGQLTWTRLPQGFKNSPTLFNEALHRDLAGFRIQHPDLILLQYVDDLLLAATSELDCQQGTRALLQTLGDLGYRASAKKAQICQKQVKYLGYLLKEGQRWLTEARKETVMGQPIPKTPRQLREFLGKAGFCRLFIPGFAEMAAPLYPLTKPGTLFNWGPDQQKAFQEIKQALLTAPALGLPDLTKPFELFVDEKQGYAKGVLTQKLGPWRRPVAYLSKKLDPVAAGWPPCLRMVAAIAVLTKDAGKLTMGQPLVILAPHAVEALVKQPPDRWLSNARMTHYQALLLDTDRVQFGPVVALNPATLLPLPEEGLQHDCLDILAEAHGTRSDLMDQPLPDADHTWYTDGSSFLQEGQRKAGAAVTTETEVIWARALPAGTSAQRAELIALTQALKMAEGKKLNVYTDSRYAFATAHIHGEIYRRRGWLTSEGKEIKNKDEILALLKALFLPKRLSIIHCPGHQKGNSAEARGNRMADQAAREVATRETPETSTLLAGKRTADGSEFEKRTADGSEFESPKKKAKVE

SEQ ID NO: 2313 - protein, 2097 aa, synthetic construct
MPAAKRVKLDGGDKKYSIGLDIGTNSVGWAVITDEYKVPSKKFKVLGNTDRHSIKKNLIGALLFDSGETAEATRLKRTARRRYTRRKNRICYLQEIFSNEMAKVDDSFFHRLEESFLVEEDKKHERHPIFGNIVDEVAYHEKYPTIYHLRKKLVDSTDKADLRLIYLALAHMIKFRGHFLIEGDLNPDNSDVDKLFIQLVQTYNQLFEENPINASGVDAKAILSARLSKSRRLENLIAQLPGEKKNGLFGNLIALSLGLTPNFKSNFDLAEDAKLQLSKDTYDDDLDNLLAQIGDQYADLFLAAKNLSDAILLSDILRVNTEITKAPLSASMIKRYDEHHQDLTLLKALVRQQLPEKYKEIFFDQSKNGYAGYIDGGASQEEFYKFIKPILEKMDGTEELLVKLNREDLLRKQRTFDNGSIPHQIHLGELHAILRRQEDFYPFLKDNREKIEKILTFRIPYYVGPLARGNSRFAWMTRKSEETITPWNFEEVVDKGASAQSFIERMTNFDKNLPNEKVLPKHSLLYEYFTVYNELTKVKYVTEGMRKPAFLSGEQKKAIVDLLFKTNRKVTVKQLKEDYFKKIECFDSVEISGVEDRFNASLGTYHDLLKIIKDKDFLDNEENEDILEDIVLTLTLFEDREMIEERLKTYAHLFDDKVMKQLKRRRYTGWGRLSRKLINGIRDKQSGKTILDFLKSDGFANRNFMQLIHDDSLTFKEDIQKAQVSGQGDSLHEHIANLAGSPAIKKGILQTVKVVDELVKVMGRHKPENIVIEMARENQTTQKGQKNSRERMKRIEEGIKELGSQILKEHPVENTQLQNEKLYLYYLQNGRDMYVDQELDINRLSDYDVDHIVPQSFLKDDSIDNKVLTRSDKARGKSDNVPSEEVVKKMKNYWRQLLNAKLITQRKFDNLTKAERGGLSELDKAGFIKRQLVETRQITKHVAQILDSRMNTKYDENDKLIREVKVITLKSKLVSDFRKDFQFYKVREINNYHHAHDAYLNAVVGTALIKKYPKLESEFVYGDYKVYDVRKMIAKSEQEIGKATAKYFFYSNIMNFFKTEITLANGEIRKRPLIETNGETGEIVWDKGRDFATVRKVLSMPQVNIVKKTEVQTGGFSKESILPKRNSDKLIARKKDWDPKKYGGFDSPTVAYSVLVVAKVEKGKSKKLKSVKELLGITIMERSSFEKNPIDFLEAKGYKEVKKDLIIKLPKYSLFELENGRKRMLASAGELQKGNELALPSKYVNFLYLASHYEKLKGSPEDNEQKQLFVEQHKHYLDEIIEQISEFSKRVILADANLDKVLSAYNKHRDKPIREQAENIIHLFTLTNLGAPAAFKYFDTTIDRKRYTSTKEVLDATLIHQSITGLYETRIDLSQLGGDGGGSAGSAAGSGEFGGTLNIEDEYRLHETSKEPDVSLGSTWLSDFPQAWAETGGMGLAVRQAPLIIPLKATSTPVSIKQYPMSQEARLGIKPHIQRLLDQGILVPCQSPWNTPLLPVKKPGTNDYRPVQDLREVNKRVEDIHPTVPNPYNLLSGLPPSHQWYTVLDLKDAFFCLRLHPTSQPLFAFEWRDPEMGISGQLTWTRLPQGFKNSPTLFNEALHRDLAGFRIQHPDLILLQYVDDLLLAATSELDCQQGTRALLQTLGDLGYRASAKKAQICQKQVKYLGYLLKEGQRWLTEARKETVMGQPIPKTPRQLREFLGKAGFCRLFIPGFAEMAAPLYPLTKPGTLFNWGPDQQKAFQEIKQALLTAPALGLPDLTKPFELFVDEKQGYAKGVLTQKLGPWRRPVAYLSKKLDPVAAGWPPCLRMVAAIAVLTKDAGKLTMGQPLVILAPHAVEALVKQPPDRWLSNARMTHYQALLLDTDRVQFGPVVALNPATLLPLPEEGLQHDCLDILAEAHGTRSDLMDQPLPDADHTWYTDGSSFLQEGQRKAGAAVTTETEVIWARALPAGTSAQRAELIALTQALKMAEGKKLNVYTDSRYAFATAHIHGEIYRRRGWLTSEGKEIKNKDEILALLKALFLPKRLSIIHCPGHQKGNSAEARGNRMADQAAREVATRETPETSTLLAGKRTADGSEFEKRTADGSEFESPKKKAKVE

SEQ ID NO: 2314 - protein, 2096 aa, synthetic construct
MPAAKRVKLDGGDKKYSIGLDIGTNSVGWAVITDEYKVPSKKFKVLGNTDRHSIKKNLIGALLFDSGETAEATRLKRTARRRYTRRKNRICYLQEIFSNEMAKVDDSFFHRLEESFLVEEDKKHERHPIFGNIVDEVAYHEKYPTIYHLRKKLVDSTDKADLRLIYLALAHMIKFRGHFLIEGDLNPDNSDVDKLFIQLVQTYNQLFEENPINASGVDAKAILSARLSKSRRLENLIAQLPGEKKNGLFGNLIALSLGLTPNFKSNFDLAEDAKLQLSKDTYDDDLDNLLAQIGDQYADLFLAAKNLSDAILLSDILRVNTEITKAPLSASMIKRYDEHHQDLTLLKALVRQQLPEKYKEIFFDQSKNGYAGYIDGGASQEEFYKFIKPILEKMDGTEELLVKLNREDLLRKQRTFDNGSIPHQIHLGELHAILRRQEDFYPFLKDNREKIEKILTFRIPYYVGPLARGNSRFAWMTRKSEETITPWNFEEVVDKGASAQSFIERMTNFDKNLPNEKVLPKHSLLYEYFTVYNELTKVKYVTEGMRKPAFLSGEQKKAIVDLLFKTNRKVTVKQLKEDYFKKIECFDSVEISGVEDRFNASLGTYHDLLKIIKDKDFLDNEENEDILEDIVLTLTLFEDREMIEERLKTYAHLFDDKVMKQLKRRRYTGWGRLSRKLINGIRDKQSGKTILDFLKSDGFANRNFMQLIHDDSLTFKEDIQKAQVSGQGDSLHEHIANLAGSPAIKKGILQTVKVVDELVKVMGRHKPENIVIEMARENQTTQKGQKNSRERMKRIEEGIKELGSQILKEHPVENTQLQNEKLYLYYLQNGRDMYVDQELDINRLSDYDVDHIVPQSFLKDDSIDNKVLTRSDKARGKSDNVPSEEVVKKMKNYWRQLLNAKLITQRKFDNLTKAERGGLSELDKAGFIKRQLVETRQITKHVAQILDSRMNTKYDENDKLIREVKVITLKSKLVSDFRKDFQFYKVREINNYHHAHDAYLNAVVGTALIKKYPKLESEFVYGDYKVYDVRKMIAKSEQEIGKATAKYFFYSNIMNFFKTEITLANGEIRKRPLIETNGETGEIVWDKGRDFATVRKVLSMPQVNIVKKTEVQTGGFSKESILPKRNSDKLIARKKDWDPKKYGGFDSPTVAYSVLVVAKVEKGKSKKLKSVKELLGITIMERSSFEKNPIDFLEAKGYKEVKKDLIIKLPKYSLFELENGRKRMLASAGELQKGNELALPSKYVNFLYLASHYEKLKGSPEDNEQKQLFVEQHKHYLDEIIEQISEFSKRVILADANLDKVLSAYNKHRDKPIREQAENIIHLFTLTNLGAPAAFKYFDTTIDRKRYTSTKEVLDATLIHQSITGLYETRIDLSQLGGDGGPAPEAAAKGGSGGTLNIEDEYRLHETSKEPDVSLGSTWLSDFPQAWAETGGMGLAVRQAPLIIPLKATSTPVSIKQYPMSQEARLGIKPHIQRLLDQGILVPCQSPWNTPLLPVKKPGTNDYRPVQDLREVNKRVEDIHPTVPNPYNLLSGLPPSHQWYTVLDLKDAFFCLRLHPTSQPLFAFEWRDPEMGISGQLTWTRLPQGFKNSPTLFNEALHRDLAGFRIQHPDLILLQYVDDLLLAATSELDCQQGTRALLQTLGDLGYRASAKKAQICQKQVKYLGYLLKEGQRWLTEARKETVMGQPIPKTPRQLREFLGKAGFCRLFIPGFAEMAAPLYPLTKPGTLFNWGPDQQKAFQEIKQALLTAPALGLPDLTKPFELFVDEKQGYAKGVLTQKLGPWRRPVAYLSKKLDPVAAGWPPCLRMVAAIAVLTKDAGKLTMGQPLVILAPHAVEALVKQPPDRWLSNARMTHYQALLLDTDRVQFGPVVALNPATLLPLPEEGLQHDCLDILAEAHGTRSDLMDQPLPDADHTWYTDGSSFLQEGQRKAGAAVTTETEVIWARALPAGTSAQRAELIALTQALKMAEGKKLNVYTDSRYAFATAHIHGEIYRRRGWLTSEGKEIKNKDEILALLKALFLPKRLSIIHCPGHQKGNSAEARGNRMADQAAREVATRETPETSTLLAGKRTADGSEFEKRTADGSEFESPKKKAKVE

SEQ ID NO: 2315 - protein, 2096 aa, synthetic construct
MPAAKRVKLDGGDKKYSIGLDIGTNSVGWAVITDEYKVPSKKFKVLGNTDRHSIKKNLIGALLFDSGETAEATRLKRTARRRYTRRKNRICYLQEIFSNEMAKVDDSFFHRLEESFLVEEDKKHERHPIFGNIVDEVAYHEKYPTIYHLRKKLVDSTDKADLRLIYLALAHMIKFRGHFLIEGDLNPDNSDVDKLFIQLVQTYNQLFEENPINASGVDAKAILSARLSKSRRLENLIAQLPGEKKNGLFGNLIALSLGLTPNFKSNFDLAEDAKLQLSKDTYDDDLDNLLAQIGDQYADLFLAAKNLSDAILLSDILRVNTEITKAPLSASMIKRYDEHHQDLTLLKALVRQQLPEKYKEIFFDQSKNGYAGYIDGGASQEEFYKFIKPILEKMDGTEELLVKLNREDLLRKQRTFDNGSIPHQIHLGELHAILRRQEDFYPFLKDNREKIEKILTFRIPYYVGPLARGNSRFAWMTRKSEETITPWNFEEVVDKGASAQSFIERMTNFDKNLPNEKVLPKHSLLYEYFTVYNELTKVKYVTEGMRKPAFLSGEQKKAIVDLLFKTNRKVTVKQLKEDYFKKIECFDSVEISGVEDRFNASLGTYHDLLKIIKDKDFLDNEENEDILEDIVLTLTLFEDREMIEERLKTYAHLFDDKVMKQLKRRRYTGWGRLSRKLINGIRDKQSGKTILDFLKSDGFANRNFMQLIHDDSLTFKEDIQKAQVSGQGDSLHEHIANLAGSPAIKKGILQTVKVVDELVKVMGRHKPENIVIEMARENQTTQKGQKNSRERMKRIEEGIKELGSQILKEHPVENTQLQNEKLYLYYLQNGRDMYVDQELDINRLSDYDVDHIVPQSFLKDDSIDNKVLTRSDKARGKSDNVPSEEVVKKMKNYWRQLLNAKLITQRKFDNLTKAERGGLSELDKAGFIKRQLVETRQITKHVAQILDSRMNTKYDENDKLIREVKVITLKSKLVSDFRKDFQFYKVREINNYHHAHDAYLNAVVGTALIKKYPKLESEFVYGDYKVYDVRKMIAKSEQEIGKATAKYFFYSNIMNFFKTEITLANGEIRKRPLIETNGETGEIVWDKGRDFATVRKVLSMPQVNIVKKTEVQTGGFSKESILPKRNSDKLIARKKDWDPKKYGGFDSPTVAYSVLVVAKVEKGKSKKLKSVKELLGITIMERSSFEKNPIDFLEAKGYKEVKKDLIIKLPKYSLFELENGRKRMLASAGELQKGNELALPSKYVNFLYLASHYEKLKGSPEDNEQKQLFVEQHKHYLDEIIEQISEFSKRVILADANLDKVLSAYNKHRDKPIREQAENIIHLFTLTNLGAPAAFKYFDTTIDRKRYTSTKEVLDATLIHQSITGLYETRIDLSQLGGDGGEAAAKPAPGGSGGTLNIEDEYRLHETSKEPDVSLGSTWLSDFPQAWAETGGMGLAVRQAPLIIPLKATSTPVSIKQYPMSQEARLGIKPHIQRLLDQGILVPCQSPWNTPLLPVKKPGTNDYRPVQDLREVNKRVEDIHPTVPNPYNLLSGLPPSHQWYTVLDLKDAFFCLRLHPTSQPLFAFEWRDPEMGISGQLTWTRLPQGFKNSPTLFNEALHRDLAGFRIQHPDLILLQYVDDLLLAATSELDCQQGTRALLQTLGDLGYRASAKKAQICQKQVKYLGYLLKEGQRWLTEARKETVMGQPIPKTPRQLREFLGKAGFCRLFIPGFAEMAAPLYPLTKPGTLFNWGPDQQKAFQEIKQALLTAPALGLPDLTKPFELFVDEKQGYAKGVLTQKLGPWRRPVAYLSKKLDPVAAGWPPCLRMVAAIAVLTKDAGKLTMGQPLVILAPHAVEALVKQPPDRWLSNARMTHYQALLLDTDRVQFGPVVALNPATLLPLPEEGLQHDCLDILAEAHGTRSDLMDQPLPDADHTWYTDGSSFLQEGQRKAGAAVTTETEVIWARALPAGTSAQRAELIALTQALKMAEGKKLNVYTDSRYAFATAHIHGEIYRRRGWLTSEGKEIKNKDEILALLKALFLPKRLSIIHCPGHQKGNSAEARGNRMADQAAREVATRETPETSTLLAGKRTADGSEFEKRTADGSEFESPKKKAKVE

SEQ ID NO: 2316 - protein, 2096 aa, synthetic construct
MPAAKRVKLDGGDKKYSIGLDIGTNSVGWAVITDEYKVPSKKFKVLGNTDRHSIKKNLIGALLFDSGETAEATRLKRTARRRYTRRKNRICYLQEIFSNEMAKVDDSFFHRLEESFLVEEDKKHERHPIFGNIVDEVAYHEKYPTIYHLRKKLVDSTDKADLRLIYLALAHMIKFRGHFLIEGDLNPDNSDVDKLFIQLVQTYNQLFEENPINASGVDAKAILSARLSKSRRLENLIAQLPGEKKNGLFGNLIALSLGLTPNFKSNFDLAEDAKLQLSKDTYDDDLDNLLAQIGDQYADLFLAAKNLSDAILLSDILRVNTEITKAPLSASMIKRYDEHHQDLTLLKALVRQQLPEKYKEIFFDQSKNGYAGYIDGGASQEEFYKFIKPILEKMDGTEELLVKLNREDLLRKQRTFDNGSIPHQIHLGELHAILRRQEDFYPFLKDNREKIEKILTFRIPYYVGPLARGNSRFAWMTRKSEETITPWNFEEVVDKGASAQSFIERMTNFDKNLPNEKVLPKHSLLYEYFTVYNELTKVKYVTEGMRKPAFLSGEQKKAIVDLLFKTNRKVTVKQLKEDYFKKIECFDSVEISGVEDRFNASLGTYHDLLKIIKDKDFLDNEENEDILEDIVLTLTLFEDREMIEERLKTYAHLFDDKVMKQLKRRRYTGWGRLSRKLINGIRDKQSGKTILDFLKSDGFANRNFMQLIHDDSLTFKEDIQKAQVSGQGDSLHEHIANLAGSPAIKKGILQTVKVVDELVKVMGRHKPENIVIEMARENQTTQKGQKNSRERMKRIEEGIKELGSQILKEHPVENTQLQNEKLYLYYLQNGRDMYVDQELDINRLSDYDVDHIVPQSFLKDDSIDNKVLTRSDKARGKSDNVPSEEVVKKMKNYWRQLLNAKLITQRKFDNLTKAERGGLSELDKAGFIKRQLVETRQITKHVAQILDSRMNTKYDENDKLIREVKVITLKSKLVSDFRKDFQFYKVREINNYHHAHDAYLNAVVGTALIKKYPKLESEFVYGDYKVYDVRKMIAKSEQEIGKATAKYFFYSNIMNFFKTEITLANGEIRKRPLIETNGETGEIVWDKGRDFATVRKVLSMPQVNIVKKTEVQTGGFSKESILPKRNSDKLIARKKDWDPKKYGGFDSPTVAYSVLVVAKVEKGKSKKLKSVKELLGITIMERSSFEKNPIDFLEAKGYKEVKKDLIIKLPKYSLFELENGRKRMLASAGELQKGNELALPSKYVNFLYLASHYEKLKGSPEDNEQKQLFVEQHKHYLDEIIEQISEFSKRVILADANLDKVLSAYNKHRDKPIREQAENIIHLFTLTNLGAPAAFKYFDTTIDRKRYTSTKEVLDATLIHQSITGLYETRIDLSQLGGDGGGGGEAAAKGSSGGTLNIEDEYRLHETSKEPDVSLGSTWLSDFPQAWAETGGMGLAVRQAPLIIPLKATSTPVSIKQYPMSQEARLGIKPHIQRLLDQGILVPCQSPWNTPLLPVKKPGTNDYRPVQDLREVNKRVEDIHPTVPNPYNLLSGLPPSHQWYTVLDLKDAFFCLRLHPTSQPLFAFEWRDPEMGISGQLTWTRLPQGFKNSPTLFNEALHRDLAGFRIQHPDLILLQYVDDLLLAATSELDCQQGTRALLQTLGDLGYRASAKKAQICQKQVKYLGYLLKEGQRWLTEARKETVMGQPIPKTPRQLREFLGKAGFCRLFIPGFAEMAAPLYPLTKPGTLFNWGPDQQKAFQEIKQALLTAPALGLPDLTKPFELFVDEKQGYAKGVLTQKLGPWRRPVAYLSKKLDPVAAGWPPCLRMVAAIAVLTKDAGKLTMGQPLVILAPHAVEALVKQPPDRWLSNARMTHYQALLLDTDRVQFGPVVALNPATLLPLPEEGLQHDCLDILAEAHGTRSDLMDQPLPDADHTWYTDGSSFLQEGQRKAGAAVTTETEVIWARALPAGTSAQRAELIALTQALKMAEGKKLNVYTDSRYAFATAHIHGEIYRRRGWLTSEGKEIKNKDEILALLKALFLPKRLSIIHCPGHQKGNSAEARGNRMADQAAREVATRETPETSTLLAGKRTADGSEFEKRTADGSEFESPKKKAKVE

SEQ ID NO: 2317 - protein, 2094 aa, synthetic construct
MPAAKRVKLDGGDKKYSIGLDIGTNSVGWAVITDEYKVPSKKFKVLGNTDRHSIKKNLIGALLFDSGETAEATRLKRTARRRYTRRKNRICYLQEIFSNEMAKVDDSFFHRLEESFLVEEDKKHERHPIFGNIVDEVAYHEKYPTIYHLRKKLVDSTDKADLRLIYLALAHMIKFRGHFLIEGDLNPDNSDVDKLFIQLVQTYNQLFEENPINASGVDAKAILSARLSKSRRLENLIAQLPGEKKNGLFGNLIALSLGLTPNFKSNFDLAEDAKLQLSKDTYDDDLDNLLAQIGDQYADLFLAAKNLSDAILLSDILRVNTEITKAPLSASMIKRYDEHHQDLTLLKALVRQQLPEKYKEIFFDQSKNGYAGYIDGGASQEEFYKFIKPILEKMDGTEELLVKLNREDLLRKQRTFDNGSIPHQIHLGELHAILRRQEDFYPFLKDNREKIEKILTFRIPYYVGPLARGNSRFAWMTRKSEETITPWNFEEVVDKGASAQSFIERMTNFDKNLPNEKVLPKHSLLYEYFTVYNELTKVKYVTEGMRKPAFLSGEQKKAIVDLLFKTNRKVTVKQLKEDYFKKIECFDSVEISGVEDRFNASLGTYHDLLKIIKDKDFLDNEENEDILEDIVLTLTLFEDREMIEERLKTYAHLFDDKVMKQLKRRRYTGWGRLSRKLINGIRDKQSGKTILDFLKSDGFANRNFMQLIHDDSLTFKEDIQKAQVSGQGDSLHEHIANLAGSPAIKKGILQTVKVVDELVKVMGRHKPENIVIEMARENQTTQKGQKNSRERMKRIEEGIKELGSQILKEHPVENTQLQNEKLYLYYLQNGRDMYVDQELDINRLSDYDVDHIVPQSFLKDDSIDNKVLTRSDKARGKSDNVPSEEVVKKMKNYWRQLLNAKLITQRKFDNLTKAERGGLSELDKAGFIKRQLVETRQITKHVAQILDSRMNTKYDENDKLIREVKVITLKSKLVSDFRKDFQFYKVREINNYHHAHDAYLNAVVGTALIKKYPKLESEFVYGDYKVYDVRKMIAKSEQEIGKATAKYFFYSNIMNFFKTEITLANGEIRKRPLIETNGETGEIVWDKGRDFATVRKVLSMPQVNIVKKTEVQTGGFSKESILPKRNSDKLIARKKDWDPKKYGGFDSPTVAYSVLVVAKVEKGKSKKLKSVKELLGITIMERSSFEKNPIDFLEAKGYKEVKKDLIIKLPKYSLFELENGRKRMLASAGELQKGNELALPSKYVNFLYLASHYEKLKGSPEDNEQKQLFVEQHKHYLDEIIEQISEFSKRVILADANLDKVLSAYNKHRDKPIREQAENIIHLFTLTNLGAPAAFKYFDTTIDRKRYTSTKEVLDATLIHQSITGLYETRIDLSQLGGDGGGGSGGGPAPGGTLNIEDEYRLHETSKEPDVSLGSTWLSDFPQAWAETGGMGLAVRQAPLIIPLKATSTPVSIKQYPMSQEARLGIKPHIQRLLDQGILVPCQSPWNTPLLPVKKPGTNDYRPVQDLREVNKRVEDIHPTVPNPYNLLSGLPPSHQWYTVLDLKDAFFCLRLHPTSQPLFAFEWRDPEMGISGQLTWTRLPQGFKNSPTLFNEALHRDLAGFRIQHPDLILLQYVDDLLLAATSELDCQQGTRALLQTLGDLGYRASAKKAQICQKQVKYLGYLLKEGQRWLTEARKETVMGQPIPKTPRQLREFLGKAGFCRLFIPGFAEMAAPLYPLTKPGTLFNWGPDQQKAFQEIKQALLTAPALGLPDLTKPFELFVDEKQGYAKGVLTQKLGPWRRPVAYLSKKLDPVAAGWPPCLRMVAAIAVLTKDAGKLTMGQPLVILAPHAVEALVKQPPDRWLSNARMTHYQALLLDTDRVQFGPVVALNPATLLPLPEEGLQHDCLDILAEAHGTRSDLMDQPLPDADHTWYTDGSSFLQEGQRKAGAAVTTETEVIWARALPAGTSAQRAELIALTQALKMAEGKKLNVYTDSRYAFATAHIHGEIYRRRGWLTSEGKEIKNKDEILALLKALFLPKRLSIIHCPGHQKGNSAEARGNRMADQAAREVATRETPETSTLLAGKRTADGSEFEKRTADGSEFESPKKKAKVE

SEQ ID NO: 2318 - protein, 2094 aa, synthetic construct
MPAAKRVKLDGGDKKYSIGLDIGTNSVGWAVITDEYKVPSKKFKVLGNTDRHSIKKNLIGALLFDSGETAEATRLKRTARRRYTRRKNRICYLQEIFSNEMAKVDDSFFHRLEESFLVEEDKKHERHPIFGNIVDEVAYHEKYPTIYHLRKKLVDSTDKADLRLIYLALAHMIKFRGHFLIEGDLNPDNSDVDKLFIQLVQTYNQLFEENPINASGVDAKAILSARLSKSRRLENLIAQLPGEKKNGLFGNLIALSLGLTPNFKSNFDLAEDAKLQLSKDTYDDDLDNLLAQIGDQYADLFLAAKNLSDAILLSDILRVNTEITKAPLSASMIKRYDEHHQDLTLLKALVRQQLPEKYKEIFFDQSKNGYAGYIDGGASQEEFYKFIKPILEKMDGTEELLVKLNREDLLRKQRTFDNGSIPHQIHLGELHAILRRQEDFYPFLKDNREKIEKILTFRIPYYVGPLARGNSRFAWMTRKSEETITPWNFEEVVDKGASAQSFIERMTNFDKNLPNEKVLPKHSLLYEYFTVYNELTKVKYVTEGMRKPAFLSGEQKKAIVDLLFKTNRKVTVKQLKEDYFKKIECFDSVEISGVEDRFNASLGTYHDLLKIIKDKDFLDNEENEDILEDIVLTLTLFEDREMIEERLKTYAHLFDDKVMKQLKRRRYTGWGRLSRKLINGIRDKQSGKTILDFLKSDGFANRNFMQLIHDDSLTFKEDIQKAQVSGQGDSLHEHIANLAGSPAIKKGILQTVKVVDELVKVMGRHKPENIVIEMARENQTTQKGQKNSRERMKRIEEGIKELGSQILKEHPVENTQLQNEKLYLYYLQNGRDMYVDQELDINRLSDYDVDHIVPQSFLKDDSIDNKVLTRSDKARGKSDNVPSEEVVKKMKNYWRQLLNAKLITQRKFDNLTKAERGGLSELDKAGFIKRQLVETRQITKHVAQILDSRMNTKYDENDKLIREVKVITLKSKLVSDFRKDFQFYKVREINNYHHAHDAYLNAVVGTALIKKYPKLESEFVYGDYKVYDVRKMIAKSEQEIGKATAKYFFYSNIMNFFKTEITLANGEIRKRPLIETNGETGEIVWDKGRDFATVRKVLSMPQVNIVKKTEVQTGGFSKESILPKRNSDKLIARKKDWDPKKYGGFDSPTVAYSVLVVAKVEKGKSKKLKSVKELLGITIMERSSFEKNPIDFLEAKGYKEVKKDLIIKLPKYSLFELENGRKRMLASAGELQKGNELALPSKYVNFLYLASHYEKLKGSPEDNEQKQLFVEQHKHYLDEIIEQISEFSKRVILADANLDKVLSAYNKHRDKPIREQAENIIHLFTLTNLGAPAAFKYFDTTIDRKRYTSTKEVLDATLIHQSITGLYETRIDLSQLGGDGGPAPAPAPAPGGTLNIEDEYRLHETSKEPDVSLGSTWLSDFPQAWAETGGMGLAVRQAPLIIPLKATSTPVSIKQYPMSQEARLGIKPHIQRLLDQGILVPCQSPWNTPLLPVKKPGTNDYRPVQDLREVNKRVEDIHPTVPNPYNLLSGLPPSHQWYTVLDLKDAFFCLRLHPTSQPLFAFEWRDPEMGISGQLTWTRLPQGFKNSPTLFNEALHRDLAGFRIQHPDLILLQYVDDLLLAATSELDCQQGTRALLQTLGDLGYRASAKKAQICQKQVKYLGYLLKEGQRWLTEARKETVMGQPIPKTPRQLREFLGKAGFCRLFIPGFAEMAAPLYPLTKPGTLFNWGPDQQKAFQEIKQALLTAPALGLPDLTKPFELFVDEKQGYAKGVLTQKLGPWRRPVAYLSKKLDPVAAGWPPCLRMVAAIAVLTKDAGKLTMGQPLVILAPHAVEALVKQPPDRWLSNARMTHYQALLLDTDRVQFGPVVALNPATLLPLPEEGLQHDCLDILAEAHGTRSDLMDQPLPDADHTWYTDGSSFLQEGQRKAGAAVTTETEVIWARALPAGTSAQRAELIALTQALKMAEGKKLNVYTDSRYAFATAHIHGEIYRRRGWLTSEGKEIKNKDEILALLKALFLPKRLSIIHCPGHQKGNSAEARGNRMADQAAREVATRETPETSTLLAGKRTADGSEFEKRTADGSEFESPKKKAKVE

SEQ ID NO: 2319 - protein, 2097 aa, synthetic construct
MPAAKRVKLDGGDKKYSIGLDIGTNSVGWAVITDEYKVPSKKFKVLGNTDRHSIKKNLIGALLFDSGETAEATRLKRTARRRYTRRKNRICYLQEIFSNEMAKVDDSFFHRLEESFLVEEDKKHERHPIFGNIVDEVAYHEKYPTIYHLRKKLVDSTDKADLRLIYLALAHMIKFRGHFLIEGDLNPDNSDVDKLFIQLVQTYNQLFEENPINASGVDAKAILSARLSKSRRLENLIAQLPGEKKNGLFGNLIALSLGLTPNFKSNFDLAEDAKLQLSKDTYDDDLDNLLAQIGDQYADLFLAAKNLSDAILLSDILRVNTEITKAPLSASMIKRYDEHHQDLTLLKALVRQQLPEKYKEIFFDQSKNGYAGYIDGGASQEEFYKFIKPILEKMDGTEELLVKLNREDLLRKQRTFDNGSIPHQIHLGELHAILRRQEDFYPFLKDNREKIEKILTFRIPYYVGPLARGNSRFAWMTRKSEETITPWNFEEVVDKGASAQSFIERMTNFDKNLPNEKVLPKHSLLYEYFTVYNELTKVKYVTEGMRKPAFLSGEQKKAIVDLLFKTNRKVTVKQLKEDYFKKIECFDSVEISGVEDRFNASLGTYHDLLKIIKDKDFLDNEENEDILEDIVLTLTLFEDREMIEERLKTYAHLFDDKVMKQLKRRRYTGWGRLSRKLINGIRDKQSGKTILDFLKSDGFANRNFMQLIHDDSLTFKEDIQKAQVSGQGDSLHEHIANLAGSPAIKKGILQTVKVVDELVKVMGRHKPENIVIEMARENQTTQKGQKNSRERMKRIEEGIKELGSQILKEHPVENTQLQNEKLYLYYLQNGRDMYVDQELDINRLSDYDVDHIVPQSFLKDDSIDNKVLTRSDKARGKSDNVPSEEVVKKMKNYWRQLLNAKLITQRKFDNLTKAERGGLSELDKAGFIKRQLVETRQITKHVAQILDSRMNTKYDENDKLIREVKVITLKSKLVSDFRKDFQFYKVREINNYHHAHDAYLNAVVGTALIKKYPKLESEFVYGDYKVYDVRKMIAKSEQEIGKATAKYFFYSNIMNFFKTEITLANGEIRKRPLIETNGETGEIVWDKGRDFATVRKVLSMPQVNIVKKTEVQTGGFSKESILPKRNSDKLIARKKDWDPKKYGGFDSPTVAYSVLVVAKVEKGKSKKLKSVKELLGITIMERSSFEKNPIDFLEAKGYKEVKKDLIIKLPKYSLFELENGRKRMLASAGELQKGNELALPSKYVNFLYLASHYEKLKGSPEDNEQKQLFVEQHKHYLDEIIEQISEFSKRVILADANLDKVLSAYNKHRDKPIREQAENIIHLFTLTNLGAPAAFKYFDTTIDRKRYTSTKEVLDATLIHQSITGLYETRIDLSQLGGDGGGGSGGSGGSGGSGGTLNIEDEYRLHETSKEPDVSLGSTWLSDFPQAWAETGGMGLAVRQAPLIIPLKATSTPVSIKQYPMSQEARLGIKPHIQRLLDQGILVPCQSPWNTPLLPVKKPGTNDYRPVQDLREVNKRVEDIHPTVPNPYNLLSGLPPSHQWYTVLDLKDAFFCLRLHPTSQPLFAFEWRDPEMGISGQLTWTRLPQGFKNSPTLFNEALHRDLAGFRIQHPDLILLQYVDDLLLAATSELDCQQGTRALLQTLGDLGYRASAKKAQICQKQVKYLGYLLKEGQRWLTEARKETVMGQPIPKTPRQLREFLGKAGFCRLFIPGFAEMAAPLYPLTKPGTLFNWGPDQQKAFQEIKQALLTAPALGLPDLTKPFELFVDEKQGYAKGVLTQKLGPWRRPVAYLSKKLDPVAAGWPPCLRMVAAIAVLTKDAGKLTMGQPLVILAPHAVEALVKQPPDRWLSNARMTHYQALLLDTDRVQFGPVVALNPATLLPLPEEGLQHDCLDILAEAHGTRSDLMDQPLPDADHTWYTDGSSFLQEGQRKAGAAVTTETEVIWARALPAGTSAQRAELIALTQALKMAEGKKLNVYTDSRYAFATAHIHGEIYRRRGWLTSEGKEIKNKDEILALLKALFLPKRLSIIHCPGHQKGNSAEARGNRMADQAAREVATRETPETSTLLAGKRTADGSEFEKRTADGSEFESPKKKAKVE

SEQ ID NO: 2320 - protein, 2094 aa, synthetic construct
MPAAKRVKLDGGDKKYSIGLDIGTNSVGWAVITDEYKVPSKKFKVLGNTDRHSIKKNLIGALLFDSGETAEATRLKRTARRRYTRRKNRICYLQEIFSNEMAKVDDSFFHRLEESFLVEEDKKHERHPIFGNIVDEVAYHEKYPTIYHLRKKLVDSTDKADLRLIYLALAHMIKFRGHFLIEGDLNPDNSDVDKLFIQLVQTYNQLFEENPINASGVDAKAILSARLSKSRRLENLIAQLPGEKKNGLFGNLIALSLGLTPNFKSNFDLAEDAKLQLSKDTYDDDLDNLLAQIGDQYADLFLAAKNLSDAILLSDILRVNTEITKAPLSASMIKRYDEHHQDLTLLKALVRQQLPEKYKEIFFDQSKNGYAGYIDGGASQEEFYKFIKPILEKMDGTEELLVKLNREDLLRKQRTFDNGSIPHQIHLGELHAILRRQEDFYPFLKDNREKIEKILTFRIPYYVGPLARGNSRFAWMTRKSEETITPWNFEEVVDKGASAQSFIERMTNFDKNLPNEKVLPKHSLLYEYFTVYNELTKVKYVTEGMRKPAFLSGEQKKAIVDLLFKTNRKVTVKQLKEDYFKKIECFDSVEISGVEDRFNASLGTYHDLLKIIKDKDFLDNEENEDILEDIVLTLTLFEDREMIEERLKTYAHLFDDKVMKQLKRRRYTGWGRLSRKLINGIRDKQSGKTILDFLKSDGFANRNFMQLIHDDSLTFKEDIQKAQVSGQGDSLHEHIANLAGSPAIKKGILQTVKVVDELVKVMGRHKPENIVIEMARENQTTQKGQKNSRERMKRIEEGIKELGSQILKEHPVENTQLQNEKLYLYYLQNGRDMYVDQELDINRLSDYDVDHIVPQSFLKDDSIDNKVLTRSDKARGKSDNVPSEEVVKKMKNYWRQLLNAKLITQRKFDNLTKAERGGLSELDKAGFIKRQLVETRQITKHVAQILDSRMNTKYDENDKLIREVKVITLKSKLVSDFRKDFQFYKVREINNYHHAHDAYLNAVVGTALIKKYPKLESEFVYGDYKVYDVRKMIAKSEQEIGKATAKYFFYSNIMNFFKTEITLANGEIRKRPLIETNGETGEIVWDKGRDFATVRKVLSMPQVNIVKKTEVQTGGFSKESILPKRNSDKLIARKKDWDPKKYGGFDSPTVAYSVLVVAKVEKGKSKKLKSVKELLGITIMERSSFEKNPIDFLEAKGYKEVKKDLIIKLPKYSLFELENGRKRMLASAGELQKGNELALPSKYVNFLYLASHYEKLKGSPEDNEQKQLFVEQHKHYLDEIIEQISEFSKRVILADANLDKVLSAYNKHRDKPIREQAENIIHLFTLTNLGAPAAFKYFDTTIDRKRYTSTKEVLDATLIHQSITGLYETRIDLSQLGGDGGGGGPAPGGSGGTLNIEDEYRLHETSKEPDVSLGSTWLSDFPQAWAETGGMGLAVRQAPLIIPLKATSTPVSIKQYPMSQEARLGIKPHIQRLLDQGILVPCQSPWNTPLLPVKKPGTNDYRPVQDLREVNKRVEDIHPTVPNPYNLLSGLPPSHQWYTVLDLKDAFFCLRLHPTSQPLFAFEWRDPEMGISGQLTWTRLPQGFKNSPTLFNEALHRDLAGFRIQHPDLILLQYVDDLLLAATSELDCQQGTRALLQTLGDLGYRASAKKAQICQKQVKYLGYLLKEGQRWLTEARKETVMGQPIPKTPRQLREFLGKAGFCRLFIPGFAEMAAPLYPLTKPGTLFNWGPDQQKAFQEIKQALLTAPALGLPDLTKPFELFVDEKQGYAKGVLTQKLGPWRRPVAYLSKKLDPVAAGWPPCLRMVAAIAVLTKDAGKLTMGQPLVILAPHAVEALVKQPPDRWLSNARMTHYQALLLDTDRVQFGPVVALNPATLLPLPEEGLQHDCLDILAEAHGTRSDLMDQPLPDADHTWYTDGSSFLQEGQRKAGAAVTTETEVIWARALPAGTSAQRAELIALTQALKMAEGKKLNVYTDSRYAFATAHIHGEIYRRRGWLTSEGKEIKNKDEILALLKALFLPKRLSIIHCPGHQKGNSAEARGNRMADQAAREVATRETPETSTLLAGKRTADGSEFEKRTADGSEFESPKKKAKVE

SEQ ID NO: 2321 - protein, 2094 aa, synthetic construct
MPAAKRVKLDGGDKKYSIGLDIGTNSVGWAVITDEYKVPSKKFKVLGNTDRHSIKKNLIGALLFDSGETAEATRLKRTARRRYTRRKNRICYLQEIFSNEMAKVDDSFFHRLEESFLVEEDKKHERHPIFGNIVDEVAYHEKYPTIYHLRKKLVDSTDKADLRLIYLALAHMIKFRGHFLIEGDLNPDNSDVDKLFIQLVQTYNQLFEENPINASGVDAKAILSARLSKSRRLENLIAQLPGEKKNGLFGNLIALSLGLTPNFKSNFDLAEDAKLQLSKDTYDDDLDNLLAQIGDQYADLFLAAKNLSDAILLSDILRVNTEITKAPLSASMIKRYDEHHQDLTLLKALVRQQLPEKYKEIFFDQSKNGYAGYIDGGASQEEFYKFIKPILEKMDGTEELLVKLNREDLLRKQRTFDNGSIPHQIHLGELHAILRRQEDFYPFLKDNREKIEKILTFRIPYYVGPLARGNSRFAWMTRKSEETITPWNFEEVVDKGASAQSFIERMTNFDKNLPNEKVLPKHSLLYEYFTVYNELTKVKYVTEGMRKPAFLSGEQKKAIVDLLFKTNRKVTVKQLKEDYFKKIECFDSVEISGVEDRFNASLGTYHDLLKIIKDKDFLDNEENEDILEDIVLTLTLFEDREMIEERLKTYAHLFDDKVMKQLKRRRYTGWGRLSRKLINGIRDKQSGKTILDFLKSDGFANRNFMQLIHDDSLTFKEDIQKAQVSGQGDSLHEHIANLAGSPAIKKGILQTVKVVDELVKVMGRHKPENIVIEMARENQTTQKGQKNSRERMKRIEEGIKELGSQILKEHPVENTQLQNEKLYLYYLQNGRDMYVDQELDINRLSDYDVDHIVPQSFLKDDSIDNKVLTRSDKARGKSDNVPSEEVVKKMKNYWRQLLNAKLITQRKFDNLTKAERGGLSELDKAGFIKRQLVETRQITKHVAQILDSRMNTKYDENDKLIREVKVITLKSKLVSDFRKDFQFYKVREINNYHHAHDAYLNAVVGTALIKKYPKLESEFVYGDYKVYDVRKMIAKSEQEIGKATAKYFFYSNIMNFFKTEITLANGEIRKRPLIETNGETGEIVWDKGRDFATVRKVLSMPQVNIVKKTEVQTGGFSKESILPKRNSDKLIARKKDWDPKKYGGFDSPTVAYSVLVVAKVEKGKSKKLKSVKELLGITIMERSSFEKNPIDFLEAKGYKEVKKDLIIKLPKYSLFELENGRKRMLASAGELQKGNELALPSKYVNFLYLASHYEKLKGSPEDNEQKQLFVEQHKHYLDEIIEQISEFSKRVILADANLDKVLSAYNKHRDKPIREQAENIIHLFTLTNLGAPAAFKYFDTTIDRKRYTSTKEVLDATLIHQSITGLYETRIDLSQLGGDGGPAPGGSGSSGGTLNIEDEYRLHETSKEPDVSLGSTWLSDFPQAWAETGGMGLAVRQAPLIIPLKATSTPVSIKQYPMSQEARLGIKPHIQRLLDQGILVPCQSPWNTPLLPVKKPGTNDYRPVQDLREVNKRVEDIHPTVPNPYNLLSGLPPSHQWYTVLDLKDAFFCLRLHPTSQPLFAFEWRDPEMGISGQLTWTRLPQGFKNSPTLFNEALHRDLAGFRIQHPDLILLQYVDDLLLAATSELDCQQGTRALLQTLGDLGYRASAKKAQICQKQVKYLGYLLKEGQRWLTEARKETVMGQPIPKTPRQLREFLGKAGFCRLFIPGFAEMAAPLYPLTKPGTLFNWGPDQQKAFQEIKQALLTAPALGLPDLTKPFELFVDEKQGYAKGVLTQKLGPWRRPVAYLSKKLDPVAAGWPPCLRMVAAIAVLTKDAGKLTMGQPLVILAPHAVEALVKQPPDRWLSNARMTHYQALLLDTDRVQFGPVVALNPATLLPLPEEGLQHDCLDILAEAHGTRSDLMDQPLPDADHTWYTDGSSFLQEGQRKAGAAVTTETEVIWARALPAGTSAQRAELIALTQALKMAEGKKLNVYTDSRYAFATAHIHGEIYRRRGWLTSEGKEIKNKDEILALLKALFLPKRLSIIHCPGHQKGNSAEARGNRMADQAAREVATRETPETSTLLAGKRTADGSEFEKRTADGSEFESPKKKAKVE

SEQ ID NO: 2322 - protein, 2115 aa, synthetic construct
MPAAKRVKLDGGDKKYSIGLDIGTNSVGWAVITDEYKVPSKKFKVLGNTDRHSIKKNLIGALLFDSGETAEATRLKRTARRRYTRRKNRICYLQEIFSNEMAKVDDSFFHRLEESFLVEEDKKHERHPIFGNIVDEVAYHEKYPTIYHLRKKLVDSTDKADLRLIYLALAHMIKFRGHFLIEGDLNPDNSDVDKLFIQLVQTYNQLFEENPINASGVDAKAILSARLSKSRRLENLIAQLPGEKKNGLFGNLIALSLGLTPNFKSNFDLAEDAKLQLSKDTYDDDLDNLLAQIGDQYADLFLAAKNLSDAILLSDILRVNTEITKAPLSASMIKRYDEHHQDLTLLKALVRQQLPEKYKEIFFDQSKNGYAGYIDGGASQEEFYKFIKPILEKMDGTEELLVKLNREDLLRKQRTFDNGSIPHQIHLGELHAILRRQEDFYPFLKDNREKIEKILTFRIPYYVGPLARGNSRFAWMTRKSEETITPWNFEEVVDKGASAQSFIERMTNFDKNLPNEKVLPKHSLLYEYFTVYNELTKVKYVTEGMRKPAFLSGEQKKAIVDLLFKTNRKVTVKQLKEDYFKKIECFDSVEISGVEDRFNASLGTYHDLLKIIKDKDFLDNEENEDILEDIVLTLTLFEDREMIEERLKTYAHLFDDKVMKQLKRRRYTGWGRLSRKLINGIRDKQSGKTILDFLKSDGFANRNFMQLIHDDSLTFKEDIQKAQVSGQGDSLHEHIANLAGSPAIKKGILQTVKVVDELVKVMGRHKPENIVIEMARENQTTQKGQKNSRERMKRIEEGIKELGSQILKEHPVENTQLQNEKLYLYYLQNGRDMYVDQELDINRLSDYDVDHIVPQSFLKDDSIDNKVLTRSDKARGKSDNVPSEEVVKKMKNYWRQLLNAKLITQRKFDNLTKAERGGLSELDKAGFIKRQLVETRQITKHVAQILDSRMNTKYDENDKLIREVKVITLKSKLVSDFRKDFQFYKVREINNYHHAHDAYLNAVVGTALIKKYPKLESEFVYGDYKVYDVRKMIAKSEQEIGKATAKYFFYSNIMNFFKTEITLANGEIRKRPLIETNGETGEIVWDKGRDFATVRKVLSMPQVNIVKKTEVQTGGFSKESILPKRNSDKLIARKKDWDPKKYGGFDSPTVAYSVLVVAKVEKGKSKKLKSVKELLGITIMERSSFEKNPIDFLEAKGYKEVKKDLIIKLPKYSLFELENGRKRMLASAGELQKGNELALPSKYVNFLYLASHYEKLKGSPEDNEQKQLFVEQHKHYLDEIIEQISEFSKRVILADANLDKVLSAYNKHRDKPIREQAENIIHLFTLTNLGAPAAFKYFDTTIDRKRYTSTKEVLDATLIHQSITGLYETRIDLSQLGGDGGEAAAKEAAAKEAAAKEAAAKEAAAKEAAAKGGTLNIEDEYRLHETSKEPDVSLGSTWLSDFPQAWAETGGMGLAVRQAPLIIPLKATSTPVSIKQYPMSQEARLGIKPHIQRLLDQGILVPCQSPWNTPLLPVKKPGTNDYRPVQDLREVNKRVEDIHPTVPNPYNLLSGLPPSHQWYTVLDLKDAFFCLRLHPTSQPLFAFEWRDPEMGISGQLTWTRLPQGFKNSPTLFNEALHRDLAGFRIQHPDLILLQYVDDLLLAATSELDCQQGTRALLQTLGDLGYRASAKKAQICQKQVKYLGYLLKEGQRWLTEARKETVMGQPIPKTPRQLREFLGKAGFCRLFIPGFAEMAAPLYPLTKPGTLFNWGPDQQKAFQEIKQALLTAPALGLPDLTKPFELFVDEKQGYAKGVLTQKLGPWRRPVAYLSKKLDPVAAGWPPCLRMVAAIAVLTKDAGKLTMGQPLVILAPHAVEALVKQPPDRWLSNARMTHYQALLLDTDRVQFGPVVALNPATLLPLPEEGLQHDCLDILAEAHGTRSDLMDQPLPDADHTWYTDGSSFLQEGQRKAGAAVTTETEVIWARALPAGTSAQRAELIALTQALKMAEGKKLNVYTDSRYAFATAHIHGEIYRRRGWLTSEGKEIKNKDEILALLKALFLPKRLSIIHCPGHQKGNSAEARGNRMADQAAREVATRETPETSTLLAGKRTADGSEFEKRTADGSEFESPKKKAKVE

SEQ ID NO: 2323 - protein, 2088 aa, synthetic construct
MPAAKRVKLDGGDKKYSIGLDIGTNSVGWAVITDEYKVPSKKFKVLGNTDRHSIKKNLIGALLFDSGETAEATRLKRTARRRYTRRKNRICYLQEIFSNEMAKVDDSFFHRLEESFLVEEDKKHERHPIFGNIVDEVAYHEKYPTIYHLRKKLVDSTDKADLRLIYLALAHMIKFRGHFLIEGDLNPDNSDVDKLFIQLVQTYNQLFEENPINASGVDAKAILSARLSKSRRLENLIAQLPGEKKNGLFGNLIALSLGLTPNFKSNFDLAEDAKLQLSKDTYDDDLDNLLAQIGDQYADLFLAAKNLSDAILLSDILRVNTEITKAPLSASMIKRYDEHHQDLTLLKALVRQQLPEKYKEIFFDQSKNGYAGYIDGGASQEEFYKFIKPILEKMDGTEELLVKLNREDLLRKQRTFDNGSIPHQIHLGELHAILRRQEDFYPFLKDNREKIEKILTFRIPYYVGPLARGNSRFAWMTRKSEETITPWNFEEVVDKGASAQSFIERMTNFDKNLPNEKVLPKHSLLYEYFTVYNELTKVKYVTEGMRKPAFLSGEQKKAIVDLLFKTNRKVTVKQLKEDYFKKIECFDSVEISGVEDRFNASLGTYHDLLKIIKDKDFLDNEENEDILEDIVLTLTLFEDREMIEERLKTYAHLFDDKVMKQLKRRRYTGWGRLSRKLINGIRDKQSGKTILDFLKSDGFANRNFMQLIHDDSLTFKEDIQKAQVSGQGDSLHEHIANLAGSPAIKKGILQTVKVVDELVKVMGRHKPENIVIEMARENQTTQKGQKNSRERMKRIEEGIKELGSQILKEHPVENTQLQNEKLYLYYLQNGRDMYVDQELDINRLSDYDVDHIVPQSFLKDDSIDNKVLTRSDKARGKSDNVPSEEVVKKMKNYWRQLLNAKLITQRKFDNLTKAERGGLSELDKAGFIKRQLVETRQITKHVAQILDSRMNTKYDENDKLIREVKVITLKSKLVSDFRKDFQFYKVREINNYHHAHDAYLNAVVGTALIKKYPKLESEFVYGDYKVYDVRKMIAKSEQEIGKATAKYFFYSNIMNFFKTEITLANGEIRKRPLIETNGETGEIVWDKGRDFATVRKVLSMPQVNIVKKTEVQTGGFSKESILPKRNSDKLIARKKDWDPKKYGGFDSPTVAYSVLVVAKVEKGKSKKLKSVKELLGITIMERSSFEKNPIDFLEAKGYKEVKKDLIIKLPKYSLFELENGRKRMLASAGELQKGNELALPSKYVNFLYLASHYEKLKGSPEDNEQKQLFVEQHKHYLDEIIEQISEFSKRVILADANLDKVLSAYNKHRDKPIREQAENIIHLFTLTNLGAPAAFKYFDTTIDRKRYTSTKEVLDATLIHQSITGLYETRIDLSQLGGDGGGGSGGTLNIEDEYRLHETSKEPDVSLGSTWLSDFPQAWAETGGMGLAVRQAPLIIPLKATSTPVSIKQYPMSQEARLGIKPHIQRLLDQGILVPCQSPWNTPLLPVKKPGTNDYRPVQDLREVNKRVEDIHPTVPNPYNLLSGLPPSHQWYTVLDLKDAFFCLRLHPTSQPLFAFEWRDPEMGISGQLTWTRLPQGFKNSPTLFNEALHRDLAGFRIQHPDLILLQYVDDLLLAATSELDCQQGTRALLQTLGDLGYRASAKKAQICQKQVKYLGYLLKEGQRWLTEARKETVMGQPIPKTPRQLREFLGKAGFCRLFIPGFAEMAAPLYPLTKPGTLFNWGPDQQKAFQEIKQALLTAPALGLPDLTKPFELFVDEKQGYAKGVLTQKLGPWRRPVAYLSKKLDPVAAGWPPCLRMVAAIAVLTKDAGKLTMGQPLVILAPHAVEALVKQPPDRWLSNARMTHYQALLLDTDRVQFGPVVALNPATLLPLPEEGLQHDCLDILAEAHGTRSDLMDQPLPDADHTWYTDGSSFLQEGQRKAGAAVTTETEVIWARALPAGTSAQRAELIALTQALKMAEGKKLNVYTDSRYAFATAHIHGEIYRRRGWLTSEGKEIKNKDEILALLKALFLPKRLSIIHCPGHQKGNSAEARGNRMADQAAREVATRETPETSTLLAGKRTADGSEFEKRTADGSEFESPKKKAKVE

SEQ ID NO: 2324 - protein, 2110 aa, synthetic construct
MPAAKRVKLDGGDKKYSIGLDIGTNSVGWAVITDEYKVPSKKFKVLGNTDRHSIKKNLIGALLFDSGETAEATRLKRTARRRYTRRKNRICYLQEIFSNEMAKVDDSFFHRLEESFLVEEDKKHERHPIFGNIVDEVAYHEKYPTIYHLRKKLVDSTDKADLRLIYLALAHMIKFRGHFLIEGDLNPDNSDVDKLFIQLVQTYNQLFEENPINASGVDAKAILSARLSKSRRLENLIAQLPGEKKNGLFGNLIALSLGLTPNFKSNFDLAEDAKLQLSKDTYDDDLDNLLAQIGDQYADLFLAAKNLSDAILLSDILRVNTEITKAPLSASMIKRYDEHHQDLTLLKALVRQQLPEKYKEIFFDQSKNGYAGYIDGGASQEEFYKFIKPILEKMDGTEELLVKLNREDLLRKQRTFDNGSIPHQIHLGELHAILRRQEDFYPFLKDNREKIEKILTFRIPYYVGPLARGNSRFAWMTRKSEETITPWNFEEVVDKGASAQSFIERMTNFDKNLPNEKVLPKHSLLYEYFTVYNELTKVKYVTEGMRKPAFLSGEQKKAIVDLLFKTNRKVTVKQLKEDYFKKIECFDSVEISGVEDRFNASLGTYHDLLKIIKDKDFLDNEENEDILEDIVLTLTLFEDREMIEERLKTYAHLFDDKVMKQLKRRRYTGWGRLSRKLINGIRDKQSGKTILDFLKSDGFANRNFMQLIHDDSLTFKEDIQKAQVSGQGDSLHEHIANLAGSPAIKKGILQTVKVVDELVKVMGRHKPENIVIEMARENQTTQKGQKNSRERMKRIEEGIKELGSQILKEHPVENTQLQNEKLYLYYLQNGRDMYVDQELDINRLSDYDVDHIVPQSFLKDDSIDNKVLTRSDKARGKSDNVPSEEVVKKMKNYWRQLLNAKLITQRKFDNLTKAERGGLSELDKAGFIKRQLVETRQITKHVAQILDSRMNTKYDENDKLIREVKVITLKSKLVSDFRKDFQFYKVREINNYHHAHDAYLNAVVGTALIKKYPKLESEFVYGDYKVYDVRKMIAKSEQEIGKATAKYFFYSNIMNFFKTEITLANGEIRKRPLIETNGETGEIVWDKGRDFATVRKVLSMPQVNIVKKTEVQTGGFSKESILPKRNSDKLIARKKDWDPKKYGGFDSPTVAYSVLVVAKVEKGKSKKLKSVKELLGITIMERSSFEKNPIDFLEAKGYKEVKKDLIIKLPKYSLFELENGRKRMLASAGELQKGNELALPSKYVNFLYLASHYEKLKGSPEDNEQKQLFVEQHKHYLDEIIEQISEFSKRVILADANLDKVLSAYNKHRDKPIREQAENIIHLFTLTNLGAPAAFKYFDTTIDRKRYTSTKEVLDATLIHQSITGLYETRIDLSQLGGDGGEAAAKEAAAKEAAAKEAAAKEAAAKGGTLNIEDEYRLHETSKEPDVSLGSTWLSDFPQAWAETGGMGLAVRQAPLIIPLKATSTPVSIKQYPMSQEARLGIKPHIQRLLDQGILVPCQSPWNTPLLPVKKPGTNDYRPVQDLREVNKRVEDIHPTVPNPYNLLSGLPPSHQWYTVLDLKDAFFCLRLHPTSQPLFAFEWRDPEMGISGQLTWTRLPQGFKNSPTLFNEALHRDLAGFRIQHPDLILLQYVDDLLLAATSELDCQQGTRALLQTLGDLGYRASAKKAQICQKQVKYLGYLLKEGQRWLTEARKETVMGQPIPKTPRQLREFLGKAGFCRLFIPGFAEMAAPLYPLTKPGTLFNWGPDQQKAFQEIKQALLTAPALGLPDLTKPFELFVDEKQGYAKGVLTQKLGPWRRPVAYLSKKLDPVAAGWPPCLRMVAAIAVLTKDAGKLTMGQPLVILAPHAVEALVKQPPDRWLSNARMTHYQALLLDTDRVQFGPVVALNPATLLPLPEEGLQHDCLDILAEAHGTRSDLMDQPLPDADHTWYTDGSSFLQEGQRKAGAAVTTETEVIWARALPAGTSAQRAELIALTQALKMAEGKKLNVYTDSRYAFATAHIHGEIYRRRGWLTSEGKEIKNKDEILALLKALFLPKRLSIIHCPGHQKGNSAEARGNRMADQAAREVATRETPETSTLLAGKRTADGSEFEKRTADGSEFESPKKKAKVE

SEQ ID NO: 2325 - protein, 2105 aa, synthetic construct
MPAAKRVKLDGGDKKYSIGLDIGTNSVGWAVITDEYKVPSKKFKVLGNTDRHSIKKNLIGALLFDSGETAEATRLKRTARRRYTRRKNRICYLQEIFSNEMAKVDDSFFHRLEESFLVEEDKKHERHPIFGNIVDEVAYHEKYPTIYHLRKKLVDSTDKADLRLIYLALAHMIKFRGHFLIEGDLNPDNSDVDKLFIQLVQTYNQLFEENPINASGVDAKAILSARLSKSRRLENLIAQLPGEKKNGLFGNLIALSLGLTPNFKSNFDLAEDAKLQLSKDTYDDDLDNLLAQIGDQYADLFLAAKNLSDAILLSDILRVNTEITKAPLSASMIKRYDEHHQDLTLLKALVRQQLPEKYKEIFFDQSKNGYAGYIDGGASQEEFYKFIKPILEKMDGTEELLVKLNREDLLRKQRTFDNGSIPHQIHLGELHAILRRQEDFYPFLKDNREKIEKILTFRIPYYVGPLARGNSRFAWMTRKSEETITPWNFEEVVDKGASAQSFIERMTNFDKNLPNEKVLPKHSLLYEYFTVYNELTKVKYVTEGMRKPAFLSGEQKKAIVDLLFKTNRKVTVKQLKEDYFKKIECFDSVEISGVEDRFNASLGTYHDLLKIIKDKDFLDNEENEDILEDIVLTLTLFEDREMIEERLKTYAHLFDDKVMKQLKRRRYTGWGRLSRKLINGIRDKQSGKTILDFLKSDGFANRNFMQLIHDDSLTFKEDIQKAQVSGQGDSLHEHIANLAGSPAIKKGILQTVKVVDELVKVMGRHKPENIVIEMARENQTTQKGQKNSRERMKRIEEGIKELGSQILKEHPVENTQLQNEKLYLYYLQNGRDMYVDQELDINRLSDYDVDHIVPQSFLKDDSIDNKVLTRSDKARGKSDNVPSEEVVKKMKNYWRQLLNAKLITQRKFDNLTKAERGGLSELDKAGFIKRQLVETRQITKHVAQILDSRMNTKYDENDKLIREVKVITLKSKLVSDFRKDFQFYKVREINNYHHAHDAYLNAVVGTALIKKYPKLESEFVYGDYKVYDVRKMIAKSEQEIGKATAKYFFYSNIMNFFKTEITLANGEIRKRPLIETNGETGEIVWDKGRDFATVRKVLSMPQVNIVKKTEVQTGGFSKESILPKRNSDKLIARKKDWDPKKYGGFDSPTVAYSVLVVAKVEKGKSKKLKSVKELLGITIMERSSFEKNPIDFLEAKGYKEVKKDLIIKLPKYSLFELENGRKRMLASAGELQKGNELALPSKYVNFLYLASHYEKLKGSPEDNEQKQLFVEQHKHYLDEIIEQISEFSKRVILADANLDKVLSAYNKHRDKPIREQAENIIHLFTLTNLGAPAAFKYFDTTIDRKRYTSTKEVLDATLIHQSITGLYETRIDLSQLGGDGGEAAAKEAAAKEAAAKEAAAKGGTLNIEDEYRLHETSKEPDVSLGSTWLSDFPQAWAETGGMGLAVRQAPLIIPLKATSTPVSIKQYPMSQEARLGIKPHIQRLLDQGILVPCQSPWNTPLLPVKKPGTNDYRPVQDLREVNKRVEDIHPTVPNPYNLLSGLPPSHQWYTVLDLKDAFFCLRLHPTSQPLFAFEWRDPEMGISGQLTWTRLPQGFKNSPTLFNEALHRDLAGFRIQHPDLILLQYVDDLLLAATSELDCQQGTRALLQTLGDLGYRASAKKAQICQKQVKYLGYLLKEGQRWLTEARKETVMGQPIPKTPRQLREFLGKAGFCRLFIPGFAEMAAPLYPLTKPGTLFNWGPDQQKAFQEIKQALLTAPALGLPDLTKPFELFVDEKQGYAKGVLTQKLGPWRRPVAYLSKKLDPVAAGWPPCLRMVAAIAVLTKDAGKLTMGQPLVILAPHAVEALVKQPPDRWLSNARMTHYQALLLDTDRVQFGPVVALNPATLLPLPEEGLQHDCLDILAEAHGTRSDLMDQPLPDADHTWYTDGSSFLQEGQRKAGAAVTTETEVIWARALPAGTSAQRAELIALTQALKMAEGKKLNVYTDSRYAFATAHIHGEIYRRRGWLTSEGKEIKNKDEILALLKALFLPKRLSIIHCPGHQKGNSAEARGNRMADQAAREVATRETPETSTLLAGKRTADGSEFEKRTADGSEFESPKKKAKVE

SEQ ID NO: 2326 - protein, 2096 aa, synthetic construct
MPAAKRVKLDGGDKKYSIGLDIGTNSVGWAVITDEYKVPSKKFKVLGNTDRHSIKKNLIGALLFDSGETAEATRLKRTARRRYTRRKNRICYLQEIFSNEMAKVDDSFFHRLEESFLVEEDKKHERHPIFGNIVDEVAYHEKYPTIYHLRKKLVDSTDKADLRLIYLALAHMIKFRGHFLIEGDLNPDNSDVDKLFIQLVQTYNQLFEENPINASGVDAKAILSARLSKSRRLENLIAQLPGEKKNGLFGNLIALSLGLTPNFKSNFDLAEDAKLQLSKDTYDDDLDNLLAQIGDQYADLFLAAKNLSDAILLSDILRVNTEITKAPLSASMIKRYDEHHQDLTLLKALVRQQLPEKYKEIFFDQSKNGYAGYIDGGASQEEFYKFIKPILEKMDGTEELLVKLNREDLLRKQRTFDNGSIPHQIHLGELHAILRRQEDFYPFLKDNREKIEKILTFRIPYYVGPLARGNSRFAWMTRKSEETITPWNFEEVVDKGASAQSFIERMTNFDKNLPNEKVLPKHSLLYEYFTVYNELTKVKYVTEGMRKPAFLSGEQKKAIVDLLFKTNRKVTVKQLKEDYFKKIECFDSVEISGVEDRFNASLGTYHDLLKIIKDKDFLDNEENEDILEDIVLTLTLFEDREMIEERLKTYAHLFDDKVMKQLKRRRYTGWGRLSRKLINGIRDKQSGKTILDFLKSDGFANRNFMQLIHDDSLTFKEDIQKAQVSGQGDSLHEHIANLAGSPAIKKGILQTVKVVDELVKVMGRHKPENIVIEMARENQTTQKGQKNSRERMKRIEEGIKELGSQILKEHPVENTQLQNEKLYLYYLQNGRDMYVDQELDINRLSDYDVDHIVPQSFLKDDSIDNKVLTRSDKARGKSDNVPSEEVVKKMKNYWRQLLNAKLITQRKFDNLTKAERGGLSELDKAGFIKRQLVETRQITKHVAQILDSRMNTKYDENDKLIREVKVITLKSKLVSDFRKDFQFYKVREINNYHHAHDAYLNAVVGTALIKKYPKLESEFVYGDYKVYDVRKMIAKSEQEIGKATAKYFFYSNIMNFFKTEITLANGEIRKRPLIETNGETGEIVWDKGRDFATVRKVLSMPQVNIVKKTEVQTGGFSKESILPKRNSDKLIARKKDWDPKKYGGFDSPTVAYSVLVVAKVEKGKSKKLKSVKELLGITIMERSSFEKNPIDFLEAKGYKEVKKDLIIKLPKYSLFELENGRKRMLASAGELQKGNELALPSKYVNFLYLASHYEKLKGSPEDNEQKQLFVEQHKHYLDEIIEQISEFSKRVILADANLDKVLSAYNKHRDKPIREQAENIIHLFTLTNLGAPAAFKYFDTTIDRKRYTSTKEVLDATLIHQSITGLYETRIDLSQLGGDGGGGSEAAAKPAPGGTLNIEDEYRLHETSKEPDVSLGSTWLSDFPQAWAETGGMGLAVRQAPLIIPLKATSTPVSIKQYPMSQEARLGIKPHIQRLLDQGILVPCQSPWNTPLLPVKKPGTNDYRPVQDLREVNKRVEDIHPTVPNPYNLLSGLPPSHQWYTVLDLKDAFFCLRLHPTSQPLFAFEWRDPEMGISGQLTWTRLPQGFKNSPTLFNEALHRDLAGFRIQHPDLILLQYVDDLLLAATSELDCQQGTRALLQTLGDLGYRASAKKAQICQKQVKYLGYLLKEGQRWLTEARKETVMGQPIPKTPRQLREFLGKAGFCRLFIPGFAEMAAPLYPLTKPGTLFNWGPDQQKAFQEIKQALLTAPALGLPDLTKPFELFVDEKQGYAKGVLTQKLGPWRRPVAYLSKKLDPVAAGWPPCLRMVAAIAVLTKDAGKLTMGQPLVILAPHAVEALVKQPPDRWLSNARMTHYQALLLDTDRVQFGPVVALNPATLLPLPEEGLQHDCLDILAEAHGTRSDLMDQPLPDADHTWYTDGSSFLQEGQRKAGAAVTTETEVIWARALPAGTSAQRAELIALTQALKMAEGKKLNVYTDSRYAFATAHIHGEIYRRRGWLTSEGKEIKNKDEILALLKALFLPKRLSIIHCPGHQKGNSAEARGNRMADQAAREVATRETPETSTLLAGKRTADGSEFEKRTADGSEFESPKKKAKVE

SEQ ID NO: 2327 - protein, 2096 aa, synthetic construct
MPAAKRVKLDGGDKKYSIGLDIGTNSVGWAVITDEYKVPSKKFKVLGNTDRHSIKKNLIGALLFDSGETAEATRLKRTARRRYTRRKNRICYLQEIFSNEMAKVDDSFFHRLEESFLVEEDKKHERHPIFGNIVDEVAYHEKYPTIYHLRKKLVDSTDKADLRLIYLALAHMIKFRGHFLIEGDLNPDNSDVDKLFIQLVQTYNQLFEENPINASGVDAKAILSARLSKSRRLENLIAQLPGEKKNGLFGNLIALSLGLTPNFKSNFDLAEDAKLQLSKDTYDDDLDNLLAQIGDQYADLFLAAKNLSDAILLSDILRVNTEITKAPLSASMIKRYDEHHQDLTLLKALVRQQLPEKYKEIFFDQSKNGYAGYIDGGASQEEFYKFIKPILEKMDGTEELLVKLNREDLLRKQRTFDNGSIPHQIHLGELHAILRRQEDFYPFLKDNREKIEKILTFRIPYYVGPLARGNSRFAWMTRKSEETITPWNFEEVVDKGASAQSFIERMTNFDKNLPNEKVLPKHSLLYEYFTVYNELTKVKYVTEGMRKPAFLSGEQKKAIVDLLFKTNRKVTVKQLKEDYFKKIECFDSVEISGVEDRFNASLGTYHDLLKIIKDKDFLDNEENEDILEDIVLTLTLFEDREMIEERLKTYAHLFDDKVMKQLKRRRYTGWGRLSRKLINGIRDKQSGKTILDFLKSDGFANRNFMQLIHDDSLTFKEDIQKAQVSGQGDSLHEHIANLAGSPAIKKGILQTVKVVDELVKVMGRHKPENIVIEMARENQTTQKGQKNSRERMKRIEEGIKELGSQILKEHPVENTQLQNEKLYLYYLQNGRDMYVDQELDINRLSDYDVDHIVPQSFLKDDSIDNKVLTRSDKARGKSDNVPSEEVVKKMKNYWRQLLNAKLITQRKFDNLTKAERGGLSELDKAGFIKRQLVETRQITKHVAQILDSRMNTKYDENDKLIREVKVITLKSKLVSDFRKDFQFYKVREINNYHHAHDAYLNAVVGTALIKKYPKLESEFVYGDYKVYDVRKMIAKSEQEIGKATAKYFFYSNIMNFFKTEITLANGEIRKRPLIETNGETGEIVWDKGRDFATVRKVLSMPQVNIVKKTEVQTGGFSKESILPKRNSDKLIARKKDWDPKKYGGFDSPTVAYSVLVVAKVEKGKSKKLKSVKELLGITIMERSSFEKNPIDFLEAKGYKEVKKDLIIKLPKYSLFELENGRKRMLASAGELQKGNELALPSKYVNFLYLASHYEKLKGSPEDNEQKQLFVEQHKHYLDEIIEQISEFSKRVILADANLDKVLSAYNKHRDKPIREQAENIIHLFTLTNLGAPAAFKYFDTTIDRKRYTSTKEVLDATLIHQSITGLYETRIDLSQLGGDGGGGGGSSEAAAKGGTLNIEDEYRLHETSKEPDVSLGSTWLSDFPQAWAETGGMGLAVRQAPLIIPLKATSTPVSIKQYPMSQEARLGIKPHIQRLLDQGILVPCQSPWNTPLLPVKKPGTNDYRPVQDLREVNKRVEDIHPTVPNPYNLLSGLPPSHQWYTVLDLKDAFFCLRLHPTSQPLFAFEWRDPEMGISGQLTWTRLPQGFKNSPTLFNEALHRDLAGFRIQHPDLILLQYVDDLLLAATSELDCQQGTRALLQTLGDLGYRASAKKAQICQKQVKYLGYLLKEGQRWLTEARKETVMGQPIPKTPRQLREFLGKAGFCRLFIPGFAEMAAPLYPLTKPGTLFNWGPDQQKAFQEIKQALLTAPALGLPDLTKPFELFVDEKQGYAKGVLTQKLGPWRRPVAYLSKKLDPVAAGWPPCLRMVAAIAVLTKDAGKLTMGQPLVILAPHAVEALVKQPPDRWLSNARMTHYQALLLDTDRVQFGPVVALNPATLLPLPEEGLQHDCLDILAEAHGTRSDLMDQPLPDADHTWYTDGSSFLQEGQRKAGAAVTTETEVIWARALPAGTSAQRAELIALTQALKMAEGKKLNVYTDSRYAFATAHIHGEIYRRRGWLTSEGKEIKNKDEILALLKALFLPKRLSIIHCPGHQKGNSAEARGNRMADQAAREVATRETPETSTLLAGKRTADGSEFEKRTADGSEFESPKKKAKVE

SEQ ID NO: 2328 - protein, 2090 aa, synthetic construct
MPAAKRVKLDGGDKKYSIGLDIGTNSVGWAVITDEYKVPSKKFKVLGNTDRHSIKKNLIGALLFDSGETAEATRLKRTARRRYTRRKNRICYLQEIFSNEMAKVDDSFFHRLEESFLVEEDKKHERHPIFGNIVDEVAYHEKYPTIYHLRKKLVDSTDKADLRLIYLALAHMIKFRGHFLIEGDLNPDNSDVDKLFIQLVQTYNQLFEENPINASGVDAKAILSARLSKSRRLENLIAQLPGEKKNGLFGNLIALSLGLTPNFKSNFDLAEDAKLQLSKDTYDDDLDNLLAQIGDQYADLFLAAKNLSDAILLSDILRVNTEITKAPLSASMIKRYDEHHQDLTLLKALVRQQLPEKYKEIFFDQSKNGYAGYIDGGASQEEFYKFIKPILEKMDGTEELLVKLNREDLLRKQRTFDNGSIPHQIHLGELHAILRRQEDFYPFLKDNREKIEKILTFRIPYYVGPLARGNSRFAWMTRKSEETITPWNFEEVVDKGASAQSFIERMTNFDKNLPNEKVLPKHSLLYEYFTVYNELTKVKYVTEGMRKPAFLSGEQKKAIVDLLFKTNRKVTVKQLKEDYFKKIECFDSVEISGVEDRFNASLGTYHDLLKIIKDKDFLDNEENEDILEDIVLTLTLFEDREMIEERLKTYAHLFDDKVMKQLKRRRYTGWGRLSRKLINGIRDKQSGKTILDFLKSDGFANRNFMQLIHDDSLTFKEDIQKAQVSGQGDSLHEHIANLAGSPAIKKGILQTVKVVDELVKVMGRHKPENIVIEMARENQTTQKGQKNSRERMKRIEEGIKELGSQILKEHPVENTQLQNEKLYLYYLQNGRDMYVDQELDINRLSDYDVDHIVPQSFLKDDSIDNKVLTRSDKARGKSDNVPSEEVVKKMKNYWRQLLNAKLITQRKFDNLTKAERGGLSELDKAGFIKRQLVETRQITKHVAQILDSRMNTKYDENDKLIREVKVITLKSKLVSDFRKDFQFYKVREINNYHHAHDAYLNAVVGTALIKKYPKLESEFVYGDYKVYDVRKMIAKSEQEIGKATAKYFFYSNIMNFFKTEITLANGEIRKRPLIETNGETGEIVWDKGRDFATVRKVLSMPQVNIVKKTEVQTGGFSKESILPKRNSDKLIARKKDWDPKKYGGFDSPTVAYSVLVVAKVEKGKSKKLKSVKELLGITIMERSSFEKNPIDFLEAKGYKEVKKDLIIKLPKYSLFELENGRKRMLASAGELQKGNELALPSKYVNFLYLASHYEKLKGSPEDNEQKQLFVEQHKHYLDEIIEQISEFSKRVILADANLDKVLSAYNKHRDKPIREQAENIIHLFTLTNLGAPAAFKYFDTTIDRKRYTSTKEVLDATLIHQSITGLYETRIDLSQLGGDGGEAAAKGGTLNIEDEYRLHETSKEPDVSLGSTWLSDFPQAWAETGGMGLAVRQAPLIIPLKATSTPVSIKQYPMSQEARLGIKPHIQRLLDQGILVPCQSPWNTPLLPVKKPGTNDYRPVQDLREVNKRVEDIHPTVPNPYNLLSGLPPSHQWYTVLDLKDAFFCLRLHPTSQPLFAFEWRDPEMGISGQLTWTRLPQGFKNSPTLFNEALHRDLAGFRIQHPDLILLQYVDDLLLAATSELDCQQGTRALLQTLGDLGYRASAKKAQICQKQVKYLGYLLKEGQRWLTEARKETVMGQPIPKTPRQLREFLGKAGFCRLFIPGFAEMAAPLYPLTKPGTLFNWGPDQQKAFQEIKQALLTAPALGLPDLTKPFELFVDEKQGYAKGVLTQKLGPWRRPVAYLSKKLDPVAAGWPPCLRMVAAIAVLTKDAGKLTMGQPLVILAPHAVEALVKQPPDRWLSNARMTHYQALLLDTDRVQFGPVVALNPATLLPLPEEGLQHDCLDILAEAHGTRSDLMDQPLPDADHTWYTDGSSFLQEGQRKAGAAVTTETEVIWARALPAGTSAQRAELIALTQALKMAEGKKLNVYTDSRYAFATAHIHGEIYRRRGWLTSEGKEIKNKDEILALLKALFLPKRLSIIHCPGHQKGNSAEARGNRMADQAAREVATRETPETSTLLAGKRTADGSEFEKRTADGSEFESPKKKAKVE

SEQ ID NO: 2329 - protein, 2094 aa, synthetic construct
MPAAKRVKLDGGDKKYSIGLDIGTNSVGWAVITDEYKVPSKKFKVLGNTDRHSIKKNLIGALLFDSGETAEATRLKRTARRRYTRRKNRICYLQEIFSNEMAKVDDSFFHRLEESFLVEEDKKHERHPIFGNIVDEVAYHEKYPTIYHLRKKLVDSTDKADLRLIYLALAHMIKFRGHFLIEGDLNPDNSDVDKLFIQLVQTYNQLFEENPINASGVDAKAILSARLSKSRRLENLIAQLPGEKKNGLFGNLIALSLGLTPNFKSNFDLAEDAKLQLSKDTYDDDLDNLLAQIGDQYADLFLAAKNLSDAILLSDILRVNTEITKAPLSASMIKRYDEHHQDLTLLKALVRQQLPEKYKEIFFDQSKNGYAGYIDGGASQEEFYKFIKPILEKMDGTEELLVKLNREDLLRKQRTFDNGSIPHQIHLGELHAILRRQEDFYPFLKDNREKIEKILTFRIPYYVGPLARGNSRFAWMTRKSEETITPWNFEEVVDKGASAQSFIERMTNFDKNLPNEKVLPKHSLLYEYFTVYNELTKVKYVTEGMRKPAFLSGEQKKAIVDLLFKTNRKVTVKQLKEDYFKKIECFDSVEISGVEDRFNASLGTYHDLLKIIKDKDFLDNEENEDILEDIVLTLTLFEDREMIEERLKTYAHLFDDKVMKQLKRRRYTGWGRLSRKLINGIRDKQSGKTILDFLKSDGFANRNFMQLIHDDSLTFKEDIQKAQVSGQGDSLHEHIANLAGSPAIKKGILQTVKVVDELVKVMGRHKPENIVIEMARENQTTQKGQKNSRERMKRIEEGIKELGSQILKEHPVENTQLQNEKLYLYYLQNGRDMYVDQELDINRLSDYDVDHIVPQSFLKDDSIDNKVLTRSDKARGKSDNVPSEEVVKKMKNYWRQLLNAKLITQRKFDNLTKAERGGLSELDKAGFIKRQLVETRQITKHVAQILDSRMNTKYDENDKLIREVKVITLKSKLVSDFRKDFQFYKVREINNYHHAHDAYLNAVVGTALIKKYPKLESEFVYGDYKVYDVRKMIAKSEQEIGKATAKYFFYSNIMNFFKTEITLANGEIRKRPLIETNGETGEIVWDKGRDFATVRKVLSMPQVNIVKKTEVQTGGFSKESILPKRNSDKLIARKKDWDPKKYGGFDSPTVAYSVLVVAKVEKGKSKKLKSVKELLGITIMERSSFEKNPIDFLEAKGYKEVKKDLIIKLPKYSLFELENGRKRMLASAGELQKGNELALPSKYVNFLYLASHYEKLKGSPEDNEQKQLFVEQHKHYLDEIIEQISEFSKRVILADANLDKVLSAYNKHRDKPIREQAENIIHLFTLTNLGAPAAFKYFDTTIDRKRYTSTKEVLDATLIHQSITGLYETRIDLSQLGGDGGGSSPAPGGGGGTLNIEDEYRLHETSKEPDVSLGSTWLSDFPQAWAETGGMGLAVRQAPLIIPLKATSTPVSIKQYPMSQEARLGIKPHIQRLLDQGILVPCQSPWNTPLLPVKKPGTNDYRPVQDLREVNKRVEDIHPTVPNPYNLLSGLPPSHQWYTVLDLKDAFFCLRLHPTSQPLFAFEWRDPEMGISGQLTWTRLPQGFKNSPTLFNEALHRDLAGFRIQHPDLILLQYVDDLLLAATSELDCQQGTRALLQTLGDLGYRASAKKAQICQKQVKYLGYLLKEGQRWLTEARKETVMGQPIPKTPRQLREFLGKAGFCRLFIPGFAEMAAPLYPLTKPGTLFNWGPDQQKAFQEIKQALLTAPALGLPDLTKPFELFVDEKQGYAKGVLTQKLGPWRRPVAYLSKKLDPVAAGWPPCLRMVAAIAVLTKDAGKLTMGQPLVILAPHAVEALVKQPPDRWLSNARMTHYQALLLDTDRVQFGPVVALNPATLLPLPEEGLQHDCLDILAEAHGTRSDLMDQPLPDADHTWYTDGSSFLQEGQRKAGAAVTTETEVIWARALPAGTSAQRAELIALTQALKMAEGKKLNVYTDSRYAFATAHIHGEIYRRRGWLTSEGKEIKNKDEILALLKALFLPKRLSIIHCPGHQKGNSAEARGNRMADQAAREVATRETPETSTLLAGKRTADGSEFEKRTADGSEFESPKKKAKVE

SEQ ID NO: 2330 - protein, 2088 aa, synthetic construct
MPAAKRVKLDGGDKKYSIGLDIGTNSVGWAVITDEYKVPSKKFKVLGNTDRHSIKKNLIGALLFDSGETAEATRLKRTARRRYTRRKNRICYLQEIFSNEMAKVDDSFFHRLEESFLVEEDKKHERHPIFGNIVDEVAYHEKYPTIYHLRKKLVDSTDKADLRLIYLALAHMIKFRGHFLIEGDLNPDNSDVDKLFIQLVQTYNQLFEENPINASGVDAKAILSARLSKSRRLENLIAQLPGEKKNGLFGNLIALSLGLTPNFKSNFDLAEDAKLQLSKDTYDDDLDNLLAQIGDQYADLFLAAKNLSDAILLSDILRVNTEITKAPLSASMIKRYDEHHQDLTLLKALVRQQLPEKYKEIFFDQSKNGYAGYIDGGASQEEFYKFIKPILEKMDGTEELLVKLNREDLLRKQRTFDNGSIPHQIHLGELHAILRRQEDFYPFLKDNREKIEKILTFRIPYYVGPLARGNSRFAWMTRKSEETITPWNFEEVVDKGASAQSFIERMTNFDKNLPNEKVLPKHSLLYEYFTVYNELTKVKYVTEGMRKPAFLSGEQKKAIVDLLFKTNRKVTVKQLKEDYFKKIECFDSVEISGVEDRFNASLGTYHDLLKIIKDKDFLDNEENEDILEDIVLTLTLFEDREMIEERLKTYAHLFDDKVMKQLKRRRYTGWGRLSRKLINGIRDKQSGKTILDFLKSDGFANRNFMQLIHDDSLTFKEDIQKAQVSGQGDSLHEHIANLAGSPAIKKGILQTVKVVDELVKVMGRHKPENIVIEMARENQTTQKGQKNSRERMKRIEEGIKELGSQILKEHPVENTQLQNEKLYLYYLQNGRDMYVDQELDINRLSDYDVDHIVPQSFLKDDSIDNKVLTRSDKARGKSDNVPSEEVVKKMKNYWRQLLNAKLITQRKFDNLTKAERGGLSELDKAGFIKRQLVETRQITKHVAQILDSRMNTKYDENDKLIREVKVITLKSKLVSDFRKDFQFYKVREINNYHHAHDAYLNAVVGTALIKKYPKLESEFVYGDYKVYDVRKMIAKSEQEIGKATAKYFFYSNIMNFFKTEITLANGEIRKRPLIETNGETGEIVWDKGRDFATVRKVLSMPQVNIVKKTEVQTGGFSKESILPKRNSDKLIARKKDWDPKKYGGFDSPTVAYSVLVVAKVEKGKSKKLKSVKELLGITIMERSSFEKNPIDFLEAKGYKEVKKDLIIKLPKYSLFELENGRKRMLASAGELQKGNELALPSKYVNFLYLASHYEKLKGSPEDNEQKQLFVEQHKHYLDEIIEQISEFSKRVILADANLDKVLSAYNKHRDKPIREQAENIIHLFTLTNLGAPAAFKYFDTTIDRKRYTSTKEVLDATLIHQSITGLYETRIDLSQLGGDGGGSSGGTLNIEDEYRLHETSKEPDVSLGSTWLSDFPQAWAETGGMGLAVRQAPLIIPLKATSTPVSIKQYPMSQEARLGIKPHIQRLLDQGILVPCQSPWNTPLLPVKKPGTNDYRPVQDLREVNKRVEDIHPTVPNPYNLLSGLPPSHQWYTVLDLKDAFFCLRLHPTSQPLFAFEWRDPEMGISGQLTWTRLPQGFKNSPTLFNEALHRDLAGFRIQHPDLILLQYVDDLLLAATSELDCQQGTRALLQTLGDLGYRASAKKAQICQKQVKYLGYLLKEGQRWLTEARKETVMGQPIPKTPRQLREFLGKAGFCRLFIPGFAEMAAPLYPLTKPGTLFNWGPDQQKAFQEIKQALLTAPALGLPDLTKPFELFVDEKQGYAKGVLTQKLGPWRRPVAYLSKKLDPVAAGWPPCLRMVAAIAVLTKDAGKLTMGQPLVILAPHAVEALVKQPPDRWLSNARMTHYQALLLDTDRVQFGPVVALNPATLLPLPEEGLQHDCLDILAEAHGTRSDLMDQPLPDADHTWYTDGSSFLQEGQRKAGAAVTTETEVIWARALPAGTSAQRAELIALTQALKMAEGKKLNVYTDSRYAFATAHIHGEIYRRRGWLTSEGKEIKNKDEILALLKALFLPKRLSIIHCPGHQKGNSAEARGNRMADQAAREVATRETPETSTLLAGKRTADGSEFEKRTADGSEFESPKKKAKVE

SEQ ID NO: 2331 - protein, 2094 aa, synthetic construct
MPAAKRVKLDGGDKKYSIGLDIGTNSVGWAVITDEYKVPSKKFKVLGNTDRHSIKKNLIGALLFDSGETAEATRLKRTARRRYTRRKNRICYLQEIFSNEMAKVDDSFFHRLEESFLVEEDKKHERHPIFGNIVDEVAYHEKYPTIYHLRKKLVDSTDKADLRLIYLALAHMIKFRGHFLIEGDLNPDNSDVDKLFIQLVQTYNQLFEENPINASGVDAKAILSARLSKSRRLENLIAQLPGEKKNGLFGNLIALSLGLTPNFKSNFDLAEDAKLQLSKDTYDDDLDNLLAQIGDQYADLFLAAKNLSDAILLSDILRVNTEITKAPLSASMIKRYDEHHQDLTLLKALVRQQLPEKYKEIFFDQSKNGYAGYIDGGASQEEFYKFIKPILEKMDGTEELLVKLNREDLLRKQRTFDNGSIPHQIHLGELHAILRRQEDFYPFLKDNREKIEKILTFRIPYYVGPLARGNSRFAWMTRKSEETITPWNFEEVVDKGASAQSFIERMTNFDKNLPNEKVLPKHSLLYEYFTVYNELTKVKYVTEGMRKPAFLSGEQKKAIVDLLFKTNRKVTVKQLKEDYFKKIECFDSVEISGVEDRFNASLGTYHDLLKIIKDKDFLDNEENEDILEDIVLTLTLFEDREMIEERLKTYAHLFDDKVMKQLKRRRYTGWGRLSRKLINGIRDKQSGKTILDFLKSDGFANRNFMQLIHDDSLTFKEDIQKAQVSGQGDSLHEHIANLAGSPAIKKGILQTVKVVDELVKVMGRHKPENIVIEMARENQTTQKGQKNSRERMKRIEEGIKELGSQILKEHPVENTQLQNEKLYLYYLQNGRDMYVDQELDINRLSDYDVDHIVPQSFLKDDSIDNKVLTRSDKARGKSDNVPSEEVVKKMKNYWRQLLNAKLITQRKFDNLTKAERGGLSELDKAGFIKRQLVETRQITKHVAQILDSRMNTKYDENDKLIREVKVITLKSKLVSDFRKDFQFYKVREINNYHHAHDAYLNAVVGTALIKKYPKLESEFVYGDYKVYDVRKMIAKSEQEIGKATAKYFFYSNIMNFFKTEITLANGEIRKRPLIETNGETGEIVWDKGRDFATVRKVLSMPQVNIVKKTEVQTGGFSKESILPKRNSDKLIARKKDWDPKKYGGFDSPTVAYSVLVVAKVEKGKSKKLKSVKELLGITIMERSSFEKNPIDFLEAKGYKEVKKDLIIKLPKYSLFELENGRKRMLASAGELQKGNELALPSKYVNFLYLASHYEKLKGSPEDNEQKQLFVEQHKHYLDEIIEQISEFSKRVILADANLDKVLSAYNKHRDKPIREQAENIIHLFTLTNLGAPAAFKYFDTTIDRKRYTSTKEVLDATLIHQSITGLYETRIDLSQLGGDGGGGSGSSGGGGGTLNIEDEYRLHETSKEPDVSLGSTWLSDFPQAWAETGGMGLAVRQAPLIIPLKATSTPVSIKQYPMSQEARLGIKPHIQRLLDQGILVPCQSPWNTPLLPVKKPGTNDYRPVQDLREVNKRVEDIHPTVPNPYNLLSGLPPSHQWYTVLDLKDAFFCLRLHPTSQPLFAFEWRDPEMGISGQLTWTRLPQGFKNSPTLFNEALHRDLAGFRIQHPDLILLQYVDDLLLAATSELDCQQGTRALLQTLGDLGYRASAKKAQICQKQVKYLGYLLKEGQRWLTEARKETVMGQPIPKTPRQLREFLGKAGFCRLFIPGFAEMAAPLYPLTKPGTLFNWGPDQQKAFQEIKQALLTAPALGLPDLTKPFELFVDEKQGYAKGVLTQKLGPWRRPVAYLSKKLDPVAAGWPPCLRMVAAIAVLTKDAGKLTMGQPLVILAPHAVEALVKQPPDRWLSNARMTHYQALLLDTDRVQFGPVVALNPATLLPLPEEGLQHDCLDILAEAHGTRSDLMDQPLPDADHTWYTDGSSFLQEGQRKAGAAVTTETEVIWARALPAGTSAQRAELIALTQALKMAEGKKLNVYTDSRYAFATAHIHGEIYRRRGWLTSEGKEIKNKDEILALLKALFLPKRLSIIHCPGHQKGNSAEARGNRMADQAAREVATRETPETSTLLAGKRTADGSEFEKRTADGSEFESPKKKAKVE

SEQ ID NO: 2332 - protein, 2096 aa, synthetic construct
MPAAKRVKLDGGDKKYSIGLDIGTNSVGWAVITDEYKVPSKKFKVLGNTDRHSIKKNLIGALLFDSGETAEATRLKRTARRRYTRRKNRICYLQEIFSNEMAKVDDSFFHRLEESFLVEEDKKHERHPIFGNIVDEVAYHEKYPTIYHLRKKLVDSTDKADLRLIYLALAHMIKFRGHFLIEGDLNPDNSDVDKLFIQLVQTYNQLFEENPINASGVDAKAILSARLSKSRRLENLIAQLPGEKKNGLFGNLIALSLGLTPNFKSNFDLAEDAKLQLSKDTYDDDLDNLLAQIGDQYADLFLAAKNLSDAILLSDILRVNTEITKAPLSASMIKRYDEHHQDLTLLKALVRQQLPEKYKEIFFDQSKNGYAGYIDGGASQEEFYKFIKPILEKMDGTEELLVKLNREDLLRKQRTFDNGSIPHQIHLGELHAILRRQEDFYPFLKDNREKIEKILTFRIPYYVGPLARGNSRFAWMTRKSEETITPWNFEEVVDKGASAQSFIERMTNFDKNLPNEKVLPKHSLLYEYFTVYNELTKVKYVTEGMRKPAFLSGEQKKAIVDLLFKTNRKVTVKQLKEDYFKKIECFDSVEISGVEDRFNASLGTYHDLLKIIKDKDFLDNEENEDILEDIVLTLTLFEDREMIEERLKTYAHLFDDKVMKQLKRRRYTGWGRLSRKLINGIRDKQSGKTILDFLKSDGFANRNFMQLIHDDSLTFKEDIQKAQVSGQGDSLHEHIANLAGSPAIKKGILQTVKVVDELVKVMGRHKPENIVIEMARENQTTQKGQKNSRERMKRIEEGIKELGSQILKEHPVENTQLQNEKLYLYYLQNGRDMYVDQELDINRLSDYDVDHIVPQSFLKDDSIDNKVLTRSDKARGKSDNVPSEEVVKKMKNYWRQLLNAKLITQRKFDNLTKAERGGLSELDKAGFIKRQLVETRQITKHVAQILDSRMNTKYDENDKLIREVKVITLKSKLVSDFRKDFQFYKVREINNYHHAHDAYLNAVVGTALIKKYPKLESEFVYGDYKVYDVRKMIAKSEQEIGKATAKYFFYSNIMNFFKTEITLANGEIRKRPLIETNGETGEIVWDKGRDFATVRKVLSMPQVNIVKKTEVQTGGFSKESILPKRNSDKLIARKKDWDPKKYGGFDSPTVAYSVLVVAKVEKGKSKKLKSVKELLGITIMERSSFEKNPIDFLEAKGYKEVKKDLIIKLPKYSLFELENGRKRMLASAGELQKGNELALPSKYVNFLYLASHYEKLKGSPEDNEQKQLFVEQHKHYLDEIIEQISEFSKRVILADANLDKVLSAYNKHRDKPIREQAENIIHLFTLTNLGAPAAFKYFDTTIDRKRYTSTKEVLDATLIHQSITGLYETRIDLSQLGGDGGPAPGGSEAAAKGGTLNIEDEYRLHETSKEPDVSLGSTWLSDFPQAWAETGGMGLAVRQAPLIIPLKATSTPVSIKQYPMSQEARLGIKPHIQRLLDQGILVPCQSPWNTPLLPVKKPGTNDYRPVQDLREVNKRVEDIHPTVPNPYNLLSGLPPSHQWYTVLDLKDAFFCLRLHPTSQPLFAFEWRDPEMGISGQLTWTRLPQGFKNSPTLFNEALHRDLAGFRIQHPDLILLQYVDDLLLAATSELDCQQGTRALLQTLGDLGYRASAKKAQICQKQVKYLGYLLKEGQRWLTEARKETVMGQPIPKTPRQLREFLGKAGFCRLFIPGFAEMAAPLYPLTKPGTLFNWGPDQQKAFQEIKQALLTAPALGLPDLTKPFELFVDEKQGYAKGVLTQKLGPWRRPVAYLSKKLDPVAAGWPPCLRMVAAIAVLTKDAGKLTMGQPLVILAPHAVEALVKQPPDRWLSNARMTHYQALLLDTDRVQFGPVVALNPATLLPLPEEGLQHDCLDILAEAHGTRSDLMDQPLPDADHTWYTDGSSFLQEGQRKAGAAVTTETEVIWARALPAGTSAQRAELIALTQALKMAEGKKLNVYTDSRYAFATAHIHGEIYRRRGWLTSEGKEIKNKDEILALLKALFLPKRLSIIHCPGHQKGNSAEARGNRMADQAAREVATRETPETSTLLAGKRTADGSEFEKRTADGSEFESPKKKAKVE

SEQ ID NO: 2333 - protein, 2100 aa, synthetic construct
MPAAKRVKLDGGDKKYSIGLDIGTNSVGWAVITDEYKVPSKKFKVLGNTDRHSIKKNLIGALLFDSGETAEATRLKRTARRRYTRRKNRICYLQEIFSNEMAKVDDSFFHRLEESFLVEEDKKHERHPIFGNIVDEVAYHEKYPTIYHLRKKLVDSTDKADLRLIYLALAHMIKFRGHFLIEGDLNPDNSDVDKLFIQLVQTYNQLFEENPINASGVDAKAILSARLSKSRRLENLIAQLPGEKKNGLFGNLIALSLGLTPNFKSNFDLAEDAKLQLSKDTYDDDLDNLLAQIGDQYADLFLAAKNLSDAILLSDILRVNTEITKAPLSASMIKRYDEHHQDLTLLKALVRQQLPEKYKEIFFDQSKNGYAGYIDGGASQEEFYKFIKPILEKMDGTEELLVKLNREDLLRKQRTFDNGSIPHQIHLGELHAILRRQEDFYPFLKDNREKIEKILTFRIPYYVGPLARGNSRFAWMTRKSEETITPWNFEEVVDKGASAQSFIERMTNFDKNLPNEKVLPKHSLLYEYFTVYNELTKVKYVTEGMRKPAFLSGEQKKAIVDLLFKTNRKVTVKQLKEDYFKKIECFDSVEISGVEDRFNASLGTYHDLLKIIKDKDFLDNEENEDILEDIVLTLTLFEDREMIEERLKTYAHLFDDKVMKQLKRRRYTGWGRLSRKLINGIRDKQSGKTILDFLKSDGFANRNFMQLIHDDSLTFKEDIQKAQVSGQGDSLHEHIANLAGSPAIKKGILQTVKVVDELVKVMGRHKPENIVIEMARENQTTQKGQKNSRERMKRIEEGIKELGSQILKEHPVENTQLQNEKLYLYYLQNGRDMYVDQELDINRLSDYDVDHIVPQSFLKDDSIDNKVLTRSDKARGKSDNVPSEEVVKKMKNYWRQLLNAKLITQRKFDNLTKAERGGLSELDKAGFIKRQLVETRQITKHVAQILDSRMNTKYDENDKLIREVKVITLKSKLVSDFRKDFQFYKVREINNYHHAHDAYLNAVVGTALIKKYPKLESEFVYGDYKVYDVRKMIAKSEQEIGKATAKYFFYSNIMNFFKTEITLANGEIRKRPLIETNGETGEIVWDKGRDFATVRKVLSMPQVNIVKKTEVQTGGFSKESILPKRNSDKLIARKKDWDPKKYGGFDSPTVAYSVLVVAKVEKGKSKKLKSVKELLGITIMERSSFEKNPIDFLEAKGYKEVKKDLIIKLPKYSLFELENGRKRMLASAGELQKGNELALPSKYVNFLYLASHYEKLKGSPEDNEQKQLFVEQHKHYLDEIIEQISEFSKRVILADANLDKVLSAYNKHRDKPIREQAENIIHLFTLTNLGAPAAFKYFDTTIDRKRYTSTKEVLDATLIHQSITGLYETRIDLSQLGGDGGGGGGSGGGGSGGGGSGGTLNIEDEYRLHETSKEPDVSLGSTWLSDFPQAWAETGGMGLAVRQAPLIIPLKATSTPVSIKQYPMSQEARLGIKPHIQRLLDQGILVPCQSPWNTPLLPVKKPGTNDYRPVQDLREVNKRVEDIHPTVPNPYNLLSGLPPSHQWYTVLDLKDAFFCLRLHPTSQPLFAFEWRDPEMGISGQLTWTRLPQGFKNSPTLFNEALHRDLAGFRIQHPDLILLQYVDDLLLAATSELDCQQGTRALLQTLGDLGYRASAKKAQICQKQVKYLGYLLKEGQRWLTEARKETVMGQPIPKTPRQLREFLGKAGFCRLFIPGFAEMAAPLYPLTKPGTLFNWGPDQQKAFQEIKQALLTAPALGLPDLTKPFELFVDEKQGYAKGVLTQKLGPWRRPVAYLSKKLDPVAAGWPPCLRMVAAIAVLTKDAGKLTMGQPLVILAPHAVEALVKQPPDRWLSNARMTHYQALLLDTDRVQFGPVVALNPATLLPLPEEGLQHDCLDILAEAHGTRSDLMDQPLPDADHTWYTDGSSFLQEGQRKAGAAVTTETEVIWARALPAGTSAQRAELIALTQALKMAEGKKLNVYTDSRYAFATAHIHGEIYRRRGWLTSEGKEIKNKDEILALLKALFLPKRLSIIHCPGHQKGNSAEARGNRMADQAAREVATRETPETSTLLAGKRTADGSEFEKRTADGSEFESPKKKAKVE

SEQ ID NO: 2334 - protein, 2096 aa, synthetic construct
MPAAKRVKLDGGDKKYSIGLDIGTNSVGWAVITDEYKVPSKKFKVLGNTDRHSIKKNLIGALLFDSGETAEATRLKRTARRRYTRRKNRICYLQEIFSNEMAKVDDSFFHRLEESFLVEEDKKHERHPIFGNIVDEVAYHEKYPTIYHLRKKLVDSTDKADLRLIYLALAHMIKFRGHFLIEGDLNPDNSDVDKLFIQLVQTYNQLFEENPINASGVDAKAILSARLSKSRRLENLIAQLPGEKKNGLFGNLIALSLGLTPNFKSNFDLAEDAKLQLSKDTYDDDLDNLLAQIGDQYADLFLAAKNLSDAILLSDILRVNTEITKAPLSASMIKRYDEHHQDLTLLKALVRQQLPEKYKEIFFDQSKNGYAGYIDGGASQEEFYKFIKPILEKMDGTEELLVKLNREDLLRKQRTFDNGSIPHQIHLGELHAILRRQEDFYPFLKDNREKIEKILTFRIPYYVGPLARGNSRFAWMTRKSEETITPWNFEEVVDKGASAQSFIERMTNFDKNLPNEKVLPKHSLLYEYFTVYNELTKVKYVTEGMRKPAFLSGEQKKAIVDLLFKTNRKVTVKQLKEDYFKKIECFDSVEISGVEDRFNASLGTYHDLLKIIKDKDFLDNEENEDILEDIVLTLTLFEDREMIEERLKTYAHLFDDKVMKQLKRRRYTGWGRLSRKLINGIRDKQSGKTILDFLKSDGFANRNFMQLIHDDSLTFKEDIQKAQVSGQGDSLHEHIANLAGSPAIKKGILQTVKVVDELVKVMGRHKPENIVIEMARENQTTQKGQKNSRERMKRIEEGIKELGSQILKEHPVENTQLQNEKLYLYYLQNGRDMYVDQELDINRLSDYDVDHIVPQSFLKDDSIDNKVLTRSDKARGKSDNVPSEEVVKKMKNYWRQLLNAKLITQRKFDNLTKAERGGLSELDKAGFIKRQLVETRQITKHVAQILDSRMNTKYDENDKLIREVKVITLKSKLVSDFRKDFQFYKVREINNYHHAHDAYLNAVVGTALIKKYPKLESEFVYGDYKVYDVRKMIAKSEQEIGKATAKYFFYSNIMNFFKTEITLANGEIRKRPLIETNGETGEIVWDKGRDFATVRKVLSMPQVNIVKKTEVQTGGFSKESILPKRNSDKLIARKKDWDPKKYGGFDSPTVAYSVLVVAKVEKGKSKKLKSVKELLGITIMERSSFEKNPIDFLEAKGYKEVKKDLIIKLPKYSLFELENGRKRMLASAGELQKGNELALPSKYVNFLYLASHYEKLKGSPEDNEQKQLFVEQHKHYLDEIIEQISEFSKRVILADANLDKVLSAYNKHRDKPIREQAENIIHLFTLTNLGAPAAFKYFDTTIDRKRYTSTKEVLDATLIHQSITGLYETRIDLSQLGGDGGEAAAKGGSGGGGGTLNIEDEYRLHETSKEPDVSLGSTWLSDFPQAWAETGGMGLAVRQAPLIIPLKATSTPVSIKQYPMSQEARLGIKPHIQRLLDQGILVPCQSPWNTPLLPVKKPGTNDYRPVQDLREVNKRVEDIHPTVPNPYNLLSGLPPSHQWYTVLDLKDAFFCLRLHPTSQPLFAFEWRDPEMGISGQLTWTRLPQGFKNSPTLFNEALHRDLAGFRIQHPDLILLQYVDDLLLAATSELDCQQGTRALLQTLGDLGYRASAKKAQICQKQVKYLGYLLKEGQRWLTEARKETVMGQPIPKTPRQLREFLGKAGFCRLFIPGFAEMAAPLYPLTKPGTLFNWGPDQQKAFQEIKQALLTAPALGLPDLTKPFELFVDEKQGYAKGVLTQKLGPWRRPVAYLSKKLDPVAAGWPPCLRMVAAIAVLTKDAGKLTMGQPLVILAPHAVEALVKQPPDRWLSNARMTHYQALLLDTDRVQFGPVVALNPATLLPLPEEGLQHDCLDILAEAHGTRSDLMDQPLPDADHTWYTDGSSFLQEGQRKAGAAVTTETEVIWARALPAGTSAQRAELIALTQALKMAEGKKLNVYTDSRYAFATAHIHGEIYRRRGWLTSEGKEIKNKDEILALLKALFLPKRLSIIHCPGHQKGNSAEARGNRMADQAAREVATRETPETSTLLAGKRTADGSEFEKRTADGSEFESPKKKAKVE

SEQ ID NO: 2335 - protein, 2091 aa, synthetic construct
MPAAKRVKLDGGDKKYSIGLDIGTNSVGWAVITDEYKVPSKKFKVLGNTDRHSIKKNLIGALLFDSGETAEATRLKRTARRRYTRRKNRICYLQEIFSNEMAKVDDSFFHRLEESFLVEEDKKHERHPIFGNIVDEVAYHEKYPTIYHLRKKLVDSTDKADLRLIYLALAHMIKFRGHFLIEGDLNPDNSDVDKLFIQLVQTYNQLFEENPINASGVDAKAILSARLSKSRRLENLIAQLPGEKKNGLFGNLIALSLGLTPNFKSNFDLAEDAKLQLSKDTYDDDLDNLLAQIGDQYADLFLAAKNLSDAILLSDILRVNTEITKAPLSASMIKRYDEHHQDLTLLKALVRQQLPEKYKEIFFDQSKNGYAGYIDGGASQEEFYKFIKPILEKMDGTEELLVKLNREDLLRKQRTFDNGSIPHQIHLGELHAILRRQEDFYPFLKDNREKIEKILTFRIPYYVGPLARGNSRFAWMTRKSEETITPWNFEEVVDKGASAQSFIERMTNFDKNLPNEKVLPKHSLLYEYFTVYNELTKVKYVTEGMRKPAFLSGEQKKAIVDLLFKTNRKVTVKQLKEDYFKKIECFDSVEISGVEDRFNASLGTYHDLLKIIKDKDFLDNEENEDILEDIVLTLTLFEDREMIEERLKTYAHLFDDKVMKQLKRRRYTGWGRLSRKLINGIRDKQSGKTILDFLKSDGFANRNFMQLIHDDSLTFKEDIQKAQVSGQGDSLHEHIANLAGSPAIKKGILQTVKVVDELVKVMGRHKPENIVIEMARENQTTQKGQKNSRERMKRIEEGIKELGSQILKEHPVENTQLQNEKLYLYYLQNGRDMYVDQELDINRLSDYDVDHIVPQSFLKDDSIDNKVLTRSDKARGKSDNVPSEEVVKKMKNYWRQLLNAKLITQRKFDNLTKAERGGLSELDKAGFIKRQLVETRQITKHVAQILDSRMNTKYDENDKLIREVKVITLKSKLVSDFRKDFQFYKVREINNYHHAHDAYLNAVVGTALIKKYPKLESEFVYGDYKVYDVRKMIAKSEQEIGKATAKYFFYSNIMNFFKTEITLANGEIRKRPLIETNGETGEIVWDKGRDFATVRKVLSMPQVNIVKKTEVQTGGFSKESILPKRNSDKLIARKKDWDPKKYGGFDSPTVAYSVLVVAKVEKGKSKKLKSVKELLGITIMERSSFEKNPIDFLEAKGYKEVKKDLIIKLPKYSLFELENGRKRMLASAGELQKGNELALPSKYVNFLYLASHYEKLKGSPEDNEQKQLFVEQHKHYLDEIIEQISEFSKRVILADANLDKVLSAYNKHRDKPIREQAENIIHLFTLTNLGAPAAFKYFDTTIDRKRYTSTKEVLDATLIHQSITGLYETRIDLSQLGGDGGGGSGGGGGTLNIEDEYRLHETSKEPDVSLGSTWLSDFPQAWAETGGMGLAVRQAPLIIPLKATSTPVSIKQYPMSQEARLGIKPHIQRLLDQGILVPCQSPWNTPLLPVKKPGTNDYRPVQDLREVNKRVEDIHPTVPNPYNLLSGLPPSHQWYTVLDLKDAFFCLRLHPTSQPLFAFEWRDPEMGISGQLTWTRLPQGFKNSPTLFNEALHRDLAGFRIQHPDLILLQYVDDLLLAATSELDCQQGTRALLQTLGDLGYRASAKKAQICQKQVKYLGYLLKEGQRWLTEARKETVMGQPIPKTPRQLREFLGKAGFCRLFIPGFAEMAAPLYPLTKPGTLFNWGPDQQKAFQEIKQALLTAPALGLPDLTKPFELFVDEKQGYAKGVLTQKLGPWRRPVAYLSKKLDPVAAGWPPCLRMVAAIAVLTKDAGKLTMGQPLVILAPHAVEALVKQPPDRWLSNARMTHYQALLLDTDRVQFGPVVALNPATLLPLPEEGLQHDCLDILAEAHGTRSDLMDQPLPDADHTWYTDGSSFLQEGQRKAGAAVTTETEVIWARALPAGTSAQRAELIALTQALKMAEGKKLNVYTDSRYAFATAHIHGEIYRRRGWLTSEGKEIKNKDEILALLKALFLPKRLSIIHCPGHQKGNSAEARGNRMADQAAREVATRETPETSTLLAGKRTADGSEFEKRTADGSEFESPKKKAKVE

SEQ ID NO: 2336 - protein, 2091 aa, synthetic construct
MPAAKRVKLDGGDKKYSIGLDIGTNSVGWAVITDEYKVPSKKFKVLGNTDRHSIKKNLIGALLFDSGETAEATRLKRTARRRYTRRKNRICYLQEIFSNEMAKVDDSFFHRLEESFLVEEDKKHERHPIFGNIVDEVAYHEKYPTIYHLRKKLVDSTDKADLRLIYLALAHMIKFRGHFLIEGDLNPDNSDVDKLFIQLVQTYNQLFEENPINASGVDAKAILSARLSKSRRLENLIAQLPGEKKNGLFGNLIALSLGLTPNFKSNFDLAEDAKLQLSKDTYDDDLDNLLAQIGDQYADLFLAAKNLSDAILLSDILRVNTEITKAPLSASMIKRYDEHHQDLTLLKALVRQQLPEKYKEIFFDQSKNGYAGYIDGGASQEEFYKFIKPILEKMDGTEELLVKLNREDLLRKQRTFDNGSIPHQIHLGELHAILRRQEDFYPFLKDNREKIEKILTFRIPYYVGPLARGNSRFAWMTRKSEETITPWNFEEVVDKGASAQSFIERMTNFDKNLPNEKVLPKHSLLYEYFTVYNELTKVKYVTEGMRKPAFLSGEQKKAIVDLLFKTNRKVTVKQLKEDYFKKIECFDSVEISGVEDRFNASLGTYHDLLKIIKDKDFLDNEENEDILEDIVLTLTLFEDREMIEERLKTYAHLFDDKVMKQLKRRRYTGWGRLSRKLINGIRDKQSGKTILDFLKSDGFANRNFMQLIHDDSLTFKEDIQKAQVSGQGDSLHEHIANLAGSPAIKKGILQTVKVVDELVKVMGRHKPENIVIEMARENQTTQKGQKNSRERMKRIEEGIKELGSQILKEHPVENTQLQNEKLYLYYLQNGRDMYVDQELDINRLSDYDVDHIVPQSFLKDDSIDNKVLTRSDKARGKSDNVPSEEVVKKMKNYWRQLLNAKLITQRKFDNLTKAERGGLSELDKAGFIKRQLVETRQITKHVAQILDSRMNTKYDENDKLIREVKVITLKSKLVSDFRKDFQFYKVREINNYHHAHDAYLNAVVGTALIKKYPKLESEFVYGDYKVYDVRKMIAKSEQEIGKATAKYFFYSNIMNFFKTEITLANGEIRKRPLIETNGETGEIVWDKGRDFATVRKVLSMPQVNIVKKTEVQTGGFSKESILPKRNSDKLIARKKDWDPKKYGGFDSPTVAYSVLVVAKVEKGKSKKLKSVKELLGITIMERSSFEKNPIDFLEAKGYKEVKKDLIIKLPKYSLFELENGRKRMLASAGELQKGNELALPSKYVNFLYLASHYEKLKGSPEDNEQKQLFVEQHKHYLDEIIEQISEFSKRVILADANLDKVLSAYNKHRDKPIREQAENIIHLFTLTNLGAPAAFKYFDTTIDRKRYTSTKEVLDATLIHQSITGLYETRIDLSQLGGDGGPAPGSSGGTLNIEDEYRLHETSKEPDVSLGSTWLSDFPQAWAETGGMGLAVRQAPLIIPLKATSTPVSIKQYPMSQEARLGIKPHIQRLLDQGILVPCQSPWNTPLLPVKKPGTNDYRPVQDLREVNKRVEDIHPTVPNPYNLLSGLPPSHQWYTVLDLKDAFFCLRLHPTSQPLFAFEWRDPEMGISGQLTWTRLPQGFKNSPTLFNEALHRDLAGFRIQHPDLILLQYVDDLLLAATSELDCQQGTRALLQTLGDLGYRASAKKAQICQKQVKYLGYLLKEGQRWLTEARKETVMGQPIPKTPRQLREFLGKAGFCRLFIPGFAEMAAPLYPLTKPGTLFNWGPDQQKAFQEIKQALLTAPALGLPDLTKPFELFVDEKQGYAKGVLTQKLGPWRRPVAYLSKKLDPVAAGWPPCLRMVAAIAVLTKDAGKLTMGQPLVILAPHAVEALVKQPPDRWLSNARMTHYQALLLDTDRVQFGPVVALNPATLLPLPEEGLQHDCLDILAEAHGTRSDLMDQPLPDADHTWYTDGSSFLQEGQRKAGAAVTTETEVIWARALPAGTSAQRAELIALTQALKMAEGKKLNVYTDSRYAFATAHIHGEIYRRRGWLTSEGKEIKNKDEILALLKALFLPKRLSIIHCPGHQKGNSAEARGNRMADQAAREVATRETPETSTLLAGKRTADGSEFEKRTADGSEFESPKKKAKVE

SEQ ID NO: 2337 - protein, 2093 aa, synthetic construct
MPAAKRVKLDGGDKKYSIGLDIGTNSVGWAVITDEYKVPSKKFKVLGNTDRHSIKKNLIGALLFDSGETAEATRLKRTARRRYTRRKNRICYLQEIFSNEMAKVDDSFFHRLEESFLVEEDKKHERHPIFGNIVDEVAYHEKYPTIYHLRKKLVDSTDKADLRLIYLALAHMIKFRGHFLIEGDLNPDNSDVDKLFIQLVQTYNQLFEENPINASGVDAKAILSARLSKSRRLENLIAQLPGEKKNGLFGNLIALSLGLTPNFKSNFDLAEDAKLQLSKDTYDDDLDNLLAQIGDQYADLFLAAKNLSDAILLSDILRVNTEITKAPLSASMIKRYDEHHQDLTLLKALVRQQLPEKYKEIFFDQSKNGYAGYIDGGASQEEFYKFIKPILEKMDGTEELLVKLNREDLLRKQRTFDNGSIPHQIHLGELHAILRRQEDFYPFLKDNREKIEKILTFRIPYYVGPLARGNSRFAWMTRKSEETITPWNFEEVVDKGASAQSFIERMTNFDKNLPNEKVLPKHSLLYEYFTVYNELTKVKYVTEGMRKPAFLSGEQKKAIVDLLFKTNRKVTVKQLKEDYFKKIECFDSVEISGVEDRFNASLGTYHDLLKIIKDKDFLDNEENEDILEDIVLTLTLFEDREMIEERLKTYAHLFDDKVMKQLKRRRYTGWGRLSRKLINGIRDKQSGKTILDFLKSDGFANRNFMQLIHDDSLTFKEDIQKAQVSGQGDSLHEHIANLAGSPAIKKGILQTVKVVDELVKVMGRHKPENIVIEMARENQTTQKGQKNSRERMKRIEEGIKELGSQILKEHPVENTQLQNEKLYLYYLQNGRDMYVDQELDINRLSDYDVDHIVPQSFLKDDSIDNKVLTRSDKARGKSDNVPSEEVVKKMKNYWRQLLNAKLITQRKFDNLTKAERGGLSELDKAGFIKRQLVETRQITKHVAQILDSRMNTKYDENDKLIREVKVITLKSKLVSDFRKDFQFYKVREINNYHHAHDAYLNAVVGTALIKKYPKLESEFVYGDYKVYDVRKMIAKSEQEIGKATAKYFFYSNIMNFFKTEITLANGEIRKRPLIETNGETGEIVWDKGRDFATVRKVLSMPQVNIVKKTEVQTGGFSKESILPKRNSDKLIARKKDWDPKKYGGFDSPTVAYSVLVVAKVEKGKSKKLKSVKELLGITIMERSSFEKNPIDFLEAKGYKEVKKDLIIKLPKYSLFELENGRKRMLASAGELQKGNELALPSKYVNFLYLASHYEKLKGSPEDNEQKQLFVEQHKHYLDEIIEQISEFSKRVILADANLDKVLSAYNKHRDKPIREQAENIIHLFTLTNLGAPAAFKYFDTTIDRKRYTSTKEVLDATLIHQSITGLYETRIDLSQLGGDGGEAAAKPAPGGTLNIEDEYRLHETSKEPDVSLGSTWLSDFPQAWAETGGMGLAVRQAPLIIPLKATSTPVSIKQYPMSQEARLGIKPHIQRLLDQGILVPCQSPWNTPLLPVKKPGTNDYRPVQDLREVNKRVEDIHPTVPNPYNLLSGLPPSHQWYTVLDLKDAFFCLRLHPTSQPLFAFEWRDPEMGISGQLTWTRLPQGFKNSPTLFNEALHRDLAGFRIQHPDLILLQYVDDLLLAATSELDCQQGTRALLQTLGDLGYRASAKKAQICQKQVKYLGYLLKEGQRWLTEARKETVMGQPIPKTPRQLREFLGKAGFCRLFIPGFAEMAAPLYPLTKPGTLFNWGPDQQKAFQEIKQALLTAPALGLPDLTKPFELFVDEKQGYAKGVLTQKLGPWRRPVAYLSKKLDPVAAGWPPCLRMVAAIAVLTKDAGKLTMGQPLVILAPHAVEALVKQPPDRWLSNARMTHYQALLLDTDRVQFGPVVALNPATLLPLPEEGLQHDCLDILAEAHGTRSDLMDQPLPDADHTWYTDGSSFLQEGQRKAGAAVTTETEVIWARALPAGTSAQRAELIALTQALKMAEGKKLNVYTDSRYAFATAHIHGEIYRRRGWLTSEGKEIKNKDEILALLKALFLPKRLSIIHCPGHQKGNSAEARGNRMADQAAREVATRETPETSTLLAGKRTADGSEFEKRTADGSEFESPKKKAKVE

SEQ ID NO: 2338 - protein, 2096 aa, synthetic construct
MPAAKRVKLDGGDKKYSIGLDIGTNSVGWAVITDEYKVPSKKFKVLGNTDRHSIKKNLIGALLFDSGETAEATRLKRTARRRYTRRKNRICYLQEIFSNEMAKVDDSFFHRLEESFLVEEDKKHERHPIFGNIVDEVAYHEKYPTIYHLRKKLVDSTDKADLRLIYLALAHMIKFRGHFLIEGDLNPDNSDVDKLFIQLVQTYNQLFEENPINASGVDAKAILSARLSKSRRLENLIAQLPGEKKNGLFGNLIALSLGLTPNFKSNFDLAEDAKLQLSKDTYDDDLDNLLAQIGDQYADLFLAAKNLSDAILLSDILRVNTEITKAPLSASMIKRYDEHHQDLTLLKALVRQQLPEKYKEIFFDQSKNGYAGYIDGGASQEEFYKFIKPILEKMDGTEELLVKLNREDLLRKQRTFDNGSIPHQIHLGELHAILRRQEDFYPFLKDNREKIEKILTFRIPYYVGPLARGNSRFAWMTRKSEETITPWNFEEVVDKGASAQSFIERMTNFDKNLPNEKVLPKHSLLYEYFTVYNELTKVKYVTEGMRKPAFLSGEQKKAIVDLLFKTNRKVTVKQLKEDYFKKIECFDSVEISGVEDRFNASLGTYHDLLKIIKDKDFLDNEENEDILEDIVLTLTLFEDREMIEERLKTYAHLFDDKVMKQLKRRRYTGWGRLSRKLINGIRDKQSGKTILDFLKSDGFANRNFMQLIHDDSLTFKEDIQKAQVSGQGDSLHEHIANLAGSPAIKKGILQTVKVVDELVKVMGRHKPENIVIEMARENQTTQKGQKNSRERMKRIEEGIKELGSQILKEHPVENTQLQNEKLYLYYLQNGRDMYVDQELDINRLSDYDVDHIVPQSFLKDDSIDNKVLTRSDKARGKSDNVPSEEVVKKMKNYWRQLLNAKLITQRKFDNLTKAERGGLSELDKAGFIKRQLVETRQITKHVAQILDSRMNTKYDENDKLIREVKVITLKSKLVSDFRKDFQFYKVREINNYHHAHDAYLNAVVGTALIKKYPKLESEFVYGDYKVYDVRKMIAKSEQEIGKATAKYFFYSNIMNFFKTEITLANGEIRKRPLIETNGETGEIVWDKGRDFATVRKVLSMPQVNIVKKTEVQTGGFSKESILPKRNSDKLIARKKDWDPKKYGGFDSPTVAYSVLVVAKVEKGKSKKLKSVKELLGITIMERSSFEKNPIDFLEAKGYKEVKKDLIIKLPKYSLFELENGRKRMLASAGELQKGNELALPSKYVNFLYLASHYEKLKGSPEDNEQKQLFVEQHKHYLDEIIEQISEFSKRVILADANLDKVLSAYNKHRDKPIREQAENIIHLFTLTNLGAPAAFKYFDTTIDRKRYTSTKEVLDATLIHQSITGLYETRIDLSQLGGDGGGGSPAPEAAAKGGTLNIEDEYRLHETSKEPDVSLGSTWLSDFPQAWAETGGMGLAVRQAPLIIPLKATSTPVSIKQYPMSQEARLGIKPHIQRLLDQGILVPCQSPWNTPLLPVKKPGTNDYRPVQDLREVNKRVEDIHPTVPNPYNLLSGLPPSHQWYTVLDLKDAFFCLRLHPTSQPLFAFEWRDPEMGISGQLTWTRLPQGFKNSPTLFNEALHRDLAGFRIQHPDLILLQYVDDLLLAATSELDCQQGTRALLQTLGDLGYRASAKKAQICQKQVKYLGYLLKEGQRWLTEARKETVMGQPIPKTPRQLREFLGKAGFCRLFIPGFAEMAAPLYPLTKPGTLFNWGPDQQKAFQEIKQALLTAPALGLPDLTKPFELFVDEKQGYAKGVLTQKLGPWRRPVAYLSKKLDPVAAGWPPCLRMVAAIAVLTKDAGKLTMGQPLVILAPHAVEALVKQPPDRWLSNARMTHYQALLLDTDRVQFGPVVALNPATLLPLPEEGLQHDCLDILAEAHGTRSDLMDQPLPDADHTWYTDGSSFLQEGQRKAGAAVTTETEVIWARALPAGTSAQRAELIALTQALKMAEGKKLNVYTDSRYAFATAHIHGEIYRRRGWLTSEGKEIKNKDEILALLKALFLPKRLSIIHCPGHQKGNSAEARGNRMADQAAREVATRETPETSTLLAGKRTADGSEFEKRTADGSEFESPKKKAKVE

SEQ ID NO: 2339 - protein, 2094 aa, synthetic construct
MPAAKRVKLDGGDKKYSIGLDIGTNSVGWAVITDEYKVPSKKFKVLGNTDRHSIKKNLIGALLFDSGETAEATRLKRTARRRYTRRKNRICYLQEIFSNEMAKVDDSFFHRLEESFLVEEDKKHERHPIFGNIVDEVAYHEKYPTIYHLRKKLVDSTDKADLRLIYLALAHMIKFRGHFLIEGDLNPDNSDVDKLFIQLVQTYNQLFEENPINASGVDAKAILSARLSKSRRLENLIAQLPGEKKNGLFGNLIALSLGLTPNFKSNFDLAEDAKLQLSKDTYDDDLDNLLAQIGDQYADLFLAAKNLSDAILLSDILRVNTEITKAPLSASMIKRYDEHHQDLTLLKALVRQQLPEKYKEIFFDQSKNGYAGYIDGGASQEEFYKFIKPILEKMDGTEELLVKLNREDLLRKQRTFDNGSIPHQIHLGELHAILRRQEDFYPFLKDNREKIEKILTFRIPYYVGPLARGNSRFAWMTRKSEETITPWNFEEVVDKGASAQSFIERMTNFDKNLPNEKVLPKHSLLYEYFTVYNELTKVKYVTEGMRKPAFLSGEQKKAIVDLLFKTNRKVTVKQLKEDYFKKIECFDSVEISGVEDRFNASLGTYHDLLKIIKDKDFLDNEENEDILEDIVLTLTLFEDREMIEERLKTYAHLFDDKVMKQLKRRRYTGWGRLSRKLINGIRDKQSGKTILDFLKSDGFANRNFMQLIHDDSLTFKEDIQKAQVSGQGDSLHEHIANLAGSPAIKKGILQTVKVVDELVKVMGRHKPENIVIEMARENQTTQKGQKNSRERMKRIEEGIKELGSQILKEHPVENTQLQNEKLYLYYLQNGRDMYVDQELDINRLSDYDVDHIVPQSFLKDDSIDNKVLTRSDKARGKSDNVPSEEVVKKMKNYWRQLLNAKLITQRKFDNLTKAERGGLSELDKAGFIKRQLVETRQITKHVAQILDSRMNTKYDENDKLIREVKVITLKSKLVSDFRKDFQFYKVREINNYHHAHDAYLNAVVGTALIKKYPKLESEFVYGDYKVYDVRKMIAKSEQEIGKATAKYFFYSNIMNFFKTEITLANGEIRKRPLIETNGETGEIVWDKGRDFATVRKVLSMPQVNIVKKTEVQTGGFSKESILPKRNSDKLIARKKDWDPKKYGGFDSPTVAYSVLVVAKVEKGKSKKLKSVKELLGITIMERSSFEKNPIDFLEAKGYKEVKKDLIIKLPKYSLFELENGRKRMLASAGELQKGNELALPSKYVNFLYLASHYEKLKGSPEDNEQKQLFVEQHKHYLDEIIEQISEFSKRVILADANLDKVLSAYNKHRDKPIREQAENIIHLFTLTNLGAPAAFKYFDTTIDRKRYTSTKEVLDATLIHQSITGLYETRIDLSQLGGDGGGGSGSSPAPGGTLNIEDEYRLHETSKEPDVSLGSTWLSDFPQAWAETGGMGLAVRQAPLIIPLKATSTPVSIKQYPMSQEARLGIKPHIQRLLDQGILVPCQSPWNTPLLPVKKPGTNDYRPVQDLREVNKRVEDIHPTVPNPYNLLSGLPPSHQWYTVLDLKDAFFCLRLHPTSQPLFAFEWRDPEMGISGQLTWTRLPQGFKNSPTLFNEALHRDLAGFRIQHPDLILLQYVDDLLLAATSELDCQQGTRALLQTLGDLGYRASAKKAQICQKQVKYLGYLLKEGQRWLTEARKETVMGQPIPKTPRQLREFLGKAGFCRLFIPGFAEMAAPLYPLTKPGTLFNWGPDQQKAFQEIKQALLTAPALGLPDLTKPFELFVDEKQGYAKGVLTQKLGPWRRPVAYLSKKLDPVAAGWPPCLRMVAAIAVLTKDAGKLTMGQPLVILAPHAVEALVKQPPDRWLSNARMTHYQALLLDTDRVQFGPVVALNPATLLPLPEEGLQHDCLDILAEAHGTRSDLMDQPLPDADHTWYTDGSSFLQEGQRKAGAAVTTETEVIWARALPAGTSAQRAELIALTQALKMAEGKKLNVYTDSRYAFATAHIHGEIYRRRGWLTSEGKEIKNKDEILALLKALFLPKRLSIIHCPGHQKGNSAEARGNRMADQAAREVATRETPETSTLLAGKRTADGSEFEKRTADGSEFESPKKKAKVE

SEQ ID NO: 2340 - protein, 2091 aa, synthetic construct
MPAAKRVKLDGGDKKYSIGLDIGTNSVGWAVITDEYKVPSKKFKVLGNTDRHSIKKNLIGALLFDSGETAEATRLKRTARRRYTRRKNRICYLQEIFSNEMAKVDDSFFHRLEESFLVEEDKKHERHPIFGNIVDEVAYHEKYPTIYHLRKKLVDSTDKADLRLIYLALAHMIKFRGHFLIEGDLNPDNSDVDKLFIQLVQTYNQLFEENPINASGVDAKAILSARLSKSRRLENLIAQLPGEKKNGLFGNLIALSLGLTPNFKSNFDLAEDAKLQLSKDTYDDDLDNLLAQIGDQYADLFLAAKNLSDAILLSDILRVNTEITKAPLSASMIKRYDEHHQDLTLLKALVRQQLPEKYKEIFFDQSKNGYAGYIDGGASQEEFYKFIKPILEKMDGTEELLVKLNREDLLRKQRTFDNGSIPHQIHLGELHAILRRQEDFYPFLKDNREKIEKILTFRIPYYVGPLARGNSRFAWMTRKSEETITPWNFEEVVDKGASAQSFIERMTNFDKNLPNEKVLPKHSLLYEYFTVYNELTKVKYVTEGMRKPAFLSGEQKKAIVDLLFKTNRKVTVKQLKEDYFKKIECFDSVEISGVEDRFNASLGTYHDLLKIIKDKDFLDNEENEDILEDIVLTLTLFEDREMIEERLKTYAHLFDDKVMKQLKRRRYTGWGRLSRKLINGIRDKQSGKTILDFLKSDGFANRNFMQLIHDDSLTFKEDIQKAQVSGQGDSLHEHIANLAGSPAIKKGILQTVKVVDELVKVMGRHKPENIVIEMARENQTTQKGQKNSRERMKRIEEGIKELGSQILKEHPVENTQLQNEKLYLYYLQNGRDMYVDQELDINRLSDYDVDHIVPQSFLKDDSIDNKVLTRSDKARGKSDNVPSEEVVKKMKNYWRQLLNAKLITQRKFDNLTKAERGGLSELDKAGFIKRQLVETRQITKHVAQILDSRMNTKYDENDKLIREVKVITLKSKLVSDFRKDFQFYKVREINNYHHAHDAYLNAVVGTALIKKYPKLESEFVYGDYKVYDVRKMIAKSEQEIGKATAKYFFYSNIMNFFKTEITLANGEIRKRPLIETNGETGEIVWDKGRDFATVRKVLSMPQVNIVKKTEVQTGGFSKESILPKRNSDKLIARKKDWDPKKYGGFDSPTVAYSVLVVAKVEKGKSKKLKSVKELLGITIMERSSFEKNPIDFLEAKGYKEVKKDLIIKLPKYSLFELENGRKRMLASAGELQKGNELALPSKYVNFLYLASHYEKLKGSPEDNEQKQLFVEQHKHYLDEIIEQISEFSKRVILADANLDKVLSAYNKHRDKPIREQAENIIHLFTLTNLGAPAAFKYFDTTIDRKRYTSTKEVLDATLIHQSITGLYETRIDLSQLGGDGGPAPGGSGGTLNIEDEYRLHETSKEPDVSLGSTWLSDFPQAWAETGGMGLAVRQAPLIIPLKATSTPVSIKQYPMSQEARLGIKPHIQRLLDQGILVPCQSPWNTPLLPVKKPGTNDYRPVQDLREVNKRVEDIHPTVPNPYNLLSGLPPSHQWYTVLDLKDAFFCLRLHPTSQPLFAFEWRDPEMGISGQLTWTRLPQGFKNSPTLFNEALHRDLAGFRIQHPDLILLQYVDDLLLAATSELDCQQGTRALLQTLGDLGYRASAKKAQICQKQVKYLGYLLKEGQRWLTEARKETVMGQPIPKTPRQLREFLGKAGFCRLFIPGFAEMAAPLYPLTKPGTLFNWGPDQQKAFQEIKQALLTAPALGLPDLTKPFELFVDEKQGYAKGVLTQKLGPWRRPVAYLSKKLDPVAAGWPPCLRMVAAIAVLTKDAGKLTMGQPLVILAPHAVEALVKQPPDRWLSNARMTHYQALLLDTDRVQFGPVVALNPATLLPLPEEGLQHDCLDILAEAHGTRSDLMDQPLPDADHTWYTDGSSFLQEGQRKAGAAVTTETEVIWARALPAGTSAQRAELIALTQALKMAEGKKLNVYTDSRYAFATAHIHGEIYRRRGWLTSEGKEIKNKDEILALLKALFLPKRLSIIHCPGHQKGNSAEARGNRMADQAAREVATRETPETSTLLAGKRTADGSEFEKRTADGSEFESPKKKAKVE

SEQ ID NO: 2341 - protein, 2093 aa, synthetic construct
MPAAKRVKLDGGDKKYSIGLDIGTNSVGWAVITDEYKVPSKKFKVLGNTDRHSIKKNLIGALLFDSGETAEATRLKRTARRRYTRRKNRICYLQEIFSNEMAKVDDSFFHRLEESFLVEEDKKHERHPIFGNIVDEVAYHEKYPTIYHLRKKLVDSTDKADLRLIYLALAHMIKFRGHFLIEGDLNPDNSDVDKLFIQLVQTYNQLFEENPINASGVDAKAILSARLSKSRRLENLIAQLPGEKKNGLFGNLIALSLGLTPNFKSNFDLAEDAKLQLSKDTYDDDLDNLLAQIGDQYADLFLAAKNLSDAILLSDILRVNTEITKAPLSASMIKRYDEHHQDLTLLKALVRQQLPEKYKEIFFDQSKNGYAGYIDGGASQEEFYKFIKPILEKMDGTEELLVKLNREDLLRKQRTFDNGSIPHQIHLGELHAILRRQEDFYPFLKDNREKIEKILTFRIPYYVGPLARGNSRFAWMTRKSEETITPWNFEEVVDKGASAQSFIERMTNFDKNLPNEKVLPKHSLLYEYFTVYNELTKVKYVTEGMRKPAFLSGEQKKAIVDLLFKTNRKVTVKQLKEDYFKKIECFDSVEISGVEDRFNASLGTYHDLLKIIKDKDFLDNEENEDILEDIVLTLTLFEDREMIEERLKTYAHLFDDKVMKQLKRRRYTGWGRLSRKLINGIRDKQSGKTILDFLKSDGFANRNFMQLIHDDSLTFKEDIQKAQVSGQGDSLHEHIANLAGSPAIKKGILQTVKVVDELVKVMGRHKPENIVIEMARENQTTQKGQKNSRERMKRIEEGIKELGSQILKEHPVENTQLQNEKLYLYYLQNGRDMYVDQELDINRLSDYDVDHIVPQSFLKDDSIDNKVLTRSDKARGKSDNVPSEEVVKKMKNYWRQLLNAKLITQRKFDNLTKAERGGLSELDKAGFIKRQLVETRQITKHVAQILDSRMNTKYDENDKLIREVKVITLKSKLVSDFRKDFQFYKVREINNYHHAHDAYLNAVVGTALIKKYPKLESEFVYGDYKVYDVRKMIAKSEQEIGKATAKYFFYSNIMNFFKTEITLANGEIRKRPLIETNGETGEIVWDKGRDFATVRKVLSMPQVNIVKKTEVQTGGFSKESILPKRNSDKLIARKKDWDPKKYGGFDSPTVAYSVLVVAKVEKGKSKKLKSVKELLGITIMERSSFEKNPIDFLEAKGYKEVKKDLIIKLPKYSLFELENGRKRMLASAGELQKGNELALPSKYVNFLYLASHYEKLKGSPEDNEQKQLFVEQHKHYLDEIIEQISEFSKRVILADANLDKVLSAYNKHRDKPIREQAENIIHLFTLTNLGAPAAFKYFDTTIDRKRYTSTKEVLDATLIHQSITGLYETRIDLSQLGGDGGEAAAKGGSGGTLNIEDEYRLHETSKEPDVSLGSTWLSDFPQAWAETGGMGLAVRQAPLIIPLKATSTPVSIKQYPMSQEARLGIKPHIQRLLDQGILVPCQSPWNTPLLPVKKPGTNDYRPVQDLREVNKRVEDIHPTVPNPYNLLSGLPPSHQWYTVLDLKDAFFCLRLHPTSQPLFAFEWRDPEMGISGQLTWTRLPQGFKNSPTLFNEALHRDLAGFRIQHPDLILLQYVDDLLLAATSELDCQQGTRALLQTLGDLGYRASAKKAQICQKQVKYLGYLLKEGQRWLTEARKETVMGQPIPKTPRQLREFLGKAGFCRLFIPGFAEMAAPLYPLTKPGTLFNWGPDQQKAFQEIKQALLTAPALGLPDLTKPFELFVDEKQGYAKGVLTQKLGPWRRPVAYLSKKLDPVAAGWPPCLRMVAAIAVLTKDAGKLTMGQPLVILAPHAVEALVKQPPDRWLSNARMTHYQALLLDTDRVQFGPVVALNPATLLPLPEEGLQHDCLDILAEAHGTRSDLMDQPLPDADHTWYTDGSSFLQEGQRKAGAAVTTETEVIWARALPAGTSAQRAELIALTQALKMAEGKKLNVYTDSRYAFATAHIHGEIYRRRGWLTSEGKEIKNKDEILALLKALFLPKRLSIIHCPGHQKGNSAEARGNRMADQAAREVATRETPETSTLLAGKRTADGSEFEKRTADGSEFESPKKKAKVE

SEQ ID NO: 2342 - protein, 2093 aa, synthetic construct
MPAAKRVKLDGGDKKYSIGLDIGTNSVGWAVITDEYKVPSKKFKVLGNTDRHSIKKNLIGALLFDSGETAEATRLKRTARRRYTRRKNRICYLQEIFSNEMAKVDDSFFHRLEESFLVEEDKKHERHPIFGNIVDEVAYHEKYPTIYHLRKKLVDSTDKADLRLIYLALAHMIKFRGHFLIEGDLNPDNSDVDKLFIQLVQTYNQLFEENPINASGVDAKAILSARLSKSRRLENLIAQLPGEKKNGLFGNLIALSLGLTPNFKSNFDLAEDAKLQLSKDTYDDDLDNLLAQIGDQYADLFLAAKNLSDAILLSDILRVNTEITKAPLSASMIKRYDEHHQDLTLLKALVRQQLPEKYKEIFFDQSKNGYAGYIDGGASQEEFYKFIKPILEKMDGTEELLVKLNREDLLRKQRTFDNGSIPHQIHLGELHAILRRQEDFYPFLKDNREKIEKILTFRIPYYVGPLARGNSRFAWMTRKSEETITPWNFEEVVDKGASAQSFIERMTNFDKNLPNEKVLPKHSLLYEYFTVYNELTKVKYVTEGMRKPAFLSGEQKKAIVDLLFKTNRKVTVKQLKEDYFKKIECFDSVEISGVEDRFNASLGTYHDLLKIIKDKDFLDNEENEDILEDIVLTLTLFEDREMIEERLKTYAHLFDDKVMKQLKRRRYTGWGRLSRKLINGIRDKQSGKTILDFLKSDGFANRNFMQLIHDDSLTFKEDIQKAQVSGQGDSLHEHIANLAGSPAIKKGILQTVKVVDELVKVMGRHKPENIVIEMARENQTTQKGQKNSRERMKRIEEGIKELGSQILKEHPVENTQLQNEKLYLYYLQNGRDMYVDQELDINRLSDYDVDHIVPQSFLKDDSIDNKVLTRSDKARGKSDNVPSEEVVKKMKNYWRQLLNAKLITQRKFDNLTKAERGGLSELDKAGFIKRQLVETRQITKHVAQILDSRMNTKYDENDKLIREVKVITLKSKLVSDFRKDFQFYKVREINNYHHAHDAYLNAVVGTALIKKYPKLESEFVYGDYKVYDVRKMIAKSEQEIGKATAKYFFYSNIMNFFKTEITLANGEIRKRPLIETNGETGEIVWDKGRDFATVRKVLSMPQVNIVKKTEVQTGGFSKESILPKRNSDKLIARKKDWDPKKYGGFDSPTVAYSVLVVAKVEKGKSKKLKSVKELLGITIMERSSFEKNPIDFLEAKGYKEVKKDLIIKLPKYSLFELENGRKRMLASAGELQKGNELALPSKYVNFLYLASHYEKLKGSPEDNEQKQLFVEQHKHYLDEIIEQISEFSKRVILADANLDKVLSAYNKHRDKPIREQAENIIHLFTLTNLGAPAAFKYFDTTIDRKRYTSTKEVLDATLIHQSITGLYETRIDLSQLGGDGGGGGEAAAKGGTLNIEDEYRLHETSKEPDVSLGSTWLSDFPQAWAETGGMGLAVRQAPLIIPLKATSTPVSIKQYPMSQEARLGIKPHIQRLLDQGILVPCQSPWNTPLLPVKKPGTNDYRPVQDLREVNKRVEDIHPTVPNPYNLLSGLPPSHQWYTVLDLKDAFFCLRLHPTSQPLFAFEWRDPEMGISGQLTWTRLPQGFKNSPTLFNEALHRDLAGFRIQHPDLILLQYVDDLLLAATSELDCQQGTRALLQTLGDLGYRASAKKAQICQKQVKYLGYLLKEGQRWLTEARKETVMGQPIPKTPRQLREFLGKAGFCRLFIPGFAEMAAPLYPLTKPGTLFNWGPDQQKAFQEIKQALLTAPALGLPDLTKPFELFVDEKQGYAKGVLTQKLGPWRRPVAYLSKKLDPVAAGWPPCLRMVAAIAVLTKDAGKLTMGQPLVILAPHAVEALVKQPPDRWLSNARMTHYQALLLDTDRVQFGPVVALNPATLLPLPEEGLQHDCLDILAEAHGTRSDLMDQPLPDADHTWYTDGSSFLQEGQRKAGAAVTTETEVIWARALPAGTSAQRAELIALTQALKMAEGKKLNVYTDSRYAFATAHIHGEIYRRRGWLTSEGKEIKNKDEILALLKALFLPKRLSIIHCPGHQKGNSAEARGNRMADQAAREVATRETPETSTLLAGKRTADGSEFEKRTADGSEFESPKKKAKVE

SEQ ID NO: 2343 - protein, 2131 aa, synthetic construct
MPAAKRVKLDGGDKKYSIGLDIGTNSVGWAVITDEYKVPSKKFKVLGNTDRHSIKKNLIGALLFDSGETAEATRLKRTARRRYTRRKNRICYLQEIFSNEMAKVDDSFFHRLEESFLVEEDKKHERHPIFGNIVDEVAYHEKYPTIYHLRKKLVDSTDKADLRLIYLALAHMIKFRGHFLIEGDLNPDNSDVDKLFIQLVQTYNQLFEENPINASGVDAKAILSARLSKSRRLENLIAQLPGEKKNGLFGNLIALSLGLTPNFKSNFDLAEDAKLQLSKDTYDDDLDNLLAQIGDQYADLFLAAKNLSDAILLSDILRVNTEITKAPLSASMIKRYDEHHQDLTLLKALVRQQLPEKYKEIFFDQSKNGYAGYIDGGASQEEFYKFIKPILEKMDGTEELLVKLNREDLLRKQRTFDNGSIPHQIHLGELHAILRRQEDFYPFLKDNREKIEKILTFRIPYYVGPLARGNSRFAWMTRKSEETITPWNFEEVVDKGASAQSFIERMTNFDKNLPNEKVLPKHSLLYEYFTVYNELTKVKYVTEGMRKPAFLSGEQKKAIVDLLFKTNRKVTVKQLKEDYFKKIECFDSVEISGVEDRFNASLGTYHDLLKIIKDKDFLDNEENEDILEDIVLTLTLFEDREMIEERLKTYAHLFDDKVMKQLKRRRYTGWGRLSRKLINGIRDKQSGKTILDFLKSDGFANRNFMQLIHDDSLTFKEDIQKAQVSGQGDSLHEHIANLAGSPAIKKGILQTVKVVDELVKVMGRHKPENIVIEMARENQTTQKGQKNSRERMKRIEEGIKELGSQILKEHPVENTQLQNEKLYLYYLQNGRDMYVDQELDINRLSDYDVDHIVPQSFLKDDSIDNKVLTRSDKARGKSDNVPSEEVVKKMKNYWRQLLNAKLITQRKFDNLTKAERGGLSELDKAGFIKRQLVETRQITKHVAQILDSRMNTKYDENDKLIREVKVITLKSKLVSDFRKDFQFYKVREINNYHHAHDAYLNAVVGTALIKKYPKLESEFVYGDYKVYDVRKMIAKSEQEIGKATAKYFFYSNIMNFFKTEITLANGEIRKRPLIETNGETGEIVWDKGRDFATVRKVLSMPQVNIVKKTEVQTGGFSKESILPKRNSDKLIARKKDWDPKKYGGFDSPTVAYSVLVVAKVEKGKSKKLKSVKELLGITIMERSSFEKNPIDFLEAKGYKEVKKDLIIKLPKYSLFELENGRKRMLASAGELQKGNELALPSKYVNFLYLASHYEKLKGSPEDNEQKQLFVEQHKHYLDEIIEQISEFSKRVILADANLDKVLSAYNKHRDKPIREQAENIIHLFTLTNLGAPAAFKYFDTTIDRKRYTSTKEVLDATLIHQSITGLYETRIDLSQLGGDGGAEAAAKEAAAKEAAAKEAAAKALEAEAAAKEAAAKEAAAKEAAAKAGGTLNIEDEYRLHETSKEPDVSLGSTWLSDFPQAWAETGGMGLAVRQAPLIIPLKATSTPVSIKQYPMSQEARLGIKPHIQRLLDQGILVPCQSPWNTPLLPVKKPGTNDYRPVQDLREVNKRVEDIHPTVPNPYNLLSGLPPSHQWYTVLDLKDAFFCLRLHPTSQPLFAFEWRDPEMGISGQLTWTRLPQGFKNSPTLFNEALHRDLAGFRIQHPDLILLQYVDDLLLAATSELDCQQGTRALLQTLGDLGYRASAKKAQICQKQVKYLGYLLKEGQRWLTEARKETVMGQPIPKTPRQLREFLGKAGFCRLFIPGFAEMAAPLYPLTKPGTLFNWGPDQQKAFQEIKQALLTAPALGLPDLTKPFELFVDEKQGYAKGVLTQKLGPWRRPVAYLSKKLDPVAAGWPPCLRMVAAIAVLTKDAGKLTMGQPLVILAPHAVEALVKQPPDRWLSNARMTHYQALLLDTDRVQFGPVVALNPATLLPLPEEGLQHDCLDILAEAHGTRSDLMDQPLPDADHTWYTDGSSFLQEGQRKAGAAVTTETEVIWARALPAGTSAQRAELIALTQALKMAEGKKLNVYTDSRYAFATAHIHGEIYRRRGWLTSEGKEIKNKDEILALLKALFLPKRLSIIHCPGHQKGNSAEARGNRMADQAAREVATRETPETSTLLAGKRTADGSEFEKRTADGSEFESPKKKAKVE

SEQ ID NO: 2344 - protein, 2096 aa, synthetic construct
MPAAKRVKLDGGDKKYSIGLDIGTNSVGWAVITDEYKVPSKKFKVLGNTDRHSIKKNLIGALLFDSGETAEATRLKRTARRRYTRRKNRICYLQEIFSNEMAKVDDSFFHRLEESFLVEEDKKHERHPIFGNIVDEVAYHEKYPTIYHLRKKLVDSTDKADLRLIYLALAHMIKFRGHFLIEGDLNPDNSDVDKLFIQLVQTYNQLFEENPINASGVDAKAILSARLSKSRRLENLIAQLPGEKKNGLFGNLIALSLGLTPNFKSNFDLAEDAKLQLSKDTYDDDLDNLLAQIGDQYADLFLAAKNLSDAILLSDILRVNTEITKAPLSASMIKRYDEHHQDLTLLKALVRQQLPEKYKEIFFDQSKNGYAGYIDGGASQEEFYKFIKPILEKMDGTEELLVKLNREDLLRKQRTFDNGSIPHQIHLGELHAILRRQEDFYPFLKDNREKIEKILTFRIPYYVGPLARGNSRFAWMTRKSEETITPWNFEEVVDKGASAQSFIERMTNFDKNLPNEKVLPKHSLLYEYFTVYNELTKVKYVTEGMRKPAFLSGEQKKAIVDLLFKTNRKVTVKQLKEDYFKKIECFDSVEISGVEDRFNASLGTYHDLLKIIKDKDFLDNEENEDILEDIVLTLTLFEDREMIEERLKTYAHLFDDKVMKQLKRRRYTGWGRLSRKLINGIRDKQSGKTILDFLKSDGFANRNFMQLIHDDSLTFKEDIQKAQVSGQGDSLHEHIANLAGSPAIKKGILQTVKVVDELVKVMGRHKPENIVIEMARENQTTQKGQKNSRERMKRIEEGIKELGSQILKEHPVENTQLQNEKLYLYYLQNGRDMYVDQELDINRLSDYDVDHIVPQSFLKDDSIDNKVLTRSDKARGKSDNVPSEEVVKKMKNYWRQLLNAKLITQRKFDNLTKAERGGLSELDKAGFIKRQLVETRQITKHVAQILDSRMNTKYDENDKLIREVKVITLKSKLVSDFRKDFQFYKVREINNYHHAHDAYLNAVVGTALIKKYPKLESEFVYGDYKVYDVRKMIAKSEQEIGKATAKYFFYSNIMNFFKTEITLANGEIRKRPLIETNGETGEIVWDKGRDFATVRKVLSMPQVNIVKKTEVQTGGFSKESILPKRNSDKLIARKKDWDPKKYGGFDSPTVAYSVLVVAKVEKGKSKKLKSVKELLGITIMERSSFEKNPIDFLEAKGYKEVKKDLIIKLPKYSLFELENGRKRMLASAGELQKGNELALPSKYVNFLYLASHYEKLKGSPEDNEQKQLFVEQHKHYLDEIIEQISEFSKRVILADANLDKVLSAYNKHRDKPIREQAENIIHLFTLTNLGAPAAFKYFDTTIDRKRYTSTKEVLDATLIHQSITGLYETRIDLSQLGGDGGEAAAKGGGGGSGGTLNIEDEYRLHETSKEPDVSLGSTWLSDFPQAWAETGGMGLAVRQAPLIIPLKATSTPVSIKQYPMSQEARLGIKPHIQRLLDQGILVPCQSPWNTPLLPVKKPGTNDYRPVQDLREVNKRVEDIHPTVPNPYNLLSGLPPSHQWYTVLDLKDAFFCLRLHPTSQPLFAFEWRDPEMGISGQLTWTRLPQGFKNSPTLFNEALHRDLAGFRIQHPDLILLQYVDDLLLAATSELDCQQGTRALLQTLGDLGYRASAKKAQICQKQVKYLGYLLKEGQRWLTEARKETVMGQPIPKTPRQLREFLGKAGFCRLFIPGFAEMAAPLYPLTKPGTLFNWGPDQQKAFQEIKQALLTAPALGLPDLTKPFELFVDEKQGYAKGVLTQKLGPWRRPVAYLSKKLDPVAAGWPPCLRMVAAIAVLTKDAGKLTMGQPLVILAPHAVEALVKQPPDRWLSNARMTHYQALLLDTDRVQFGPVVALNPATLLPLPEEGLQHDCLDILAEAHGTRSDLMDQPLPDADHTWYTDGSSFLQEGQRKAGAAVTTETEVIWARALPAGTSAQRAELIALTQALKMAEGKKLNVYTDSRYAFATAHIHGEIYRRRGWLTSEGKEIKNKDEILALLKALFLPKRLSIIHCPGHQKGNSAEARGNRMADQAAREVATRETPETSTLLAGKRTADGSEFEKRTADGSEFESPKKKAKVE

SEQ ID NO: 2345 - protein, 2096 aa, synthetic construct
MPAAKRVKLDGGDKKYSIGLDIGTNSVGWAVITDEYKVPSKKFKVLGNTDRHSIKKNLIGALLFDSGETAEATRLKRTARRRYTRRKNRICYLQEIFSNEMAKVDDSFFHRLEESFLVEEDKKHERHPIFGNIVDEVAYHEKYPTIYHLRKKLVDSTDKADLRLIYLALAHMIKFRGHFLIEGDLNPDNSDVDKLFIQLVQTYNQLFEENPINASGVDAKAILSARLSKSRRLENLIAQLPGEKKNGLFGNLIALSLGLTPNFKSNFDLAEDAKLQLSKDTYDDDLDNLLAQIGDQYADLFLAAKNLSDAILLSDILRVNTEITKAPLSASMIKRYDEHHQDLTLLKALVRQQLPEKYKEIFFDQSKNGYAGYIDGGASQEEFYKFIKPILEKMDGTEELLVKLNREDLLRKQRTFDNGSIPHQIHLGELHAILRRQEDFYPFLKDNREKIEKILTFRIPYYVGPLARGNSRFAWMTRKSEETITPWNFEEVVDKGASAQSFIERMTNFDKNLPNEKVLPKHSLLYEYFTVYNELTKVKYVTEGMRKPAFLSGEQKKAIVDLLFKTNRKVTVKQLKEDYFKKIECFDSVEISGVEDRFNASLGTYHDLLKIIKDKDFLDNEENEDILEDIVLTLTLFEDREMIEERLKTYAHLFDDKVMKQLKRRRYTGWGRLSRKLINGIRDKQSGKTILDFLKSDGFANRNFMQLIHDDSLTFKEDIQKAQVSGQGDSLHEHIANLAGSPAIKKGILQTVKVVDELVKVMGRHKPENIVIEMARENQTTQKGQKNSRERMKRIEEGIKELGSQILKEHPVENTQLQNEKLYLYYLQNGRDMYVDQELDINRLSDYDVDHIVPQSFLKDDSIDNKVLTRSDKARGKSDNVPSEEVVKKMKNYWRQLLNAKLITQRKFDNLTKAERGGLSELDKAGFIKRQLVETRQITKHVAQILDSRMNTKYDENDKLIREVKVITLKSKLVSDFRKDFQFYKVREINNYHHAHDAYLNAVVGTALIKKYPKLESEFVYGDYKVYDVRKMIAKSEQEIGKATAKYFFYSNIMNFFKTEITLANGEIRKRPLIETNGETGEIVWDKGRDFATVRKVLSMPQVNIVKKTEVQTGGFSKESILPKRNSDKLIARKKDWDPKKYGGFDSPTVAYSVLVVAKVEKGKSKKLKSVKELLGITIMERSSFEKNPIDFLEAKGYKEVKKDLIIKLPKYSLFELENGRKRMLASAGELQKGNELALPSKYVNFLYLASHYEKLKGSPEDNEQKQLFVEQHKHYLDEIIEQISEFSKRVILADANLDKVLSAYNKHRDKPIREQAENIIHLFTLTNLGAPAAFKYFDTTIDRKRYTSTKEVLDATLIHQSITGLYETRIDLSQLGGDGGGSSPAPEAAAKGGTLNIEDEYRLHETSKEPDVSLGSTWLSDFPQAWAETGGMGLAVRQAPLIIPLKATSTPVSIKQYPMSQEARLGIKPHIQRLLDQGILVPCQSPWNTPLLPVKKPGTNDYRPVQDLREVNKRVEDIHPTVPNPYNLLSGLPPSHQWYTVLDLKDAFFCLRLHPTSQPLFAFEWRDPEMGISGQLTWTRLPQGFKNSPTLFNEALHRDLAGFRIQHPDLILLQYVDDLLLAATSELDCQQGTRALLQTLGDLGYRASAKKAQICQKQVKYLGYLLKEGQRWLTEARKETVMGQPIPKTPRQLREFLGKAGFCRLFIPGFAEMAAPLYPLTKPGTLFNWGPDQQKAFQEIKQALLTAPALGLPDLTKPFELFVDEKQGYAKGVLTQKLGPWRRPVAYLSKKLDPVAAGWPPCLRMVAAIAVLTKDAGKLTMGQPLVILAPHAVEALVKQPPDRWLSNARMTHYQALLLDTDRVQFGPVVALNPATLLPLPEEGLQHDCLDILAEAHGTRSDLMDQPLPDADHTWYTDGSSFLQEGQRKAGAAVTTETEVIWARALPAGTSAQRAELIALTQALKMAEGKKLNVYTDSRYAFATAHIHGEIYRRRGWLTSEGKEIKNKDEILALLKALFLPKRLSIIHCPGHQKGNSAEARGNRMADQAAREVATRETPETSTLLAGKRTADGSEFEKRTADGSEFESPKKKAKVE

SEQ ID NO: 2346 - protein, 2094 aa, synthetic construct
MPAAKRVKLDGGDKKYSIGLDIGTNSVGWAVITDEYKVPSKKFKVLGNTDRHSIKKNLIGALLFDSGETAEATRLKRTARRRYTRRKNRICYLQEIFSNEMAKVDDSFFHRLEESFLVEEDKKHERHPIFGNIVDEVAYHEKYPTIYHLRKKLVDSTDKADLRLIYLALAHMIKFRGHFLIEGDLNPDNSDVDKLFIQLVQTYNQLFEENPINASGVDAKAILSARLSKSRRLENLIAQLPGEKKNGLFGNLIALSLGLTPNFKSNFDLAEDAKLQLSKDTYDDDLDNLLAQIGDQYADLFLAAKNLSDAILLSDILRVNTEITKAPLSASMIKRYDEHHQDLTLLKALVRQQLPEKYKEIFFDQSKNGYAGYIDGGASQEEFYKFIKPILEKMDGTEELLVKLNREDLLRKQRTFDNGSIPHQIHLGELHAILRRQEDFYPFLKDNREKIEKILTFRIPYYVGPLARGNSRFAWMTRKSEETITPWNFEEVVDKGASAQSFIERMTNFDKNLPNEKVLPKHSLLYEYFTVYNELTKVKYVTEGMRKPAFLSGEQKKAIVDLLFKTNRKVTVKQLKEDYFKKIECFDSVEISGVEDRFNASLGTYHDLLKIIKDKDFLDNEENEDILEDIVLTLTLFEDREMIEERLKTYAHLFDDKVMKQLKRRRYTGWGRLSRKLINGIRDKQSGKTILDFLKSDGFANRNFMQLIHDDSLTFKEDIQKAQVSGQGDSLHEHIANLAGSPAIKKGILQTVKVVDELVKVMGRHKPENIVIEMARENQTTQKGQKNSRERMKRIEEGIKELGSQILKEHPVENTQLQNEKLYLYYLQNGRDMYVDQELDINRLSDYDVDHIVPQSFLKDDSIDNKVLTRSDKARGKSDNVPSEEVVKKMKNYWRQLLNAKLITQRKFDNLTKAERGGLSELDKAGFIKRQLVETRQITKHVAQILDSRMNTKYDENDKLIREVKVITLKSKLVSDFRKDFQFYKVREINNYHHAHDAYLNAVVGTALIKKYPKLESEFVYGDYKVYDVRKMIAKSEQEIGKATAKYFFYSNIMNFFKTEITLANGEIRKRPLIETNGETGEIVWDKGRDFATVRKVLSMPQVNIVKKTEVQTGGFSKESILPKRNSDKLIARKKDWDPKKYGGFDSPTVAYSVLVVAKVEKGKSKKLKSVKELLGITIMERSSFEKNPIDFLEAKGYKEVKKDLIIKLPKYSLFELENGRKRMLASAGELQKGNELALPSKYVNFLYLASHYEKLKGSPEDNEQKQLFVEQHKHYLDEIIEQISEFSKRVILADANLDKVLSAYNKHRDKPIREQAENIIHLFTLTNLGAPAAFKYFDTTIDRKRYTSTKEVLDATLIHQSITGLYETRIDLSQLGGDGGGGGGSSPAPGGTLNIEDEYRLHETSKEPDVSLGSTWLSDFPQAWAETGGMGLAVRQAPLIIPLKATSTPVSIKQYPMSQEARLGIKPHIQRLLDQGILVPCQSPWNTPLLPVKKPGTNDYRPVQDLREVNKRVEDIHPTVPNPYNLLSGLPPSHQWYTVLDLKDAFFCLRLHPTSQPLFAFEWRDPEMGISGQLTWTRLPQGFKNSPTLFNEALHRDLAGFRIQHPDLILLQYVDDLLLAATSELDCQQGTRALLQTLGDLGYRASAKKAQICQKQVKYLGYLLKEGQRWLTEARKETVMGQPIPKTPRQLREFLGKAGFCRLFIPGFAEMAAPLYPLTKPGTLFNWGPDQQKAFQEIKQALLTAPALGLPDLTKPFELFVDEKQGYAKGVLTQKLGPWRRPVAYLSKKLDPVAAGWPPCLRMVAAIAVLTKDAGKLTMGQPLVILAPHAVEALVKQPPDRWLSNARMTHYQALLLDTDRVQFGPVVALNPATLLPLPEEGLQHDCLDILAEAHGTRSDLMDQPLPDADHTWYTDGSSFLQEGQRKAGAAVTTETEVIWARALPAGTSAQRAELIALTQALKMAEGKKLNVYTDSRYAFATAHIHGEIYRRRGWLTSEGKEIKNKDEILALLKALFLPKRLSIIHCPGHQKGNSAEARGNRMADQAAREVATRETPETSTLLAGKRTADGSEFEKRTADGSEFESPKKKAKVE

SEQ ID NO: 2347 - protein, 2096 aa, synthetic construct
MPAAKRVKLDGGDKKYSIGLDIGTNSVGWAVITDEYKVPSKKFKVLGNTDRHSIKKNLIGALLFDSGETAEATRLKRTARRRYTRRKNRICYLQEIFSNEMAKVDDSFFHRLEESFLVEEDKKHERHPIFGNIVDEVAYHEKYPTIYHLRKKLVDSTDKADLRLIYLALAHMIKFRGHFLIEGDLNPDNSDVDKLFIQLVQTYNQLFEENPINASGVDAKAILSARLSKSRRLENLIAQLPGEKKNGLFGNLIALSLGLTPNFKSNFDLAEDAKLQLSKDTYDDDLDNLLAQIGDQYADLFLAAKNLSDAILLSDILRVNTEITKAPLSASMIKRYDEHHQDLTLLKALVRQQLPEKYKEIFFDQSKNGYAGYIDGGASQEEFYKFIKPILEKMDGTEELLVKLNREDLLRKQRTFDNGSIPHQIHLGELHAILRRQEDFYPFLKDNREKIEKILTFRIPYYVGPLARGNSRFAWMTRKSEETITPWNFEEVVDKGASAQSFIERMTNFDKNLPNEKVLPKHSLLYEYFTVYNELTKVKYVTEGMRKPAFLSGEQKKAIVDLLFKTNRKVTVKQLKEDYFKKIECFDSVEISGVEDRFNASLGTYHDLLKIIKDKDFLDNEENEDILEDIVLTLTLFEDREMIEERLKTYAHLFDDKVMKQLKRRRYTGWGRLSRKLINGIRDKQSGKTILDFLKSDGFANRNFMQLIHDDSLTFKEDIQKAQVSGQGDSLHEHIANLAGSPAIKKGILQTVKVVDELVKVMGRHKPENIVIEMARENQTTQKGQKNSRERMKRIEEGIKELGSQILKEHPVENTQLQNEKLYLYYLQNGRDMYVDQELDINRLSDYDVDHIVPQSFLKDDSIDNKVLTRSDKARGKSDNVPSEEVVKKMKNYWRQLLNAKLITQRKFDNLTKAERGGLSELDKAGFIKRQLVETRQITKHVAQILDSRMNTKYDENDKLIREVKVITLKSKLVSDFRKDFQFYKVREINNYHHAHDAYLNAVVGTALIKKYPKLESEFVYGDYKVYDVRKMIAKSEQEIGKATAKYFFYSNIMNFFKTEITLANGEIRKRPLIETNGETGEIVWDKGRDFATVRKVLSMPQVNIVKKTEVQTGGFSKESILPKRNSDKLIARKKDWDPKKYGGFDSPTVAYSVLVVAKVEKGKSKKLKSVKELLGITIMERSSFEKNPIDFLEAKGYKEVKKDLIIKLPKYSLFELENGRKRMLASAGELQKGNELALPSKYVNFLYLASHYEKLKGSPEDNEQKQLFVEQHKHYLDEIIEQISEFSKRVILADANLDKVLSAYNKHRDKPIREQAENIIHLFTLTNLGAPAAFKYFDTTIDRKRYTSTKEVLDATLIHQSITGLYETRIDLSQLGGDGGPAPEAAAKGSSGGTLNIEDEYRLHETSKEPDVSLGSTWLSDFPQAWAETGGMGLAVRQAPLIIPLKATSTPVSIKQYPMSQEARLGIKPHIQRLLDQGILVPCQSPWNTPLLPVKKPGTNDYRPVQDLREVNKRVEDIHPTVPNPYNLLSGLPPSHQWYTVLDLKDAFFCLRLHPTSQPLFAFEWRDPEMGISGQLTWTRLPQGFKNSPTLFNEALHRDLAGFRIQHPDLILLQYVDDLLLAATSELDCQQGTRALLQTLGDLGYRASAKKAQICQKQVKYLGYLLKEGQRWLTEARKETVMGQPIPKTPRQLREFLGKAGFCRLFIPGFAEMAAPLYPLTKPGTLFNWGPDQQKAFQEIKQALLTAPALGLPDLTKPFELFVDEKQGYAKGVLTQKLGPWRRPVAYLSKKLDPVAAGWPPCLRMVAAIAVLTKDAGKLTMGQPLVILAPHAVEALVKQPPDRWLSNARMTHYQALLLDTDRVQFGPVVALNPATLLPLPEEGLQHDCLDILAEAHGTRSDLMDQPLPDADHTWYTDGSSFLQEGQRKAGAAVTTETEVIWARALPAGTSAQRAELIALTQALKMAEGKKLNVYTDSRYAFATAHIHGEIYRRRGWLTSEGKEIKNKDEILALLKALFLPKRLSIIHCPGHQKGNSAEARGNRMADQAAREVATRETPETSTLLAGKRTADGSEFEKRTADGSEFESPKKKAKVE

SEQ ID NO: 2348 - protein, 2093 aa, synthetic construct
MPAAKRVKLDGGDKKYSIGLDIGTNSVGWAVITDEYKVPSKKFKVLGNTDRHSIKKNLIGALLFDSGETAEATRLKRTARRRYTRRKNRICYLQEIFSNEMAKVDDSFFHRLEESFLVEEDKKHERHPIFGNIVDEVAYHEKYPTIYHLRKKLVDSTDKADLRLIYLALAHMIKFRGHFLIEGDLNPDNSDVDKLFIQLVQTYNQLFEENPINASGVDAKAILSARLSKSRRLENLIAQLPGEKKNGLFGNLIALSLGLTPNFKSNFDLAEDAKLQLSKDTYDDDLDNLLAQIGDQYADLFLAAKNLSDAILLSDILRVNTEITKAPLSASMIKRYDEHHQDLTLLKALVRQQLPEKYKEIFFDQSKNGYAGYIDGGASQEEFYKFIKPILEKMDGTEELLVKLNREDLLRKQRTFDNGSIPHQIHLGELHAILRRQEDFYPFLKDNREKIEKILTFRIPYYVGPLARGNSRFAWMTRKSEETITPWNFEEVVDKGASAQSFIERMTNFDKNLPNEKVLPKHSLLYEYFTVYNELTKVKYVTEGMRKPAFLSGEQKKAIVDLLFKTNRKVTVKQLKEDYFKKIECFDSVEISGVEDRFNASLGTYHDLLKIIKDKDFLDNEENEDILEDIVLTLTLFEDREMIEERLKTYAHLFDDKVMKQLKRRRYTGWGRLSRKLINGIRDKQSGKTILDFLKSDGFANRNFMQLIHDDSLTFKEDIQKAQVSGQGDSLHEHIANLAGSPAIKKGILQTVKVVDELVKVMGRHKPENIVIEMARENQTTQKGQKNSRERMKRIEEGIKELGSQILKEHPVENTQLQNEKLYLYYLQNGRDMYVDQELDINRLSDYDVDHIVPQSFLKDDSIDNKVLTRSDKARGKSDNVPSEEVVKKMKNYWRQLLNAKLITQRKFDNLTKAERGGLSELDKAGFIKRQLVETRQITKHVAQILDSRMNTKYDENDKLIREVKVITLKSKLVSDFRKDFQFYKVREINNYHHAHDAYLNAVVGTALIKKYPKLESEFVYGDYKVYDVRKMIAKSEQEIGKATAKYFFYSNIMNFFKTEITLANGEIRKRPLIETNGETGEIVWDKGRDFATVRKVLSMPQVNIVKKTEVQTGGFSKESILPKRNSDKLIARKKDWDPKKYGGFDSPTVAYSVLVVAKVEKGKSKKLKSVKELLGITIMERSSFEKNPIDFLEAKGYKEVKKDLIIKLPKYSLFELENGRKRMLASAGELQKGNELALPSKYVNFLYLASHYEKLKGSPEDNEQKQLFVEQHKHYLDEIIEQISEFSKRVILADANLDKVLSAYNKHRDKPIREQAENIIHLFTLTNLGAPAAFKYFDTTIDRKRYTSTKEVLDATLIHQSITGLYETRIDLSQLGGDGGEAAAKGGGGGTLNIEDEYRLHETSKEPDVSLGSTWLSDFPQAWAETGGMGLAVRQAPLIIPLKATSTPVSIKQYPMSQEARLGIKPHIQRLLDQGILVPCQSPWNTPLLPVKKPGTNDYRPVQDLREVNKRVEDIHPTVPNPYNLLSGLPPSHQWYTVLDLKDAFFCLRLHPTSQPLFAFEWRDPEMGISGQLTWTRLPQGFKNSPTLFNEALHRDLAGFRIQHPDLILLQYVDDLLLAATSELDCQQGTRALLQTLGDLGYRASAKKAQICQKQVKYLGYLLKEGQRWLTEARKETVMGQPIPKTPRQLREFLGKAGFCRLFIPGFAEMAAPLYPLTKPGTLFNWGPDQQKAFQEIKQALLTAPALGLPDLTKPFELFVDEKQGYAKGVLTQKLGPWRRPVAYLSKKLDPVAAGWPPCLRMVAAIAVLTKDAGKLTMGQPLVILAPHAVEALVKQPPDRWLSNARMTHYQALLLDTDRVQFGPVVALNPATLLPLPEEGLQHDCLDILAEAHGTRSDLMDQPLPDADHTWYTDGSSFLQEGQRKAGAAVTTETEVIWARALPAGTSAQRAELIALTQALKMAEGKKLNVYTDSRYAFATAHIHGEIYRRRGWLTSEGKEIKNKDEILALLKALFLPKRLSIIHCPGHQKGNSAEARGNRMADQAAREVATRETPETSTLLAGKRTADGSEFEKRTADGSEFESPKKKAKVE

SEQ ID NO: 2349 - protein, 2093 aa, synthetic construct
MPAAKRVKLDGGDKKYSIGLDIGTNSVGWAVITDEYKVPSKKFKVLGNTDRHSIKKNLIGALLFDSGETAEATRLKRTARRRYTRRKNRICYLQEIFSNEMAKVDDSFFHRLEESFLVEEDKKHERHPIFGNIVDEVAYHEKYPTIYHLRKKLVDSTDKADLRLIYLALAHMIKFRGHFLIEGDLNPDNSDVDKLFIQLVQTYNQLFEENPINASGVDAKAILSARLSKSRRLENLIAQLPGEKKNGLFGNLIALSLGLTPNFKSNFDLAEDAKLQLSKDTYDDDLDNLLAQIGDQYADLFLAAKNLSDAILLSDILRVNTEITKAPLSASMIKRYDEHHQDLTLLKALVRQQLPEKYKEIFFDQSKNGYAGYIDGGASQEEFYKFIKPILEKMDGTEELLVKLNREDLLRKQRTFDNGSIPHQIHLGELHAILRRQEDFYPFLKDNREKIEKILTFRIPYYVGPLARGNSRFAWMTRKSEETITPWNFEEVVDKGASAQSFIERMTNFDKNLPNEKVLPKHSLLYEYFTVYNELTKVKYVTEGMRKPAFLSGEQKKAIVDLLFKTNRKVTVKQLKEDYFKKIECFDSVEISGVEDRFNASLGTYHDLLKIIKDKDFLDNEENEDILEDIVLTLTLFEDREMIEERLKTYAHLFDDKVMKQLKRRRYTGWGRLSRKLINGIRDKQSGKTILDFLKSDGFANRNFMQLIHDDSLTFKEDIQKAQVSGQGDSLHEHIANLAGSPAIKKGILQTVKVVDELVKVMGRHKPENIVIEMARENQTTQKGQKNSRERMKRIEEGIKELGSQILKEHPVENTQLQNEKLYLYYLQNGRDMYVDQELDINRLSDYDVDHIVPQSFLKDDSIDNKVLTRSDKARGKSDNVPSEEVVKKMKNYWRQLLNAKLITQRKFDNLTKAERGGLSELDKAGFIKRQLVETRQITKHVAQILDSRMNTKYDENDKLIREVKVITLKSKLVSDFRKDFQFYKVREINNYHHAHDAYLNAVVGTALIKKYPKLESEFVYGDYKVYDVRKMIAKSEQEIGKATAKYFFYSNIMNFFKTEITLANGEIRKRPLIETNGETGEIVWDKGRDFATVRKVLSMPQVNIVKKTEVQTGGFSKESILPKRNSDKLIARKKDWDPKKYGGFDSPTVAYSVLVVAKVEKGKSKKLKSVKELLGITIMERSSFEKNPIDFLEAKGYKEVKKDLIIKLPKYSLFELENGRKRMLASAGELQKGNELALPSKYVNFLYLASHYEKLKGSPEDNEQKQLFVEQHKHYLDEIIEQISEFSKRVILADANLDKVLSAYNKHRDKPIREQAENIIHLFTLTNLGAPAAFKYFDTTIDRKRYTSTKEVLDATLIHQSITGLYETRIDLSQLGGDGGGGGGGGGGGGTLNIEDEYRLHETSKEPDVSLGSTWLSDFPQAWAETGGMGLAVRQAPLIIPLKATSTPVSIKQYPMSQEARLGIKPHIQRLLDQGILVPCQSPWNTPLLPVKKPGTNDYRPVQDLREVNKRVEDIHPTVPNPYNLLSGLPPSHQWYTVLDLKDAFFCLRLHPTSQPLFAFEWRDPEMGISGQLTWTRLPQGFKNSPTLFNEALHRDLAGFRIQHPDLILLQYVDDLLLAATSELDCQQGTRALLQTLGDLGYRASAKKAQICQKQVKYLGYLLKEGQRWLTEARKETVMGQPIPKTPRQLREFLGKAGFCRLFIPGFAEMAAPLYPLTKPGTLFNWGPDQQKAFQEIKQALLTAPALGLPDLTKPFELFVDEKQGYAKGVLTQKLGPWRRPVAYLSKKLDPVAAGWPPCLRMVAAIAVLTKDAGKLTMGQPLVILAPHAVEALVKQPPDRWLSNARMTHYQALLLDTDRVQFGPVVALNPATLLPLPEEGLQHDCLDILAEAHGTRSDLMDQPLPDADHTWYTDGSSFLQEGQRKAGAAVTTETEVIWARALPAGTSAQRAELIALTQALKMAEGKKLNVYTDSRYAFATAHIHGEIYRRRGWLTSEGKEIKNKDEILALLKALFLPKRLSIIHCPGHQKGNSAEARGNRMADQAAREVATRETPETSTLLAGKRTADGSEFEKRTADGSEFESPKKKAKVE

SEQ ID NO: 2350 - protein, 2093 aa, synthetic construct
MPAAKRVKLDGGDKKYSIGLDIGTNSVGWAVITDEYKVPSKKFKVLGNTDRHSIKKNLIGALLFDSGETAEATRLKRTARRRYTRRKNRICYLQEIFSNEMAKVDDSFFHRLEESFLVEEDKKHERHPIFGNIVDEVAYHEKYPTIYHLRKKLVDSTDKADLRLIYLALAHMIKFRGHFLIEGDLNPDNSDVDKLFIQLVQTYNQLFEENPINASGVDAKAILSARLSKSRRLENLIAQLPGEKKNGLFGNLIALSLGLTPNFKSNFDLAEDAKLQLSKDTYDDDLDNLLAQIGDQYADLFLAAKNLSDAILLSDILRVNTEITKAPLSASMIKRYDEHHQDLTLLKALVRQQLPEKYKEIFFDQSKNGYAGYIDGGASQEEFYKFIKPILEKMDGTEELLVKLNREDLLRKQRTFDNGSIPHQIHLGELHAILRRQEDFYPFLKDNREKIEKILTFRIPYYVGPLARGNSRFAWMTRKSEETITPWNFEEVVDKGASAQSFIERMTNFDKNLPNEKVLPKHSLLYEYFTVYNELTKVKYVTEGMRKPAFLSGEQKKAIVDLLFKTNRKVTVKQLKEDYFKKIECFDSVEISGVEDRFNASLGTYHDLLKIIKDKDFLDNEENEDILEDIVLTLTLFEDREMIEERLKTYAHLFDDKVMKQLKRRRYTGWGRLSRKLINGIRDKQSGKTILDFLKSDGFANRNFMQLIHDDSLTFKEDIQKAQVSGQGDSLHEHIANLAGSPAIKKGILQTVKVVDELVKVMGRHKPENIVIEMARENQTTQKGQKNSRERMKRIEEGIKELGSQILKEHPVENTQLQNEKLYLYYLQNGRDMYVDQELDINRLSDYDVDHIVPQSFLKDDSIDNKVLTRSDKARGKSDNVPSEEVVKKMKNYWRQLLNAKLITQRKFDNLTKAERGGLSELDKAGFIKRQLVETRQITKHVAQILDSRMNTKYDENDKLIREVKVITLKSKLVSDFRKDFQFYKVREINNYHHAHDAYLNAVVGTALIKKYPKLESEFVYGDYKVYDVRKMIAKSEQEIGKATAKYFFYSNIMNFFKTEITLANGEIRKRPLIETNGETGEIVWDKGRDFATVRKVLSMPQVNIVKKTEVQTGGFSKESILPKRNSDKLIARKKDWDPKKYGGFDSPTVAYSVLVVAKVEKGKSKKLKSVKELLGITIMERSSFEKNPIDFLEAKGYKEVKKDLIIKLPKYSLFELENGRKRMLASAGELQKGNELALPSKYVNFLYLASHYEKLKGSPEDNEQKQLFVEQHKHYLDEIIEQISEFSKRVILADANLDKVLSAYNKHRDKPIREQAENIIHLFTLTNLGAPAAFKYFDTTIDRKRYTSTKEVLDATLIHQSITGLYETRIDLSQLGGDGGEAAAKGSSGGTLNIEDEYRLHETSKEPDVSLGSTWLSDFPQAWAETGGMGLAVRQAPLIIPLKATSTPVSIKQYPMSQEARLGIKPHIQRLLDQGILVPCQSPWNTPLLPVKKPGTNDYRPVQDLREVNKRVEDIHPTVPNPYNLLSGLPPSHQWYTVLDLKDAFFCLRLHPTSQPLFAFEWRDPEMGISGQLTWTRLPQGFKNSPTLFNEALHRDLAGFRIQHPDLILLQYVDDLLLAATSELDCQQGTRALLQTLGDLGYRASAKKAQICQKQVKYLGYLLKEGQRWLTEARKETVMGQPIPKTPRQLREFLGKAGFCRLFIPGFAEMAAPLYPLTKPGTLFNWGPDQQKAFQEIKQALLTAPALGLPDLTKPFELFVDEKQGYAKGVLTQKLGPWRRPVAYLSKKLDPVAAGWPPCLRMVAAIAVLTKDAGKLTMGQPLVILAPHAVEALVKQPPDRWLSNARMTHYQALLLDTDRVQFGPVVALNPATLLPLPEEGLQHDCLDILAEAHGTRSDLMDQPLPDADHTWYTDGSSFLQEGQRKAGAAVTTETEVIWARALPAGTSAQRAELIALTQALKMAEGKKLNVYTDSRYAFATAHIHGEIYRRRGWLTSEGKEIKNKDEILALLKALFLPKRLSIIHCPGHQKGNSAEARGNRMADQAAREVATRETPETSTLLAGKRTADGSEFEKRTADGSEFESPKKKAKVE

SEQ ID NO: 2351 - protein, 2096 aa, synthetic construct
MPAAKRVKLDGGDKKYSIGLDIGTNSVGWAVITDEYKVPSKKFKVLGNTDRHSIKKNLIGALLFDSGETAEATRLKRTARRRYTRRKNRICYLQEIFSNEMAKVDDSFFHRLEESFLVEEDKKHERHPIFGNIVDEVAYHEKYPTIYHLRKKLVDSTDKADLRLIYLALAHMIKFRGHFLIEGDLNPDNSDVDKLFIQLVQTYNQLFEENPINASGVDAKAILSARLSKSRRLENLIAQLPGEKKNGLFGNLIALSLGLTPNFKSNFDLAEDAKLQLSKDTYDDDLDNLLAQIGDQYADLFLAAKNLSDAILLSDILRVNTEITKAPLSASMIKRYDEHHQDLTLLKALVRQQLPEKYKEIFFDQSKNGYAGYIDGGASQEEFYKFIKPILEKMDGTEELLVKLNREDLLRKQRTFDNGSIPHQIHLGELHAILRRQEDFYPFLKDNREKIEKILTFRIPYYVGPLARGNSRFAWMTRKSEETITPWNFEEVVDKGASAQSFIERMTNFDKNLPNEKVLPKHSLLYEYFTVYNELTKVKYVTEGMRKPAFLSGEQKKAIVDLLFKTNRKVTVKQLKEDYFKKIECFDSVEISGVEDRFNASLGTYHDLLKIIKDKDFLDNEENEDILEDIVLTLTLFEDREMIEERLKTYAHLFDDKVMKQLKRRRYTGWGRLSRKLINGIRDKQSGKTILDFLKSDGFANRNFMQLIHDDSLTFKEDIQKAQVSGQGDSLHEHIANLAGSPAIKKGILQTVKVVDELVKVMGRHKPENIVIEMARENQTTQKGQKNSRERMKRIEEGIKELGSQILKEHPVENTQLQNEKLYLYYLQNGRDMYVDQELDINRLSDYDVDHIVPQSFLKDDSIDNKVLTRSDKARGKSDNVPSEEVVKKMKNYWRQLLNAKLITQRKFDNLTKAERGGLSELDKAGFIKRQLVETRQITKHVAQILDSRMNTKYDENDKLIREVKVITLKSKLVSDFRKDFQFYKVREINNYHHAHDAYLNAVVGTALIKKYPKLESEFVYGDYKVYDVRKMIAKSEQEIGKATAKYFFYSNIMNFFKTEITLANGEIRKRPLIETNGETGEIVWDKGRDFATVRKVLSMPQVNIVKKTEVQTGGFSKESILPKRNSDKLIARKKDWDPKKYGGFDSPTVAYSVLVVAKVEKGKSKKLKSVKELLGITIMERSSFEKNPIDFLEAKGYKEVKKDLIIKLPKYSLFELENGRKRMLASAGELQKGNELALPSKYVNFLYLASHYEKLKGSPEDNEQKQLFVEQHKHYLDEIIEQISEFSKRVILADANLDKVLSAYNKHRDKPIREQAENIIHLFTLTNLGAPAAFKYFDTTIDRKRYTSTKEVLDATLIHQSITGLYETRIDLSQLGGDGGGGGGGSEAAAKGGTLNIEDEYRLHETSKEPDVSLGSTWLSDFPQAWAETGGMGLAVRQAPLIIPLKATSTPVSIKQYPMSQEARLGIKPHIQRLLDQGILVPCQSPWNTPLLPVKKPGTNDYRPVQDLREVNKRVEDIHPTVPNPYNLLSGLPPSHQWYTVLDLKDAFFCLRLHPTSQPLFAFEWRDPEMGISGQLTWTRLPQGFKNSPTLFNEALHRDLAGFRIQHPDLILLQYVDDLLLAATSELDCQQGTRALLQTLGDLGYRASAKKAQICQKQVKYLGYLLKEGQRWLTEARKETVMGQPIPKTPRQLREFLGKAGFCRLFIPGFAEMAAPLYPLTKPGTLFNWGPDQQKAFQEIKQALLTAPALGLPDLTKPFELFVDEKQGYAKGVLTQKLGPWRRPVAYLSKKLDPVAAGWPPCLRMVAAIAVLTKDAGKLTMGQPLVILAPHAVEALVKQPPDRWLSNARMTHYQALLLDTDRVQFGPVVALNPATLLPLPEEGLQHDCLDILAEAHGTRSDLMDQPLPDADHTWYTDGSSFLQEGQRKAGAAVTTETEVIWARALPAGTSAQRAELIALTQALKMAEGKKLNVYTDSRYAFATAHIHGEIYRRRGWLTSEGKEIKNKDEILALLKALFLPKRLSIIHCPGHQKGNSAEARGNRMADQAAREVATRETPETSTLLAGKRTADGSEFEKRTADGSEFESPKKKAKVE

SEQ ID NO: 2352 - protein, 2096 aa, synthetic construct
MPAAKRVKLDGGDKKYSIGLDIGTNSVGWAVITDEYKVPSKKFKVLGNTDRHSIKKNLIGALLFDSGETAEATRLKRTARRRYTRRKNRICYLQEIFSNEMAKVDDSFFHRLEESFLVEEDKKHERHPIFGNIVDEVAYHEKYPTIYHLRKKLVDSTDKADLRLIYLALAHMIKFRGHFLIEGDLNPDNSDVDKLFIQLVQTYNQLFEENPINASGVDAKAILSARLSKSRRLENLIAQLPGEKKNGLFGNLIALSLGLTPNFKSNFDLAEDAKLQLSKDTYDDDLDNLLAQIGDQYADLFLAAKNLSDAILLSDILRVNTEITKAPLSASMIKRYDEHHQDLTLLKALVRQQLPEKYKEIFFDQSKNGYAGYIDGGASQEEFYKFIKPILEKMDGTEELLVKLNREDLLRKQRTFDNGSIPHQIHLGELHAILRRQEDFYPFLKDNREKIEKILTFRIPYYVGPLARGNSRFAWMTRKSEETITPWNFEEVVDKGASAQSFIERMTNFDKNLPNEKVLPKHSLLYEYFTVYNELTKVKYVTEGMRKPAFLSGEQKKAIVDLLFKTNRKVTVKQLKEDYFKKIECFDSVEISGVEDRFNASLGTYHDLLKIIKDKDFLDNEENEDILEDIVLTLTLFEDREMIEERLKTYAHLFDDKVMKQLKRRRYTGWGRLSRKLINGIRDKQSGKTILDFLKSDGFANRNFMQLIHDDSLTFKEDIQKAQVSGQGDSLHEHIANLAGSPAIKKGILQTVKVVDELVKVMGRHKPENIVIEMARENQTTQKGQKNSRERMKRIEEGIKELGSQILKEHPVENTQLQNEKLYLYYLQNGRDMYVDQELDINRLSDYDVDHIVPQSFLKDDSIDNKVLTRSDKARGKSDNVPSEEVVKKMKNYWRQLLNAKLITQRKFDNLTKAERGGLSELDKAGFIKRQLVETRQITKHVAQILDSRMNTKYDENDKLIREVKVITLKSKLVSDFRKDFQFYKVREINNYHHAHDAYLNAVVGTALIKKYPKLESEFVYGDYKVYDVRKMIAKSEQEIGKATAKYFFYSNIMNFFKTEITLANGEIRKRPLIETNGETGEIVWDKGRDFATVRKVLSMPQVNIVKKTEVQTGGFSKESILPKRNSDKLIARKKDWDPKKYGGFDSPTVAYSVLVVAKVEKGKSKKLKSVKELLGITIMERSSFEKNPIDFLEAKGYKEVKKDLIIKLPKYSLFELENGRKRMLASAGELQKGNELALPSKYVNFLYLASHYEKLKGSPEDNEQKQLFVEQHKHYLDEIIEQISEFSKRVILADANLDKVLSAYNKHRDKPIREQAENIIHLFTLTNLGAPAAFKYFDTTIDRKRYTSTKEVLDATLIHQSITGLYETRIDLSQLGGDGGGSSEAAAKGGSGGTLNIEDEYRLHETSKEPDVSLGSTWLSDFPQAWAETGGMGLAVRQAPLIIPLKATSTPVSIKQYPMSQEARLGIKPHIQRLLDQGILVPCQSPWNTPLLPVKKPGTNDYRPVQDLREVNKRVEDIHPTVPNPYNLLSGLPPSHQWYTVLDLKDAFFCLRLHPTSQPLFAFEWRDPEMGISGQLTWTRLPQGFKNSPTLFNEALHRDLAGFRIQHPDLILLQYVDDLLLAATSELDCQQGTRALLQTLGDLGYRASAKKAQICQKQVKYLGYLLKEGQRWLTEARKETVMGQPIPKTPRQLREFLGKAGFCRLFIPGFAEMAAPLYPLTKPGTLFNWGPDQQKAFQEIKQALLTAPALGLPDLTKPFELFVDEKQGYAKGVLTQKLGPWRRPVAYLSKKLDPVAAGWPPCLRMVAAIAVLTKDAGKLTMGQPLVILAPHAVEALVKQPPDRWLSNARMTHYQALLLDTDRVQFGPVVALNPATLLPLPEEGLQHDCLDILAEAHGTRSDLMDQPLPDADHTWYTDGSSFLQEGQRKAGAAVTTETEVIWARALPAGTSAQRAELIALTQALKMAEGKKLNVYTDSRYAFATAHIHGEIYRRRGWLTSEGKEIKNKDEILALLKALFLPKRLSIIHCPGHQKGNSAEARGNRMADQAAREVATRETPETSTLLAGKRTADGSEFEKRTADGSEFESPKKKAKVE

SEQ ID NO: 2353 - protein, 2091 aa, synthetic construct
MPAAKRVKLDGGDKKYSIGLDIGTNSVGWAVITDEYKVPSKKFKVLGNTDRHSIKKNLIGALLFDSGETAEATRLKRTARRRYTRRKNRICYLQEIFSNEMAKVDDSFFHRLEESFLVEEDKKHERHPIFGNIVDEVAYHEKYPTIYHLRKKLVDSTDKADLRLIYLALAHMIKFRGHFLIEGDLNPDNSDVDKLFIQLVQTYNQLFEENPINASGVDAKAILSARLSKSRRLENLIAQLPGEKKNGLFGNLIALSLGLTPNFKSNFDLAEDAKLQLSKDTYDDDLDNLLAQIGDQYADLFLAAKNLSDAILLSDILRVNTEITKAPLSASMIKRYDEHHQDLTLLKALVRQQLPEKYKEIFFDQSKNGYAGYIDGGASQEEFYKFIKPILEKMDGTEELLVKLNREDLLRKQRTFDNGSIPHQIHLGELHAILRRQEDFYPFLKDNREKIEKILTFRIPYYVGPLARGNSRFAWMTRKSEETITPWNFEEVVDKGASAQSFIERMTNFDKNLPNEKVLPKHSLLYEYFTVYNELTKVKYVTEGMRKPAFLSGEQKKAIVDLLFKTNRKVTVKQLKEDYFKKIECFDSVEISGVEDRFNASLGTYHDLLKIIKDKDFLDNEENEDILEDIVLTLTLFEDREMIEERLKTYAHLFDDKVMKQLKRRRYTGWGRLSRKLINGIRDKQSGKTILDFLKSDGFANRNFMQLIHDDSLTFKEDIQKAQVSGQGDSLHEHIANLAGSPAIKKGILQTVKVVDELVKVMGRHKPENIVIEMARENQTTQKGQKNSRERMKRIEEGIKELGSQILKEHPVENTQLQNEKLYLYYLQNGRDMYVDQELDINRLSDYDVDHIVPQSFLKDDSIDNKVLTRSDKARGKSDNVPSEEVVKKMKNYWRQLLNAKLITQRKFDNLTKAERGGLSELDKAGFIKRQLVETRQITKHVAQILDSRMNTKYDENDKLIREVKVITLKSKLVSDFRKDFQFYKVREINNYHHAHDAYLNAVVGTALIKKYPKLESEFVYGDYKVYDVRKMIAKSEQEIGKATAKYFFYSNIMNFFKTEITLANGEIRKRPLIETNGETGEIVWDKGRDFATVRKVLSMPQVNIVKKTEVQTGGFSKESILPKRNSDKLIARKKDWDPKKYGGFDSPTVAYSVLVVAKVEKGKSKKLKSVKELLGITIMERSSFEKNPIDFLEAKGYKEVKKDLIIKLPKYSLFELENGRKRMLASAGELQKGNELALPSKYVNFLYLASHYEKLKGSPEDNEQKQLFVEQHKHYLDEIIEQISEFSKRVILADANLDKVLSAYNKHRDKPIREQAENIIHLFTLTNLGAPAAFKYFDTTIDRKRYTSTKEVLDATLIHQSITGLYETRIDLSQLGGDGGGGSGSSGGTLNIEDEYRLHETSKEPDVSLGSTWLSDFPQAWAETGGMGLAVRQAPLIIPLKATSTPVSIKQYPMSQEARLGIKPHIQRLLDQGILVPCQSPWNTPLLPVKKPGTNDYRPVQDLREVNKRVEDIHPTVPNPYNLLSGLPPSHQWYTVLDLKDAFFCLRLHPTSQPLFAFEWRDPEMGISGQLTWTRLPQGFKNSPTLFNEALHRDLAGFRIQHPDLILLQYVDDLLLAATSELDCQQGTRALLQTLGDLGYRASAKKAQICQKQVKYLGYLLKEGQRWLTEARKETVMGQPIPKTPRQLREFLGKAGFCRLFIPGFAEMAAPLYPLTKPGTLFNWGPDQQKAFQEIKQALLTAPALGLPDLTKPFELFVDEKQGYAKGVLTQKLGPWRRPVAYLSKKLDPVAAGWPPCLRMVAAIAVLTKDAGKLTMGQPLVILAPHAVEALVKQPPDRWLSNARMTHYQALLLDTDRVQFGPVVALNPATLLPLPEEGLQHDCLDILAEAHGTRSDLMDQPLPDADHTWYTDGSSFLQEGQRKAGAAVTTETEVIWARALPAGTSAQRAELIALTQALKMAEGKKLNVYTDSRYAFATAHIHGEIYRRRGWLTSEGKEIKNKDEILALLKALFLPKRLSIIHCPGHQKGNSAEARGNRMADQAAREVATRETPETSTLLAGKRTADGSEFEKRTADGSEFESPKKKAKVE

SEQ ID NO: 2354 - protein, 2091 aa, synthetic construct
MPAAKRVKLDGGDKKYSIGLDIGTNSVGWAVITDEYKVPSKKFKVLGNTDRHSIKKNLIGALLFDSGETAEATRLKRTARRRYTRRKNRICYLQEIFSNEMAKVDDSFFHRLEESFLVEEDKKHERHPIFGNIVDEVAYHEKYPTIYHLRKKLVDSTDKADLRLIYLALAHMIKFRGHFLIEGDLNPDNSDVDKLFIQLVQTYNQLFEENPINASGVDAKAILSARLSKSRRLENLIAQLPGEKKNGLFGNLIALSLGLTPNFKSNFDLAEDAKLQLSKDTYDDDLDNLLAQIGDQYADLFLAAKNLSDAILLSDILRVNTEITKAPLSASMIKRYDEHHQDLTLLKALVRQQLPEKYKEIFFDQSKNGYAGYIDGGASQEEFYKFIKPILEKMDGTEELLVKLNREDLLRKQRTFDNGSIPHQIHLGELHAILRRQEDFYPFLKDNREKIEKILTFRIPYYVGPLARGNSRFAWMTRKSEETITPWNFEEVVDKGASAQSFIERMTNFDKNLPNEKVLPKHSLLYEYFTVYNELTKVKYVTEGMRKPAFLSGEQKKAIVDLLFKTNRKVTVKQLKEDYFKKIECFDSVEISGVEDRFNASLGTYHDLLKIIKDKDFLDNEENEDILEDIVLTLTLFEDREMIEERLKTYAHLFDDKVMKQLKRRRYTGWGRLSRKLINGIRDKQSGKTILDFLKSDGFANRNFMQLIHDDSLTFKEDIQKAQVSGQGDSLHEHIANLAGSPAIKKGILQTVKVVDELVKVMGRHKPENIVIEMARENQTTQKGQKNSRERMKRIEEGIKELGSQILKEHPVENTQLQNEKLYLYYLQNGRDMYVDQELDINRLSDYDVDHIVPQSFLKDDSIDNKVLTRSDKARGKSDNVPSEEVVKKMKNYWRQLLNAKLITQRKFDNLTKAERGGLSELDKAGFIKRQLVETRQITKHVAQILDSRMNTKYDENDKLIREVKVITLKSKLVSDFRKDFQFYKVREINNYHHAHDAYLNAVVGTALIKKYPKLESEFVYGDYKVYDVRKMIAKSEQEIGKATAKYFFYSNIMNFFKTEITLANGEIRKRPLIETNGETGEIVWDKGRDFATVRKVLSMPQVNIVKKTEVQTGGFSKESILPKRNSDKLIARKKDWDPKKYGGFDSPTVAYSVLVVAKVEKGKSKKLKSVKELLGITIMERSSFEKNPIDFLEAKGYKEVKKDLIIKLPKYSLFELENGRKRMLASAGELQKGNELALPSKYVNFLYLASHYEKLKGSPEDNEQKQLFVEQHKHYLDEIIEQISEFSKRVILADANLDKVLSAYNKHRDKPIREQAENIIHLFTLTNLGAPAAFKYFDTTIDRKRYTSTKEVLDATLIHQSITGLYETRIDLSQLGGDGGGGGGGGGGTLNIEDEYRLHETSKEPDVSLGSTWLSDFPQAWAETGGMGLAVRQAPLIIPLKATSTPVSIKQYPMSQEARLGIKPHIQRLLDQGILVPCQSPWNTPLLPVKKPGTNDYRPVQDLREVNKRVEDIHPTVPNPYNLLSGLPPSHQWYTVLDLKDAFFCLRLHPTSQPLFAFEWRDPEMGISGQLTWTRLPQGFKNSPTLFNEALHRDLAGFRIQHPDLILLQYVDDLLLAATSELDCQQGTRALLQTLGDLGYRASAKKAQICQKQVKYLGYLLKEGQRWLTEARKETVMGQPIPKTPRQLREFLGKAGFCRLFIPGFAEMAAPLYPLTKPGTLFNWGPDQQKAFQEIKQALLTAPALGLPDLTKPFELFVDEKQGYAKGVLTQKLGPWRRPVAYLSKKLDPVAAGWPPCLRMVAAIAVLTKDAGKLTMGQPLVILAPHAVEALVKQPPDRWLSNARMTHYQALLLDTDRVQFGPVVALNPATLLPLPEEGLQHDCLDILAEAHGTRSDLMDQPLPDADHTWYTDGSSFLQEGQRKAGAAVTTETEVIWARALPAGTSAQRAELIALTQALKMAEGKKLNVYTDSRYAFATAHIHGEIYRRRGWLTSEGKEIKNKDEILALLKALFLPKRLSIIHCPGHQKGNSAEARGNRMADQAAREVATRETPETSTLLAGKRTADGSEFEKRTADGSEFESPKKKAKVE

SEQ ID NO: 2355 - protein, 2096 aa, synthetic construct
MPAAKRVKLDGGDKKYSIGLDIGTNSVGWAVITDEYKVPSKKFKVLGNTDRHSIKKNLIGALLFDSGETAEATRLKRTARRRYTRRKNRICYLQEIFSNEMAKVDDSFFHRLEESFLVEEDKKHERHPIFGNIVDEVAYHEKYPTIYHLRKKLVDSTDKADLRLIYLALAHMIKFRGHFLIEGDLNPDNSDVDKLFIQLVQTYNQLFEENPINASGVDAKAILSARLSKSRRLENLIAQLPGEKKNGLFGNLIALSLGLTPNFKSNFDLAEDAKLQLSKDTYDDDLDNLLAQIGDQYADLFLAAKNLSDAILLSDILRVNTEITKAPLSASMIKRYDEHHQDLTLLKALVRQQLPEKYKEIFFDQSKNGYAGYIDGGASQEEFYKFIKPILEKMDGTEELLVKLNREDLLRKQRTFDNGSIPHQIHLGELHAILRRQEDFYPFLKDNREKIEKILTFRIPYYVGPLARGNSRFAWMTRKSEETITPWNFEEVVDKGASAQSFIERMTNFDKNLPNEKVLPKHSLLYEYFTVYNELTKVKYVTEGMRKPAFLSGEQKKAIVDLLFKTNRKVTVKQLKEDYFKKIECFDSVEISGVEDRFNASLGTYHDLLKIIKDKDFLDNEENEDILEDIVLTLTLFEDREMIEERLKTYAHLFDDKVMKQLKRRRYTGWGRLSRKLINGIRDKQSGKTILDFLKSDGFANRNFMQLIHDDSLTFKEDIQKAQVSGQGDSLHEHIANLAGSPAIKKGILQTVKVVDELVKVMGRHKPENIVIEMARENQTTQKGQKNSRERMKRIEEGIKELGSQILKEHPVENTQLQNEKLYLYYLQNGRDMYVDQELDINRLSDYDVDHIVPQSFLKDDSIDNKVLTRSDKARGKSDNVPSEEVVKKMKNYWRQLLNAKLITQRKFDNLTKAERGGLSELDKAGFIKRQLVETRQITKHVAQILDSRMNTKYDENDKLIREVKVITLKSKLVSDFRKDFQFYKVREINNYHHAHDAYLNAVVGTALIKKYPKLESEFVYGDYKVYDVRKMIAKSEQEIGKATAKYFFYSNIMNFFKTEITLANGEIRKRPLIETNGETGEIVWDKGRDFATVRKVLSMPQVNIVKKTEVQTGGFSKESILPKRNSDKLIARKKDWDPKKYGGFDSPTVAYSVLVVAKVEKGKSKKLKSVKELLGITIMERSSFEKNPIDFLEAKGYKEVKKDLIIKLPKYSLFELENGRKRMLASAGELQKGNELALPSKYVNFLYLASHYEKLKGSPEDNEQKQLFVEQHKHYLDEIIEQISEFSKRVILADANLDKVLSAYNKHRDKPIREQAENIIHLFTLTNLGAPAAFKYFDTTIDRKRYTSTKEVLDATLIHQSITGLYETRIDLSQLGGDGGPAPGSSEAAAKGGTLNIEDEYRLHETSKEPDVSLGSTWLSDFPQAWAETGGMGLAVRQAPLIIPLKATSTPVSIKQYPMSQEARLGIKPHIQRLLDQGILVPCQSPWNTPLLPVKKPGTNDYRPVQDLREVNKRVEDIHPTVPNPYNLLSGLPPSHQWYTVLDLKDAFFCLRLHPTSQPLFAFEWRDPEMGISGQLTWTRLPQGFKNSPTLFNEALHRDLAGFRIQHPDLILLQYVDDLLLAATSELDCQQGTRALLQTLGDLGYRASAKKAQICQKQVKYLGYLLKEGQRWLTEARKETVMGQPIPKTPRQLREFLGKAGFCRLFIPGFAEMAAPLYPLTKPGTLFNWGPDQQKAFQEIKQALLTAPALGLPDLTKPFELFVDEKQGYAKGVLTQKLGPWRRPVAYLSKKLDPVAAGWPPCLRMVAAIAVLTKDAGKLTMGQPLVILAPHAVEALVKQPPDRWLSNARMTHYQALLLDTDRVQFGPVVALNPATLLPLPEEGLQHDCLDILAEAHGTRSDLMDQPLPDADHTWYTDGSSFLQEGQRKAGAAVTTETEVIWARALPAGTSAQRAELIALTQALKMAEGKKLNVYTDSRYAFATAHIHGEIYRRRGWLTSEGKEIKNKDEILALLKALFLPKRLSIIHCPGHQKGNSAEARGNRMADQAAREVATRETPETSTLLAGKRTADGSEFEKRTADGSEFESPKKKAKVE

SEQ ID NO: 2356 - protein, 2093 aa, synthetic construct
MPAAKRVKLDGGDKKYSIGLDIGTNSVGWAVITDEYKVPSKKFKVLGNTDRHSIKKNLIGALLFDSGETAEATRLKRTARRRYTRRKNRICYLQEIFSNEMAKVDDSFFHRLEESFLVEEDKKHERHPIFGNIVDEVAYHEKYPTIYHLRKKLVDSTDKADLRLIYLALAHMIKFRGHFLIEGDLNPDNSDVDKLFIQLVQTYNQLFEENPINASGVDAKAILSARLSKSRRLENLIAQLPGEKKNGLFGNLIALSLGLTPNFKSNFDLAEDAKLQLSKDTYDDDLDNLLAQIGDQYADLFLAAKNLSDAILLSDILRVNTEITKAPLSASMIKRYDEHHQDLTLLKALVRQQLPEKYKEIFFDQSKNGYAGYIDGGASQEEFYKFIKPILEKMDGTEELLVKLNREDLLRKQRTFDNGSIPHQIHLGELHAILRRQEDFYPFLKDNREKIEKILTFRIPYYVGPLARGNSRFAWMTRKSEETITPWNFEEVVDKGASAQSFIERMTNFDKNLPNEKVLPKHSLLYEYFTVYNELTKVKYVTEGMRKPAFLSGEQKKAIVDLLFKTNRKVTVKQLKEDYFKKIECFDSVEISGVEDRFNASLGTYHDLLKIIKDKDFLDNEENEDILEDIVLTLTLFEDREMIEERLKTYAHLFDDKVMKQLKRRRYTGWGRLSRKLINGIRDKQSGKTILDFLKSDGFANRNFMQLIHDDSLTFKEDIQKAQVSGQGDSLHEHIANLAGSPAIKKGILQTVKVVDELVKVMGRHKPENIVIEMARENQTTQKGQKNSRERMKRIEEGIKELGSQILKEHPVENTQLQNEKLYLYYLQNGRDMYVDQELDINRLSDYDVDHIVPQSFLKDDSIDNKVLTRSDKARGKSDNVPSEEVVKKMKNYWRQLLNAKLITQRKFDNLTKAERGGLSELDKAGFIKRQLVETRQITKHVAQILDSRMNTKYDENDKLIREVKVITLKSKLVSDFRKDFQFYKVREINNYHHAHDAYLNAVVGTALIKKYPKLESEFVYGDYKVYDVRKMIAKSEQEIGKATAKYFFYSNIMNFFKTEITLANGEIRKRPLIETNGETGEIVWDKGRDFATVRKVLSMPQVNIVKKTEVQTGGFSKESILPKRNSDKLIARKKDWDPKKYGGFDSPTVAYSVLVVAKVEKGKSKKLKSVKELLGITIMERSSFEKNPIDFLEAKGYKEVKKDLIIKLPKYSLFELENGRKRMLASAGELQKGNELALPSKYVNFLYLASHYEKLKGSPEDNEQKQLFVEQHKHYLDEIIEQISEFSKRVILADANLDKVLSAYNKHRDKPIREQAENIIHLFTLTNLGAPAAFKYFDTTIDRKRYTSTKEVLDATLIHQSITGLYETRIDLSQLGGDGGPAPEAAAKGGTLNIEDEYRLHETSKEPDVSLGSTWLSDFPQAWAETGGMGLAVRQAPLIIPLKATSTPVSIKQYPMSQEARLGIKPHIQRLLDQGILVPCQSPWNTPLLPVKKPGTNDYRPVQDLREVNKRVEDIHPTVPNPYNLLSGLPPSHQWYTVLDLKDAFFCLRLHPTSQPLFAFEWRDPEMGISGQLTWTRLPQGFKNSPTLFNEALHRDLAGFRIQHPDLILLQYVDDLLLAATSELDCQQGTRALLQTLGDLGYRASAKKAQICQKQVKYLGYLLKEGQRWLTEARKETVMGQPIPKTPRQLREFLGKAGFCRLFIPGFAEMAAPLYPLTKPGTLFNWGPDQQKAFQEIKQALLTAPALGLPDLTKPFELFVDEKQGYAKGVLTQKLGPWRRPVAYLSKKLDPVAAGWPPCLRMVAAIAVLTKDAGKLTMGQPLVILAPHAVEALVKQPPDRWLSNARMTHYQALLLDTDRVQFGPVVALNPATLLPLPEEGLQHDCLDILAEAHGTRSDLMDQPLPDADHTWYTDGSSFLQEGQRKAGAAVTTETEVIWARALPAGTSAQRAELIALTQALKMAEGKKLNVYTDSRYAFATAHIHGEIYRRRGWLTSEGKEIKNKDEILALLKALFLPKRLSIIHCPGHQKGNSAEARGNRMADQAAREVATRETPETSTLLAGKRTADGSEFEKRTADGSEFESPKKKAKVE

SEQ ID NO: 2357 - protein, 2096 aa, synthetic construct
MPAAKRVKLDGGDKKYSIGLDIGTNSVGWAVITDEYKVPSKKFKVLGNTDRHSIKKNLIGALLFDSGETAEATRLKRTARRRYTRRKNRICYLQEIFSNEMAKVDDSFFHRLEESFLVEEDKKHERHPIFGNIVDEVAYHEKYPTIYHLRKKLVDSTDKADLRLIYLALAHMIKFRGHFLIEGDLNPDNSDVDKLFIQLVQTYNQLFEENPINASGVDAKAILSARLSKSRRLENLIAQLPGEKKNGLFGNLIALSLGLTPNFKSNFDLAEDAKLQLSKDTYDDDLDNLLAQIGDQYADLFLAAKNLSDAILLSDILRVNTEITKAPLSASMIKRYDEHHQDLTLLKALVRQQLPEKYKEIFFDQSKNGYAGYIDGGASQEEFYKFIKPILEKMDGTEELLVKLNREDLLRKQRTFDNGSIPHQIHLGELHAILRRQEDFYPFLKDNREKIEKILTFRIPYYVGPLARGNSRFAWMTRKSEETITPWNFEEVVDKGASAQSFIERMTNFDKNLPNEKVLPKHSLLYEYFTVYNELTKVKYVTEGMRKPAFLSGEQKKAIVDLLFKTNRKVTVKQLKEDYFKKIECFDSVEISGVEDRFNASLGTYHDLLKIIKDKDFLDNEENEDILEDIVLTLTLFEDREMIEERLKTYAHLFDDKVMKQLKRRRYTGWGRLSRKLINGIRDKQSGKTILDFLKSDGFANRNFMQLIHDDSLTFKEDIQKAQVSGQGDSLHEHIANLAGSPAIKKGILQTVKVVDELVKVMGRHKPENIVIEMARENQTTQKGQKNSRERMKRIEEGIKELGSQILKEHPVENTQLQNEKLYLYYLQNGRDMYVDQELDINRLSDYDVDHIVPQSFLKDDSIDNKVLTRSDKARGKSDNVPSEEVVKKMKNYWRQLLNAKLITQRKFDNLTKAERGGLSELDKAGFIKRQLVETRQITKHVAQILDSRMNTKYDENDKLIREVKVITLKSKLVSDFRKDFQFYKVREINNYHHAHDAYLNAVVGTALIKKYPKLESEFVYGDYKVYDVRKMIAKSEQEIGKATAKYFFYSNIMNFFKTEITLANGEIRKRPLIETNGETGEIVWDKGRDFATVRKVLSMPQVNIVKKTEVQTGGFSKESILPKRNSDKLIARKKDWDPKKYGGFDSPTVAYSVLVVAKVEKGKSKKLKSVKELLGITIMERSSFEKNPIDFLEAKGYKEVKKDLIIKLPKYSLFELENGRKRMLASAGELQKGNELALPSKYVNFLYLASHYEKLKGSPEDNEQKQLFVEQHKHYLDEIIEQISEFSKRVILADANLDKVLSAYNKHRDKPIREQAENIIHLFTLTNLGAPAAFKYFDTTIDRKRYTSTKEVLDATLIHQSITGLYETRIDLSQLGGDGGEAAAKPAPGSSGGTLNIEDEYRLHETSKEPDVSLGSTWLSDFPQAWAETGGMGLAVRQAPLIIPLKATSTPVSIKQYPMSQEARLGIKPHIQRLLDQGILVPCQSPWNTPLLPVKKPGTNDYRPVQDLREVNKRVEDIHPTVPNPYNLLSGLPPSHQWYTVLDLKDAFFCLRLHPTSQPLFAFEWRDPEMGISGQLTWTRLPQGFKNSPTLFNEALHRDLAGFRIQHPDLILLQYVDDLLLAATSELDCQQGTRALLQTLGDLGYRASAKKAQICQKQVKYLGYLLKEGQRWLTEARKETVMGQPIPKTPRQLREFLGKAGFCRLFIPGFAEMAAPLYPLTKPGTLFNWGPDQQKAFQEIKQALLTAPALGLPDLTKPFELFVDEKQGYAKGVLTQKLGPWRRPVAYLSKKLDPVAAGWPPCLRMVAAIAVLTKDAGKLTMGQPLVILAPHAVEALVKQPPDRWLSNARMTHYQALLLDTDRVQFGPVVALNPATLLPLPEEGLQHDCLDILAEAHGTRSDLMDQPLPDADHTWYTDGSSFLQEGQRKAGAAVTTETEVIWARALPAGTSAQRAELIALTQALKMAEGKKLNVYTDSRYAFATAHIHGEIYRRRGWLTSEGKEIKNKDEILALLKALFLPKRLSIIHCPGHQKGNSAEARGNRMADQAAREVATRETPETSTLLAGKRTADGSEFEKRTADGSEFESPKKKAKVE

SEQ ID NO: 2358 - protein, 2096 aa, synthetic construct
MPAAKRVKLDGGDKKYSIGLDIGTNSVGWAVITDEYKVPSKKFKVLGNTDRHSIKKNLIGALLFDSGETAEATRLKRTARRRYTRRKNRICYLQEIFSNEMAKVDDSFFHRLEESFLVEEDKKHERHPIFGNIVDEVAYHEKYPTIYHLRKKLVDSTDKADLRLIYLALAHMIKFRGHFLIEGDLNPDNSDVDKLFIQLVQTYNQLFEENPINASGVDAKAILSARLSKSRRLENLIAQLPGEKKNGLFGNLIALSLGLTPNFKSNFDLAEDAKLQLSKDTYDDDLDNLLAQIGDQYADLFLAAKNLSDAILLSDILRVNTEITKAPLSASMIKRYDEHHQDLTLLKALVRQQLPEKYKEIFFDQSKNGYAGYIDGGASQEEFYKFIKPILEKMDGTEELLVKLNREDLLRKQRTFDNGSIPHQIHLGELHAILRRQEDFYPFLKDNREKIEKILTFRIPYYVGPLARGNSRFAWMTRKSEETITPWNFEEVVDKGASAQSFIERMTNFDKNLPNEKVLPKHSLLYEYFTVYNELTKVKYVTEGMRKPAFLSGEQKKAIVDLLFKTNRKVTVKQLKEDYFKKIECFDSVEISGVEDRFNASLGTYHDLLKIIKDKDFLDNEENEDILEDIVLTLTLFEDREMIEERLKTYAHLFDDKVMKQLKRRRYTGWGRLSRKLINGIRDKQSGKTILDFLKSDGFANRNFMQLIHDDSLTFKEDIQKAQVSGQGDSLHEHIANLAGSPAIKKGILQTVKVVDELVKVMGRHKPENIVIEMARENQTTQKGQKNSRERMKRIEEGIKELGSQILKEHPVENTQLQNEKLYLYYLQNGRDMYVDQELDINRLSDYDVDHIVPQSFLKDDSIDNKVLTRSDKARGKSDNVPSEEVVKKMKNYWRQLLNAKLITQRKFDNLTKAERGGLSELDKAGFIKRQLVETRQITKHVAQILDSRMNTKYDENDKLIREVKVITLKSKLVSDFRKDFQFYKVREINNYHHAHDAYLNAVVGTALIKKYPKLESEFVYGDYKVYDVRKMIAKSEQEIGKATAKYFFYSNIMNFFKTEITLANGEIRKRPLIETNGETGEIVWDKGRDFATVRKVLSMPQVNIVKKTEVQTGGFSKESILPKRNSDKLIARKKDWDPKKYGGFDSPTVAYSVLVVAKVEKGKSKKLKSVKELLGITIMERSSFEKNPIDFLEAKGYKEVKKDLIIKLPKYSLFELENGRKRMLASAGELQKGNELALPSKYVNFLYLASHYEKLKGSPEDNEQKQLFVEQHKHYLDEIIEQISEFSKRVILADANLDKVLSAYNKHRDKPIREQAENIIHLFTLTNLGAPAAFKYFDTTIDRKRYTSTKEVLDATLIHQSITGLYETRIDLSQLGGDGGGGSEAAAKGGGGGTLNIEDEYRLHETSKEPDVSLGSTWLSDFPQAWAETGGMGLAVRQAPLIIPLKATSTPVSIKQYPMSQEARLGIKPHIQRLLDQGILVPCQSPWNTPLLPVKKPGTNDYRPVQDLREVNKRVEDIHPTVPNPYNLLSGLPPSHQWYTVLDLKDAFFCLRLHPTSQPLFAFEWRDPEMGISGQLTWTRLPQGFKNSPTLFNEALHRDLAGFRIQHPDLILLQYVDDLLLAATSELDCQQGTRALLQTLGDLGYRASAKKAQICQKQVKYLGYLLKEGQRWLTEARKETVMGQPIPKTPRQLREFLGKAGFCRLFIPGFAEMAAPLYPLTKPGTLFNWGPDQQKAFQEIKQALLTAPALGLPDLTKPFELFVDEKQGYAKGVLTQKLGPWRRPVAYLSKKLDPVAAGWPPCLRMVAAIAVLTKDAGKLTMGQPLVILAPHAVEALVKQPPDRWLSNARMTHYQALLLDTDRVQFGPVVALNPATLLPLPEEGLQHDCLDILAEAHGTRSDLMDQPLPDADHTWYTDGSSFLQEGQRKAGAAVTTETEVIWARALPAGTSAQRAELIALTQALKMAEGKKLNVYTDSRYAFATAHIHGEIYRRRGWLTSEGKEIKNKDEILALLKALFLPKRLSIIHCPGHQKGNSAEARGNRMADQAAREVATRETPETSTLLAGKRTADGSEFEKRTADGSEFESPKKKAKVE

SEQ ID NO: 2359 - protein, 2096 aa, synthetic construct
MPAAKRVKLDGGDKKYSIGLDIGTNSVGWAVITDEYKVPSKKFKVLGNTDRHSIKKNLIGALLFDSGETAEATRLKRTARRRYTRRKNRICYLQEIFSNEMAKVDDSFFHRLEESFLVEEDKKHERHPIFGNIVDEVAYHEKYPTIYHLRKKLVDSTDKADLRLIYLALAHMIKFRGHFLIEGDLNPDNSDVDKLFIQLVQTYNQLFEENPINASGVDAKAILSARLSKSRRLENLIAQLPGEKKNGLFGNLIALSLGLTPNFKSNFDLAEDAKLQLSKDTYDDDLDNLLAQIGDQYADLFLAAKNLSDAILLSDILRVNTEITKAPLSASMIKRYDEHHQDLTLLKALVRQQLPEKYKEIFFDQSKNGYAGYIDGGASQEEFYKFIKPILEKMDGTEELLVKLNREDLLRKQRTFDNGSIPHQIHLGELHAILRRQEDFYPFLKDNREKIEKILTFRIPYYVGPLARGNSRFAWMTRKSEETITPWNFEEVVDKGASAQSFIERMTNFDKNLPNEKVLPKHSLLYEYFTVYNELTKVKYVTEGMRKPAFLSGEQKKAIVDLLFKTNRKVTVKQLKEDYFKKIECFDSVEISGVEDRFNASLGTYHDLLKIIKDKDFLDNEENEDILEDIVLTLTLFEDREMIEERLKTYAHLFDDKVMKQLKRRRYTGWGRLSRKLINGIRDKQSGKTILDFLKSDGFANRNFMQLIHDDSLTFKEDIQKAQVSGQGDSLHEHIANLAGSPAIKKGILQTVKVVDELVKVMGRHKPENIVIEMARENQTTQKGQKNSRERMKRIEEGIKELGSQILKEHPVENTQLQNEKLYLYYLQNGRDMYVDQELDINRLSDYDVDHIVPQSFLKDDSIDNKVLTRSDKARGKSDNVPSEEVVKKMKNYWRQLLNAKLITQRKFDNLTKAERGGLSELDKAGFIKRQLVETRQITKHVAQILDSRMNTKYDENDKLIREVKVITLKSKLVSDFRKDFQFYKVREINNYHHAHDAYLNAVVGTALIKKYPKLESEFVYGDYKVYDVRKMIAKSEQEIGKATAKYFFYSNIMNFFKTEITLANGEIRKRPLIETNGETGEIVWDKGRDFATVRKVLSMPQVNIVKKTEVQTGGFSKESILPKRNSDKLIARKKDWDPKKYGGFDSPTVAYSVLVVAKVEKGKSKKLKSVKELLGITIMERSSFEKNPIDFLEAKGYKEVKKDLIIKLPKYSLFELENGRKRMLASAGELQKGNELALPSKYVNFLYLASHYEKLKGSPEDNEQKQLFVEQHKHYLDEIIEQISEFSKRVILADANLDKVLSAYNKHRDKPIREQAENIIHLFTLTNLGAPAAFKYFDTTIDRKRYTSTKEVLDATLIHQSITGLYETRIDLSQLGGDGGGSSEAAAKPAPGGTLNIEDEYRLHETSKEPDVSLGSTWLSDFPQAWAETGGMGLAVRQAPLIIPLKATSTPVSIKQYPMSQEARLGIKPHIQRLLDQGILVPCQSPWNTPLLPVKKPGTNDYRPVQDLREVNKRVEDIHPTVPNPYNLLSGLPPSHQWYTVLDLKDAFFCLRLHPTSQPLFAFEWRDPEMGISGQLTWTRLPQGFKNSPTLFNEALHRDLAGFRIQHPDLILLQYVDDLLLAATSELDCQQGTRALLQTLGDLGYRASAKKAQICQKQVKYLGYLLKEGQRWLTEARKETVMGQPIPKTPRQLREFLGKAGFCRLFIPGFAEMAAPLYPLTKPGTLFNWGPDQQKAFQEIKQALLTAPALGLPDLTKPFELFVDEKQGYAKGVLTQKLGPWRRPVAYLSKKLDPVAAGWPPCLRMVAAIAVLTKDAGKLTMGQPLVILAPHAVEALVKQPPDRWLSNARMTHYQALLLDTDRVQFGPVVALNPATLLPLPEEGLQHDCLDILAEAHGTRSDLMDQPLPDADHTWYTDGSSFLQEGQRKAGAAVTTETEVIWARALPAGTSAQRAELIALTQALKMAEGKKLNVYTDSRYAFATAHIHGEIYRRRGWLTSEGKEIKNKDEILALLKALFLPKRLSIIHCPGHQKGNSAEARGNRMADQAAREVATRETPETSTLLAGKRTADGSEFEKRTADGSEFESPKKKAKVE

SEQ ID NO: 2360 - protein, 2094 aa, synthetic construct
MPAAKRVKLDGGDKKYSIGLDIGTNSVGWAVITDEYKVPSKKFKVLGNTDRHSIKKNLIGALLFDSGETAEATRLKRTARRRYTRRKNRICYLQEIFSNEMAKVDDSFFHRLEESFLVEEDKKHERHPIFGNIVDEVAYHEKYPTIYHLRKKLVDSTDKADLRLIYLALAHMIKFRGHFLIEGDLNPDNSDVDKLFIQLVQTYNQLFEENPINASGVDAKAILSARLSKSRRLENLIAQLPGEKKNGLFGNLIALSLGLTPNFKSNFDLAEDAKLQLSKDTYDDDLDNLLAQIGDQYADLFLAAKNLSDAILLSDILRVNTEITKAPLSASMIKRYDEHHQDLTLLKALVRQQLPEKYKEIFFDQSKNGYAGYIDGGASQEEFYKFIKPILEKMDGTEELLVKLNREDLLRKQRTFDNGSIPHQIHLGELHAILRRQEDFYPFLKDNREKIEKILTFRIPYYVGPLARGNSRFAWMTRKSEETITPWNFEEVVDKGASAQSFIERMTNFDKNLPNEKVLPKHSLLYEYFTVYNELTKVKYVTEGMRKPAFLSGEQKKAIVDLLFKTNRKVTVKQLKEDYFKKIECFDSVEISGVEDRFNASLGTYHDLLKIIKDKDFLDNEENEDILEDIVLTLTLFEDREMIEERLKTYAHLFDDKVMKQLKRRRYTGWGRLSRKLINGIRDKQSGKTILDFLKSDGFANRNFMQLIHDDSLTFKEDIQKAQVSGQGDSLHEHIANLAGSPAIKKGILQTVKVVDELVKVMGRHKPENIVIEMARENQTTQKGQKNSRERMKRIEEGIKELGSQILKEHPVENTQLQNEKLYLYYLQNGRDMYVDQELDINRLSDYDVDHIVPQSFLKDDSIDNKVLTRSDKARGKSDNVPSEEVVKKMKNYWRQLLNAKLITQRKFDNLTKAERGGLSELDKAGFIKRQLVETRQITKHVAQILDSRMNTKYDENDKLIREVKVITLKSKLVSDFRKDFQFYKVREINNYHHAHDAYLNAVVGTALIKKYPKLESEFVYGDYKVYDVRKMIAKSEQEIGKATAKYFFYSNIMNFFKTEITLANGEIRKRPLIETNGETGEIVWDKGRDFATVRKVLSMPQVNIVKKTEVQTGGFSKESILPKRNSDKLIARKKDWDPKKYGGFDSPTVAYSVLVVAKVEKGKSKKLKSVKELLGITIMERSSFEKNPIDFLEAKGYKEVKKDLIIKLPKYSLFELENGRKRMLASAGELQKGNELALPSKYVNFLYLASHYEKLKGSPEDNEQKQLFVEQHKHYLDEIIEQISEFSKRVILADANLDKVLSAYNKHRDKPIREQAENIIHLFTLTNLGAPAAFKYFDTTIDRKRYTSTKEVLDATLIHQSITGLYETRIDLSQLGGDGGGGSGGSGGSGGTLNIEDEYRLHETSKEPDVSLGSTWLSDFPQAWAETGGMGLAVRQAPLIIPLKATSTPVSIKQYPMSQEARLGIKPHIQRLLDQGILVPCQSPWNTPLLPVKKPGTNDYRPVQDLREVNKRVEDIHPTVPNPYNLLSGLPPSHQWYTVLDLKDAFFCLRLHPTSQPLFAFEWRDPEMGISGQLTWTRLPQGFKNSPTLFNEALHRDLAGFRIQHPDLILLQYVDDLLLAATSELDCQQGTRALLQTLGDLGYRASAKKAQICQKQVKYLGYLLKEGQRWLTEARKETVMGQPIPKTPRQLREFLGKAGFCRLFIPGFAEMAAPLYPLTKPGTLFNWGPDQQKAFQEIKQALLTAPALGLPDLTKPFELFVDEKQGYAKGVLTQKLGPWRRPVAYLSKKLDPVAAGWPPCLRMVAAIAVLTKDAGKLTMGQPLVILAPHAVEALVKQPPDRWLSNARMTHYQALLLDTDRVQFGPVVALNPATLLPLPEEGLQHDCLDILAEAHGTRSDLMDQPLPDADHTWYTDGSSFLQEGQRKAGAAVTTETEVIWARALPAGTSAQRAELIALTQALKMAEGKKLNVYTDSRYAFATAHIHGEIYRRRGWLTSEGKEIKNKDEILALLKALFLPKRLSIIHCPGHQKGNSAEARGNRMADQAAREVATRETPETSTLLAGKRTADGSEFEKRTADGSEFESPKKKAKVE

SEQ ID NO: 2361 - protein, 2095 aa, synthetic construct
MPAAKRVKLDGGDKKYSIGLDIGTNSVGWAVITDEYKVPSKKFKVLGNTDRHSIKKNLIGALLFDSGETAEATRLKRTARRRYTRRKNRICYLQEIFSNEMAKVDDSFFHRLEESFLVEEDKKHERHPIFGNIVDEVAYHEKYPTIYHLRKKLVDSTDKADLRLIYLALAHMIKFRGHFLIEGDLNPDNSDVDKLFIQLVQTYNQLFEENPINASGVDAKAILSARLSKSRRLENLIAQLPGEKKNGLFGNLIALSLGLTPNFKSNFDLAEDAKLQLSKDTYDDDLDNLLAQIGDQYADLFLAAKNLSDAILLSDILRVNTEITKAPLSASMIKRYDEHHQDLTLLKALVRQQLPEKYKEIFFDQSKNGYAGYIDGGASQEEFYKFIKPILEKMDGTEELLVKLNREDLLRKQRTFDNGSIPHQIHLGELHAILRRQEDFYPFLKDNREKIEKILTFRIPYYVGPLARGNSRFAWMTRKSEETITPWNFEEVVDKGASAQSFIERMTNFDKNLPNEKVLPKHSLLYEYFTVYNELTKVKYVTEGMRKPAFLSGEQKKAIVDLLFKTNRKVTVKQLKEDYFKKIECFDSVEISGVEDRFNASLGTYHDLLKIIKDKDFLDNEENEDILEDIVLTLTLFEDREMIEERLKTYAHLFDDKVMKQLKRRRYTGWGRLSRKLINGIRDKQSGKTILDFLKSDGFANRNFMQLIHDDSLTFKEDIQKAQVSGQGDSLHEHIANLAGSPAIKKGILQTVKVVDELVKVMGRHKPENIVIEMARENQTTQKGQKNSRERMKRIEEGIKELGSQILKEHPVENTQLQNEKLYLYYLQNGRDMYVDQELDINRLSDYDVDHIVPQSFLKDDSIDNKVLTRSDKARGKSDNVPSEEVVKKMKNYWRQLLNAKLITQRKFDNLTKAERGGLSELDKAGFIKRQLVETRQITKHVAQILDSRMNTKYDENDKLIREVKVITLKSKLVSDFRKDFQFYKVREINNYHHAHDAYLNAVVGTALIKKYPKLESEFVYGDYKVYDVRKMIAKSEQEIGKATAKYFFYSNIMNFFKTEITLANGEIRKRPLIETNGETGEIVWDKGRDFATVRKVLSMPQVNIVKKTEVQTGGFSKESILPKRNSDKLIARKKDWDPKKYGGFDSPTVAYSVLVVAKVEKGKSKKLKSVKELLGITIMERSSFEKNPIDFLEAKGYKEVKKDLIIKLPKYSLFELENGRKRMLASAGELQKGNELALPSKYVNFLYLASHYEKLKGSPEDNEQKQLFVEQHKHYLDEIIEQISEFSKRVILADANLDKVLSAYNKHRDKPIREQAENIIHLFTLTNLGAPAAFKYFDTTIDRKRYTSTKEVLDATLIHQSITGLYETRIDLSQLGGDGGEAAAKEAAAKGGTLNIEDEYRLHETSKEPDVSLGSTWLSDFPQAWAETGGMGLAVRQAPLIIPLKATSTPVSIKQYPMSQEARLGIKPHIQRLLDQGILVPCQSPWNTPLLPVKKPGTNDYRPVQDLREVNKRVEDIHPTVPNPYNLLSGLPPSHQWYTVLDLKDAFFCLRLHPTSQPLFAFEWRDPEMGISGQLTWTRLPQGFKNSPTLFNEALHRDLAGFRIQHPDLILLQYVDDLLLAATSELDCQQGTRALLQTLGDLGYRASAKKAQICQKQVKYLGYLLKEGQRWLTEARKETVMGQPIPKTPRQLREFLGKAGFCRLFIPGFAEMAAPLYPLTKPGTLFNWGPDQQKAFQEIKQALLTAPALGLPDLTKPFELFVDEKQGYAKGVLTQKLGPWRRPVAYLSKKLDPVAAGWPPCLRMVAAIAVLTKDAGKLTMGQPLVILAPHAVEALVKQPPDRWLSNARMTHYQALLLDTDRVQFGPVVALNPATLLPLPEEGLQHDCLDILAEAHGTRSDLMDQPLPDADHTWYTDGSSFLQEGQRKAGAAVTTETEVIWARALPAGTSAQRAELIALTQALKMAEGKKLNVYTDSRYAFATAHIHGEIYRRRGWLTSEGKEIKNKDEILALLKALFLPKRLSIIHCPGHQKGNSAEARGNRMADQAAREVATRETPETSTLLAGKRTADGSEFEKRTADGSEFESPKKKAKVE

SEQ ID NO: 2362 - protein, 2091 aa, synthetic construct
MPAAKRVKLDGGDKKYSIGLDIGTNSVGWAVITDEYKVPSKKFKVLGNTDRHSIKKNLIGALLFDSGETAEATRLKRTARRRYTRRKNRICYLQEIFSNEMAKVDDSFFHRLEESFLVEEDKKHERHPIFGNIVDEVAYHEKYPTIYHLRKKLVDSTDKADLRLIYLALAHMIKFRGHFLIEGDLNPDNSDVDKLFIQLVQTYNQLFEENPINASGVDAKAILSARLSKSRRLENLIAQLPGEKKNGLFGNLIALSLGLTPNFKSNFDLAEDAKLQLSKDTYDDDLDNLLAQIGDQYADLFLAAKNLSDAILLSDILRVNTEITKAPLSASMIKRYDEHHQDLTLLKALVRQQLPEKYKEIFFDQSKNGYAGYIDGGASQEEFYKFIKPILEKMDGTEELLVKLNREDLLRKQRTFDNGSIPHQIHLGELHAILRRQEDFYPFLKDNREKIEKILTFRIPYYVGPLARGNSRFAWMTRKSEETITPWNFEEVVDKGASAQSFIERMTNFDKNLPNEKVLPKHSLLYEYFTVYNELTKVKYVTEGMRKPAFLSGEQKKAIVDLLFKTNRKVTVKQLKEDYFKKIECFDSVEISGVEDRFNASLGTYHDLLKIIKDKDFLDNEENEDILEDIVLTLTLFEDREMIEERLKTYAHLFDDKVMKQLKRRRYTGWGRLSRKLINGIRDKQSGKTILDFLKSDGFANRNFMQLIHDDSLTFKEDIQKAQVSGQGDSLHEHIANLAGSPAIKKGILQTVKVVDELVKVMGRHKPENIVIEMARENQTTQKGQKNSRERMKRIEEGIKELGSQILKEHPVENTQLQNEKLYLYYLQNGRDMYVDQELDINRLSDYDVDHIVPQSFLKDDSIDNKVLTRSDKARGKSDNVPSEEVVKKMKNYWRQLLNAKLITQRKFDNLTKAERGGLSELDKAGFIKRQLVETRQITKHVAQILDSRMNTKYDENDKLIREVKVITLKSKLVSDFRKDFQFYKVREINNYHHAHDAYLNAVVGTALIKKYPKLESEFVYGDYKVYDVRKMIAKSEQEIGKATAKYFFYSNIMNFFKTEITLANGEIRKRPLIETNGETGEIVWDKGRDFATVRKVLSMPQVNIVKKTEVQTGGFSKESILPKRNSDKLIARKKDWDPKKYGGFDSPTVAYSVLVVAKVEKGKSKKLKSVKELLGITIMERSSFEKNPIDFLEAKGYKEVKKDLIIKLPKYSLFELENGRKRMLASAGELQKGNELALPSKYVNFLYLASHYEKLKGSPEDNEQKQLFVEQHKHYLDEIIEQISEFSKRVILADANLDKVLSAYNKHRDKPIREQAENIIHLFTLTNLGAPAAFKYFDTTIDRKRYTSTKEVLDATLIHQSITGLYETRIDLSQLGGDGGGSSGGGGGTLNIEDEYRLHETSKEPDVSLGSTWLSDFPQAWAETGGMGLAVRQAPLIIPLKATSTPVSIKQYPMSQEARLGIKPHIQRLLDQGILVPCQSPWNTPLLPVKKPGTNDYRPVQDLREVNKRVEDIHPTVPNPYNLLSGLPPSHQWYTVLDLKDAFFCLRLHPTSQPLFAFEWRDPEMGISGQLTWTRLPQGFKNSPTLFNEALHRDLAGFRIQHPDLILLQYVDDLLLAATSELDCQQGTRALLQTLGDLGYRASAKKAQICQKQVKYLGYLLKEGQRWLTEARKETVMGQPIPKTPRQLREFLGKAGFCRLFIPGFAEMAAPLYPLTKPGTLFNWGPDQQKAFQEIKQALLTAPALGLPDLTKPFELFVDEKQGYAKGVLTQKLGPWRRPVAYLSKKLDPVAAGWPPCLRMVAAIAVLTKDAGKLTMGQPLVILAPHAVEALVKQPPDRWLSNARMTHYQALLLDTDRVQFGPVVALNPATLLPLPEEGLQHDCLDILAEAHGTRSDLMDQPLPDADHTWYTDGSSFLQEGQRKAGAAVTTETEVIWARALPAGTSAQRAELIALTQALKMAEGKKLNVYTDSRYAFATAHIHGEIYRRRGWLTSEGKEIKNKDEILALLKALFLPKRLSIIHCPGHQKGNSAEARGNRMADQAAREVATRETPETSTLLAGKRTADGSEFEKRTADGSEFESPKKKAKVE

SEQ ID NO: 2363 - protein, 2093 aa, synthetic construct
MPAAKRVKLDGGDKKYSIGLDIGTNSVGWAVITDEYKVPSKKFKVLGNTDRHSIKKNLIGALLFDSGETAEATRLKRTARRRYTRRKNRICYLQEIFSNEMAKVDDSFFHRLEESFLVEEDKKHERHPIFGNIVDEVAYHEKYPTIYHLRKKLVDSTDKADLRLIYLALAHMIKFRGHFLIEGDLNPDNSDVDKLFIQLVQTYNQLFEENPINASGVDAKAILSARLSKSRRLENLIAQLPGEKKNGLFGNLIALSLGLTPNFKSNFDLAEDAKLQLSKDTYDDDLDNLLAQIGDQYADLFLAAKNLSDAILLSDILRVNTEITKAPLSASMIKRYDEHHQDLTLLKALVRQQLPEKYKEIFFDQSKNGYAGYIDGGASQEEFYKFIKPILEKMDGTEELLVKLNREDLLRKQRTFDNGSIPHQIHLGELHAILRRQEDFYPFLKDNREKIEKILTFRIPYYVGPLARGNSRFAWMTRKSEETITPWNFEEVVDKGASAQSFIERMTNFDKNLPNEKVLPKHSLLYEYFTVYNELTKVKYVTEGMRKPAFLSGEQKKAIVDLLFKTNRKVTVKQLKEDYFKKIECFDSVEISGVEDRFNASLGTYHDLLKIIKDKDFLDNEENEDILEDIVLTLTLFEDREMIEERLKTYAHLFDDKVMKQLKRRRYTGWGRLSRKLINGIRDKQSGKTILDFLKSDGFANRNFMQLIHDDSLTFKEDIQKAQVSGQGDSLHEHIANLAGSPAIKKGILQTVKVVDELVKVMGRHKPENIVIEMARENQTTQKGQKNSRERMKRIEEGIKELGSQILKEHPVENTQLQNEKLYLYYLQNGRDMYVDQELDINRLSDYDVDHIVPQSFLKDDSIDNKVLTRSDKARGKSDNVPSEEVVKKMKNYWRQLLNAKLITQRKFDNLTKAERGGLSELDKAGFIKRQLVETRQITKHVAQILDSRMNTKYDENDKLIREVKVITLKSKLVSDFRKDFQFYKVREINNYHHAHDAYLNAVVGTALIKKYPKLESEFVYGDYKVYDVRKMIAKSEQEIGKATAKYFFYSNIMNFFKTEITLANGEIRKRPLIETNGETGEIVWDKGRDFATVRKVLSMPQVNIVKKTEVQTGGFSKESILPKRNSDKLIARKKDWDPKKYGGFDSPTVAYSVLVVAKVEKGKSKKLKSVKELLGITIMERSSFEKNPIDFLEAKGYKEVKKDLIIKLPKYSLFELENGRKRMLASAGELQKGNELALPSKYVNFLYLASHYEKLKGSPEDNEQKQLFVEQHKHYLDEIIEQISEFSKRVILADANLDKVLSAYNKHRDKPIREQAENIIHLFTLTNLGAPAAFKYFDTTIDRKRYTSTKEVLDATLIHQSITGLYETRIDLSQLGGDGGGGSEAAAKGGTLNIEDEYRLHETSKEPDVSLGSTWLSDFPQAWAETGGMGLAVRQAPLIIPLKATSTPVSIKQYPMSQEARLGIKPHIQRLLDQGILVPCQSPWNTPLLPVKKPGTNDYRPVQDLREVNKRVEDIHPTVPNPYNLLSGLPPSHQWYTVLDLKDAFFCLRLHPTSQPLFAFEWRDPEMGISGQLTWTRLPQGFKNSPTLFNEALHRDLAGFRIQHPDLILLQYVDDLLLAATSELDCQQGTRALLQTLGDLGYRASAKKAQICQKQVKYLGYLLKEGQRWLTEARKETVMGQPIPKTPRQLREFLGKAGFCRLFIPGFAEMAAPLYPLTKPGTLFNWGPDQQKAFQEIKQALLTAPALGLPDLTKPFELFVDEKQGYAKGVLTQKLGPWRRPVAYLSKKLDPVAAGWPPCLRMVAAIAVLTKDAGKLTMGQPLVILAPHAVEALVKQPPDRWLSNARMTHYQALLLDTDRVQFGPVVALNPATLLPLPEEGLQHDCLDILAEAHGTRSDLMDQPLPDADHTWYTDGSSFLQEGQRKAGAAVTTETEVIWARALPAGTSAQRAELIALTQALKMAEGKKLNVYTDSRYAFATAHIHGEIYRRRGWLTSEGKEIKNKDEILALLKALFLPKRLSIIHCPGHQKGNSAEARGNRMADQAAREVATRETPETSTLLAGKRTADGSEFEKRTADGSEFESPKKKAKVE

SEQ ID NO: 2364 - protein, 2090 aa, synthetic construct
MPAAKRVKLDGGDKKYSIGLDIGTNSVGWAVITDEYKVPSKKFKVLGNTDRHSIKKNLIGALLFDSGETAEATRLKRTARRRYTRRKNRICYLQEIFSNEMAKVDDSFFHRLEESFLVEEDKKHERHPIFGNIVDEVAYHEKYPTIYHLRKKLVDSTDKADLRLIYLALAHMIKFRGHFLIEGDLNPDNSDVDKLFIQLVQTYNQLFEENPINASGVDAKAILSARLSKSRRLENLIAQLPGEKKNGLFGNLIALSLGLTPNFKSNFDLAEDAKLQLSKDTYDDDLDNLLAQIGDQYADLFLAAKNLSDAILLSDILRVNTEITKAPLSASMIKRYDEHHQDLTLLKALVRQQLPEKYKEIFFDQSKNGYAGYIDGGASQEEFYKFIKPILEKMDGTEELLVKLNREDLLRKQRTFDNGSIPHQIHLGELHAILRRQEDFYPFLKDNREKIEKILTFRIPYYVGPLARGNSRFAWMTRKSEETITPWNFEEVVDKGASAQSFIERMTNFDKNLPNEKVLPKHSLLYEYFTVYNELTKVKYVTEGMRKPAFLSGEQKKAIVDLLFKTNRKVTVKQLKEDYFKKIECFDSVEISGVEDRFNASLGTYHDLLKIIKDKDFLDNEENEDILEDIVLTLTLFEDREMIEERLKTYAHLFDDKVMKQLKRRRYTGWGRLSRKLINGIRDKQSGKTILDFLKSDGFANRNFMQLIHDDSLTFKEDIQKAQVSGQGDSLHEHIANLAGSPAIKKGILQTVKVVDELVKVMGRHKPENIVIEMARENQTTQKGQKNSRERMKRIEEGIKELGSQILKEHPVENTQLQNEKLYLYYLQNGRDMYVDQELDINRLSDYDVDHIVPQSFLKDDSIDNKVLTRSDKARGKSDNVPSEEVVKKMKNYWRQLLNAKLITQRKFDNLTKAERGGLSELDKAGFIKRQLVETRQITKHVAQILDSRMNTKYDENDKLIREVKVITLKSKLVSDFRKDFQFYKVREINNYHHAHDAYLNAVVGTALIKKYPKLESEFVYGDYKVYDVRKMIAKSEQEIGKATAKYFFYSNIMNFFKTEITLANGEIRKRPLIETNGETGEIVWDKGRDFATVRKVLSMPQVNIVKKTEVQTGGFSKESILPKRNSDKLIARKKDWDPKKYGGFDSPTVAYSVLVVAKVEKGKSKKLKSVKELLGITIMERSSFEKNPIDFLEAKGYKEVKKDLIIKLPKYSLFELENGRKRMLASAGELQKGNELALPSKYVNFLYLASHYEKLKGSPEDNEQKQLFVEQHKHYLDEIIEQISEFSKRVILADANLDKVLSAYNKHRDKPIREQAENIIHLFTLTNLGAPAAFKYFDTTIDRKRYTSTKEVLDATLIHQSITGLYETRIDLSQLGGDGGPAPAPGGTLNIEDEYRLHETSKEPDVSLGSTWLSDFPQAWAETGGMGLAVRQAPLIIPLKATSTPVSIKQYPMSQEARLGIKPHIQRLLDQGILVPCQSPWNTPLLPVKKPGTNDYRPVQDLREVNKRVEDIHPTVPNPYNLLSGLPPSHQWYTVLDLKDAFFCLRLHPTSQPLFAFEWRDPEMGISGQLTWTRLPQGFKNSPTLFNEALHRDLAGFRIQHPDLILLQYVDDLLLAATSELDCQQGTRALLQTLGDLGYRASAKKAQICQKQVKYLGYLLKEGQRWLTEARKETVMGQPIPKTPRQLREFLGKAGFCRLFIPGFAEMAAPLYPLTKPGTLFNWGPDQQKAFQEIKQALLTAPALGLPDLTKPFELFVDEKQGYAKGVLTQKLGPWRRPVAYLSKKLDPVAAGWPPCLRMVAAIAVLTKDAGKLTMGQPLVILAPHAVEALVKQPPDRWLSNARMTHYQALLLDTDRVQFGPVVALNPATLLPLPEEGLQHDCLDILAEAHGTRSDLMDQPLPDADHTWYTDGSSFLQEGQRKAGAAVTTETEVIWARALPAGTSAQRAELIALTQALKMAEGKKLNVYTDSRYAFATAHIHGEIYRRRGWLTSEGKEIKNKDEILALLKALFLPKRLSIIHCPGHQKGNSAEARGNRMADQAAREVATRETPETSTLLAGKRTADGSEFEKRTADGSEFESPKKKAKVE

SEQ ID NO: 2365 - protein, 2094 aa, synthetic construct
MPAAKRVKLDGGDKKYSIGLDIGTNSVGWAVITDEYKVPSKKFKVLGNTDRHSIKKNLIGALLFDSGETAEATRLKRTARRRYTRRKNRICYLQEIFSNEMAKVDDSFFHRLEESFLVEEDKKHERHPIFGNIVDEVAYHEKYPTIYHLRKKLVDSTDKADLRLIYLALAHMIKFRGHFLIEGDLNPDNSDVDKLFIQLVQTYNQLFEENPINASGVDAKAILSARLSKSRRLENLIAQLPGEKKNGLFGNLIALSLGLTPNFKSNFDLAEDAKLQLSKDTYDDDLDNLLAQIGDQYADLFLAAKNLSDAILLSDILRVNTEITKAPLSASMIKRYDEHHQDLTLLKALVRQQLPEKYKEIFFDQSKNGYAGYIDGGASQEEFYKFIKPILEKMDGTEELLVKLNREDLLRKQRTFDNGSIPHQIHLGELHAILRRQEDFYPFLKDNREKIEKILTFRIPYYVGPLARGNSRFAWMTRKSEETITPWNFEEVVDKGASAQSFIERMTNFDKNLPNEKVLPKHSLLYEYFTVYNELTKVKYVTEGMRKPAFLSGEQKKAIVDLLFKTNRKVTVKQLKEDYFKKIECFDSVEISGVEDRFNASLGTYHDLLKIIKDKDFLDNEENEDILEDIVLTLTLFEDREMIEERLKTYAHLFDDKVMKQLKRRRYTGWGRLSRKLINGIRDKQSGKTILDFLKSDGFANRNFMQLIHDDSLTFKEDIQKAQVSGQGDSLHEHIANLAGSPAIKKGILQTVKVVDELVKVMGRHKPENIVIEMARENQTTQKGQKNSRERMKRIEEGIKELGSQILKEHPVENTQLQNEKLYLYYLQNGRDMYVDQELDINRLSDYDVDHIVPQSFLKDDSIDNKVLTRSDKARGKSDNVPSEEVVKKMKNYWRQLLNAKLITQRKFDNLTKAERGGLSELDKAGFIKRQLVETRQITKHVAQILDSRMNTKYDENDKLIREVKVITLKSKLVSDFRKDFQFYKVREINNYHHAHDAYLNAVVGTALIKKYPKLESEFVYGDYKVYDVRKMIAKSEQEIGKATAKYFFYSNIMNFFKTEITLANGEIRKRPLIETNGETGEIVWDKGRDFATVRKVLSMPQVNIVKKTEVQTGGFSKESILPKRNSDKLIARKKDWDPKKYGGFDSPTVAYSVLVVAKVEKGKSKKLKSVKELLGITIMERSSFEKNPIDFLEAKGYKEVKKDLIIKLPKYSLFELENGRKRMLASAGELQKGNELALPSKYVNFLYLASHYEKLKGSPEDNEQKQLFVEQHKHYLDEIIEQISEFSKRVILADANLDKVLSAYNKHRDKPIREQAENIIHLFTLTNLGAPAAFKYFDTTIDRKRYTSTKEVLDATLIHQSITGLYETRIDLSQLGGDGGGGSPAPGGGGGTLNIEDEYRLHETSKEPDVSLGSTWLSDFPQAWAETGGMGLAVRQAPLIIPLKATSTPVSIKQYPMSQEARLGIKPHIQRLLDQGILVPCQSPWNTPLLPVKKPGTNDYRPVQDLREVNKRVEDIHPTVPNPYNLLSGLPPSHQWYTVLDLKDAFFCLRLHPTSQPLFAFEWRDPEMGISGQLTWTRLPQGFKNSPTLFNEALHRDLAGFRIQHPDLILLQYVDDLLLAATSELDCQQGTRALLQTLGDLGYRASAKKAQICQKQVKYLGYLLKEGQRWLTEARKETVMGQPIPKTPRQLREFLGKAGFCRLFIPGFAEMAAPLYPLTKPGTLFNWGPDQQKAFQEIKQALLTAPALGLPDLTKPFELFVDEKQGYAKGVLTQKLGPWRRPVAYLSKKLDPVAAGWPPCLRMVAAIAVLTKDAGKLTMGQPLVILAPHAVEALVKQPPDRWLSNARMTHYQALLLDTDRVQFGPVVALNPATLLPLPEEGLQHDCLDILAEAHGTRSDLMDQPLPDADHTWYTDGSSFLQEGQRKAGAAVTTETEVIWARALPAGTSAQRAELIALTQALKMAEGKKLNVYTDSRYAFATAHIHGEIYRRRGWLTSEGKEIKNKDEILALLKALFLPKRLSIIHCPGHQKGNSAEARGNRMADQAAREVATRETPETSTLLAGKRTADGSEFEKRTADGSEFESPKKKAKVE

SEQ ID NO: 2366 - protein, 2091 aa, synthetic construct
MPAAKRVKLDGGDKKYSIGLDIGTNSVGWAVITDEYKVPSKKFKVLGNTDRHSIKKNLIGALLFDSGETAEATRLKRTARRRYTRRKNRICYLQEIFSNEMAKVDDSFFHRLEESFLVEEDKKHERHPIFGNIVDEVAYHEKYPTIYHLRKKLVDSTDKADLRLIYLALAHMIKFRGHFLIEGDLNPDNSDVDKLFIQLVQTYNQLFEENPINASGVDAKAILSARLSKSRRLENLIAQLPGEKKNGLFGNLIALSLGLTPNFKSNFDLAEDAKLQLSKDTYDDDLDNLLAQIGDQYADLFLAAKNLSDAILLSDILRVNTEITKAPLSASMIKRYDEHHQDLTLLKALVRQQLPEKYKEIFFDQSKNGYAGYIDGGASQEEFYKFIKPILEKMDGTEELLVKLNREDLLRKQRTFDNGSIPHQIHLGELHAILRRQEDFYPFLKDNREKIEKILTFRIPYYVGPLARGNSRFAWMTRKSEETITPWNFEEVVDKGASAQSFIERMTNFDKNLPNEKVLPKHSLLYEYFTVYNELTKVKYVTEGMRKPAFLSGEQKKAIVDLLFKTNRKVTVKQLKEDYFKKIECFDSVEISGVEDRFNASLGTYHDLLKIIKDKDFLDNEENEDILEDIVLTLTLFEDREMIEERLKTYAHLFDDKVMKQLKRRRYTGWGRLSRKLINGIRDKQSGKTILDFLKSDGFANRNFMQLIHDDSLTFKEDIQKAQVSGQGDSLHEHIANLAGSPAIKKGILQTVKVVDELVKVMGRHKPENIVIEMARENQTTQKGQKNSRERMKRIEEGIKELGSQILKEHPVENTQLQNEKLYLYYLQNGRDMYVDQELDINRLSDYDVDHIVPQSFLKDDSIDNKVLTRSDKARGKSDNVPSEEVVKKMKNYWRQLLNAKLITQRKFDNLTKAERGGLSELDKAGFIKRQLVETRQITKHVAQILDSRMNTKYDENDKLIREVKVITLKSKLVSDFRKDFQFYKVREINNYHHAHDAYLNAVVGTALIKKYPKLESEFVYGDYKVYDVRKMIAKSEQEIGKATAKYFFYSNIMNFFKTEITLANGEIRKRPLIETNGETGEIVWDKGRDFATVRKVLSMPQVNIVKKTEVQTGGFSKESILPKRNSDKLIARKKDWDPKKYGGFDSPTVAYSVLVVAKVEKGKSKKLKSVKELLGITIMERSSFEKNPIDFLEAKGYKEVKKDLIIKLPKYSLFELENGRKRMLASAGELQKGNELALPSKYVNFLYLASHYEKLKGSPEDNEQKQLFVEQHKHYLDEIIEQISEFSKRVILADANLDKVLSAYNKHRDKPIREQAENIIHLFTLTNLGAPAAFKYFDTTIDRKRYTSTKEVLDATLIHQSITGLYETRIDLSQLGGDGGGSSPAPGGTLNIEDEYRLHETSKEPDVSLGSTWLSDFPQAWAETGGMGLAVRQAPLIIPLKATSTPVSIKQYPMSQEARLGIKPHIQRLLDQGILVPCQSPWNTPLLPVKKPGTNDYRPVQDLREVNKRVEDIHPTVPNPYNLLSGLPPSHQWYTVLDLKDAFFCLRLHPTSQPLFAFEWRDPEMGISGQLTWTRLPQGFKNSPTLFNEALHRDLAGFRIQHPDLILLQYVDDLLLAATSELDCQQGTRALLQTLGDLGYRASAKKAQICQKQVKYLGYLLKEGQRWLTEARKETVMGQPIPKTPRQLREFLGKAGFCRLFIPGFAEMAAPLYPLTKPGTLFNWGPDQQKAFQEIKQALLTAPALGLPDLTKPFELFVDEKQGYAKGVLTQKLGPWRRPVAYLSKKLDPVAAGWPPCLRMVAAIAVLTKDAGKLTMGQPLVILAPHAVEALVKQPPDRWLSNARMTHYQALLLDTDRVQFGPVVALNPATLLPLPEEGLQHDCLDILAEAHGTRSDLMDQPLPDADHTWYTDGSSFLQEGQRKAGAAVTTETEVIWARALPAGTSAQRAELIALTQALKMAEGKKLNVYTDSRYAFATAHIHGEIYRRRGWLTSEGKEIKNKDEILALLKALFLPKRLSIIHCPGHQKGNSAEARGNRMADQAAREVATRETPETSTLLAGKRTADGSEFEKRTADGSEFESPKKKAKVE

SEQ ID NO: 2367 - protein, 2096 aa, synthetic construct
MPAAKRVKLDGGDKKYSIGLDIGTNSVGWAVITDEYKVPSKKFKVLGNTDRHSIKKNLIGALLFDSGETAEATRLKRTARRRYTRRKNRICYLQEIFSNEMAKVDDSFFHRLEESFLVEEDKKHERHPIFGNIVDEVAYHEKYPTIYHLRKKLVDSTDKADLRLIYLALAHMIKFRGHFLIEGDLNPDNSDVDKLFIQLVQTYNQLFEENPINASGVDAKAILSARLSKSRRLENLIAQLPGEKKNGLFGNLIALSLGLTPNFKSNFDLAEDAKLQLSKDTYDDDLDNLLAQIGDQYADLFLAAKNLSDAILLSDILRVNTEITKAPLSASMIKRYDEHHQDLTLLKALVRQQLPEKYKEIFFDQSKNGYAGYIDGGASQEEFYKFIKPILEKMDGTEELLVKLNREDLLRKQRTFDNGSIPHQIHLGELHAILRRQEDFYPFLKDNREKIEKILTFRIPYYVGPLARGNSRFAWMTRKSEETITPWNFEEVVDKGASAQSFIERMTNFDKNLPNEKVLPKHSLLYEYFTVYNELTKVKYVTEGMRKPAFLSGEQKKAIVDLLFKTNRKVTVKQLKEDYFKKIECFDSVEISGVEDRFNASLGTYHDLLKIIKDKDFLDNEENEDILEDIVLTLTLFEDREMIEERLKTYAHLFDDKVMKQLKRRRYTGWGRLSRKLINGIRDKQSGKTILDFLKSDGFANRNFMQLIHDDSLTFKEDIQKAQVSGQGDSLHEHIANLAGSPAIKKGILQTVKVVDELVKVMGRHKPENIVIEMARENQTTQKGQKNSRERMKRIEEGIKELGSQILKEHPVENTQLQNEKLYLYYLQNGRDMYVDQELDINRLSDYDVDHIVPQSFLKDDSIDNKVLTRSDKARGKSDNVPSEEVVKKMKNYWRQLLNAKLITQRKFDNLTKAERGGLSELDKAGFIKRQLVETRQITKHVAQILDSRMNTKYDENDKLIREVKVITLKSKLVSDFRKDFQFYKVREINNYHHAHDAYLNAVVGTALIKKYPKLESEFVYGDYKVYDVRKMIAKSEQEIGKATAKYFFYSNIMNFFKTEITLANGEIRKRPLIETNGETGEIVWDKGRDFATVRKVLSMPQVNIVKKTEVQTGGFSKESILPKRNSDKLIARKKDWDPKKYGGFDSPTVAYSVLVVAKVEKGKSKKLKSVKELLGITIMERSSFEKNPIDFLEAKGYKEVKKDLIIKLPKYSLFELENGRKRMLASAGELQKGNELALPSKYVNFLYLASHYEKLKGSPEDNEQKQLFVEQHKHYLDEIIEQISEFSKRVILADANLDKVLSAYNKHRDKPIREQAENIIHLFTLTNLGAPAAFKYFDTTIDRKRYTSTKEVLDATLIHQSITGLYETRIDLSQLGGDGGEAAAKGSSGGGGGTLNIEDEYRLHETSKEPDVSLGSTWLSDFPQAWAETGGMGLAVRQAPLIIPLKATSTPVSIKQYPMSQEARLGIKPHIQRLLDQGILVPCQSPWNTPLLPVKKPGTNDYRPVQDLREVNKRVEDIHPTVPNPYNLLSGLPPSHQWYTVLDLKDAFFCLRLHPTSQPLFAFEWRDPEMGISGQLTWTRLPQGFKNSPTLFNEALHRDLAGFRIQHPDLILLQYVDDLLLAATSELDCQQGTRALLQTLGDLGYRASAKKAQICQKQVKYLGYLLKEGQRWLTEARKETVMGQPIPKTPRQLREFLGKAGFCRLFIPGFAEMAAPLYPLTKPGTLFNWGPDQQKAFQEIKQALLTAPALGLPDLTKPFELFVDEKQGYAKGVLTQKLGPWRRPVAYLSKKLDPVAAGWPPCLRMVAAIAVLTKDAGKLTMGQPLVILAPHAVEALVKQPPDRWLSNARMTHYQALLLDTDRVQFGPVVALNPATLLPLPEEGLQHDCLDILAEAHGTRSDLMDQPLPDADHTWYTDGSSFLQEGQRKAGAAVTTETEVIWARALPAGTSAQRAELIALTQALKMAEGKKLNVYTDSRYAFATAHIHGEIYRRRGWLTSEGKEIKNKDEILALLKALFLPKRLSIIHCPGHQKGNSAEARGNRMADQAAREVATRETPETSTLLAGKRTADGSEFEKRTADGSEFESPKKKAKVE

SEQ ID NO: 2368 - protein, 2096 aa, synthetic construct
MPAAKRVKLDGGDKKYSIGLDIGTNSVGWAVITDEYKVPSKKFKVLGNTDRHSIKKNLIGALLFDSGETAEATRLKRTARRRYTRRKNRICYLQEIFSNEMAKVDDSFFHRLEESFLVEEDKKHERHPIFGNIVDEVAYHEKYPTIYHLRKKLVDSTDKADLRLIYLALAHMIKFRGHFLIEGDLNPDNSDVDKLFIQLVQTYNQLFEENPINASGVDAKAILSARLSKSRRLENLIAQLPGEKKNGLFGNLIALSLGLTPNFKSNFDLAEDAKLQLSKDTYDDDLDNLLAQIGDQYADLFLAAKNLSDAILLSDILRVNTEITKAPLSASMIKRYDEHHQDLTLLKALVRQQLPEKYKEIFFDQSKNGYAGYIDGGASQEEFYKFIKPILEKMDGTEELLVKLNREDLLRKQRTFDNGSIPHQIHLGELHAILRRQEDFYPFLKDNREKIEKILTFRIPYYVGPLARGNSRFAWMTRKSEETITPWNFEEVVDKGASAQSFIERMTNFDKNLPNEKVLPKHSLLYEYFTVYNELTKVKYVTEGMRKPAFLSGEQKKAIVDLLFKTNRKVTVKQLKEDYFKKIECFDSVEISGVEDRFNASLGTYHDLLKIIKDKDFLDNEENEDILEDIVLTLTLFEDREMIEERLKTYAHLFDDKVMKQLKRRRYTGWGRLSRKLINGIRDKQSGKTILDFLKSDGFANRNFMQLIHDDSLTFKEDIQKAQVSGQGDSLHEHIANLAGSPAIKKGILQTVKVVDELVKVMGRHKPENIVIEMARENQTTQKGQKNSRERMKRIEEGIKELGSQILKEHPVENTQLQNEKLYLYYLQNGRDMYVDQELDINRLSDYDVDHIVPQSFLKDDSIDNKVLTRSDKARGKSDNVPSEEVVKKMKNYWRQLLNAKLITQRKFDNLTKAERGGLSELDKAGFIKRQLVETRQITKHVAQILDSRMNTKYDENDKLIREVKVITLKSKLVSDFRKDFQFYKVREINNYHHAHDAYLNAVVGTALIKKYPKLESEFVYGDYKVYDVRKMIAKSEQEIGKATAKYFFYSNIMNFFKTEITLANGEIRKRPLIETNGETGEIVWDKGRDFATVRKVLSMPQVNIVKKTEVQTGGFSKESILPKRNSDKLIARKKDWDPKKYGGFDSPTVAYSVLVVAKVEKGKSKKLKSVKELLGITIMERSSFEKNPIDFLEAKGYKEVKKDLIIKLPKYSLFELENGRKRMLASAGELQKGNELALPSKYVNFLYLASHYEKLKGSPEDNEQKQLFVEQHKHYLDEIIEQISEFSKRVILADANLDKVLSAYNKHRDKPIREQAENIIHLFTLTNLGAPAAFKYFDTTIDRKRYTSTKEVLDATLIHQSITGLYETRIDLSQLGGDGGEAAAKGSSGGSGGTLNIEDEYRLHETSKEPDVSLGSTWLSDFPQAWAETGGMGLAVRQAPLIIPLKATSTPVSIKQYPMSQEARLGIKPHIQRLLDQGILVPCQSPWNTPLLPVKKPGTNDYRPVQDLREVNKRVEDIHPTVPNPYNLLSGLPPSHQWYTVLDLKDAFFCLRLHPTSQPLFAFEWRDPEMGISGQLTWTRLPQGFKNSPTLFNEALHRDLAGFRIQHPDLILLQYVDDLLLAATSELDCQQGTRALLQTLGDLGYRASAKKAQICQKQVKYLGYLLKEGQRWLTEARKETVMGQPIPKTPRQLREFLGKAGFCRLFIPGFAEMAAPLYPLTKPGTLFNWGPDQQKAFQEIKQALLTAPALGLPDLTKPFELFVDEKQGYAKGVLTQKLGPWRRPVAYLSKKLDPVAAGWPPCLRMVAAIAVLTKDAGKLTMGQPLVILAPHAVEALVKQPPDRWLSNARMTHYQALLLDTDRVQFGPVVALNPATLLPLPEEGLQHDCLDILAEAHGTRSDLMDQPLPDADHTWYTDGSSFLQEGQRKAGAAVTTETEVIWARALPAGTSAQRAELIALTQALKMAEGKKLNVYTDSRYAFATAHIHGEIYRRRGWLTSEGKEIKNKDEILALLKALFLPKRLSIIHCPGHQKGNSAEARGNRMADQAAREVATRETPETSTLLAGKRTADGSEFEKRTADGSEFESPKKKAKVE

SEQ ID NO: 2369 - protein, 2095 aa, synthetic construct
MPAAKRVKLDGGDKKYSIGLDIGTNSVGWAVITDEYKVPSKKFKVLGNTDRHSIKKNLIGALLFDSGETAEATRLKRTARRRYTRRKNRICYLQEIFSNEMAKVDDSFFHRLEESFLVEEDKKHERHPIFGNIVDEVAYHEKYPTIYHLRKKLVDSTDKADLRLIYLALAHMIKFRGHFLIEGDLNPDNSDVDKLFIQLVQTYNQLFEENPINASGVDAKAILSARLSKSRRLENLIAQLPGEKKNGLFGNLIALSLGLTPNFKSNFDLAEDAKLQLSKDTYDDDLDNLLAQIGDQYADLFLAAKNLSDAILLSDILRVNTEITKAPLSASMIKRYDEHHQDLTLLKALVRQQLPEKYKEIFFDQSKNGYAGYIDGGASQEEFYKFIKPILEKMDGTEELLVKLNREDLLRKQRTFDNGSIPHQIHLGELHAILRRQEDFYPFLKDNREKIEKILTFRIPYYVGPLARGNSRFAWMTRKSEETITPWNFEEVVDKGASAQSFIERMTNFDKNLPNEKVLPKHSLLYEYFTVYNELTKVKYVTEGMRKPAFLSGEQKKAIVDLLFKTNRKVTVKQLKEDYFKKIECFDSVEISGVEDRFNASLGTYHDLLKIIKDKDFLDNEENEDILEDIVLTLTLFEDREMIEERLKTYAHLFDDKVMKQLKRRRYTGWGRLSRKLINGIRDKQSGKTILDFLKSDGFANRNFMQLIHDDSLTFKEDIQKAQVSGQGDSLHEHIANLAGSPAIKKGILQTVKVVDELVKVMGRHKPENIVIEMARENQTTQKGQKNSRERMKRIEEGIKELGSQILKEHPVENTQLQNEKLYLYYLQNGRDMYVDQELDINRLSDYDVDHIVPQSFLKDDSIDNKVLTRSDKARGKSDNVPSEEVVKKMKNYWRQLLNAKLITQRKFDNLTKAERGGLSELDKAGFIKRQLVETRQITKHVAQILDSRMNTKYDENDKLIREVKVITLKSKLVSDFRKDFQFYKVREINNYHHAHDAYLNAVVGTALIKKYPKLESEFVYGDYKVYDVRKMIAKSEQEIGKATAKYFFYSNIMNFFKTEITLANGEIRKRPLIETNGETGEIVWDKGRDFATVRKVLSMPQVNIVKKTEVQTGGFSKESILPKRNSDKLIARKKDWDPKKYGGFDSPTVAYSVLVVAKVEKGKSKKLKSVKELLGITIMERSSFEKNPIDFLEAKGYKEVKKDLIIKLPKYSLFELENGRKRMLASAGELQKGNELALPSKYVNFLYLASHYEKLKGSPEDNEQKQLFVEQHKHYLDEIIEQISEFSKRVILADANLDKVLSAYNKHRDKPIREQAENIIHLFTLTNLGAPAAFKYFDTTIDRKRYTSTKEVLDATLIHQSITGLYETRIDLSQLGGDGGGGGGSGGGGSGGTLNIEDEYRLHETSKEPDVSLGSTWLSDFPQAWAETGGMGLAVRQAPLIIPLKATSTPVSIKQYPMSQEARLGIKPHIQRLLDQGILVPCQSPWNTPLLPVKKPGTNDYRPVQDLREVNKRVEDIHPTVPNPYNLLSGLPPSHQWYTVLDLKDAFFCLRLHPTSQPLFAFEWRDPEMGISGQLTWTRLPQGFKNSPTLFNEALHRDLAGFRIQHPDLILLQYVDDLLLAATSELDCQQGTRALLQTLGDLGYRASAKKAQICQKQVKYLGYLLKEGQRWLTEARKETVMGQPIPKTPRQLREFLGKAGFCRLFIPGFAEMAAPLYPLTKPGTLFNWGPDQQKAFQEIKQALLTAPALGLPDLTKPFELFVDEKQGYAKGVLTQKLGPWRRPVAYLSKKLDPVAAGWPPCLRMVAAIAVLTKDAGKLTMGQPLVILAPHAVEALVKQPPDRWLSNARMTHYQALLLDTDRVQFGPVVALNPATLLPLPEEGLQHDCLDILAEAHGTRSDLMDQPLPDADHTWYTDGSSFLQEGQRKAGAAVTTETEVIWARALPAGTSAQRAELIALTQALKMAEGKKLNVYTDSRYAFATAHIHGEIYRRRGWLTSEGKEIKNKDEILALLKALFLPKRLSIIHCPGHQKGNSAEARGNRMADQAAREVATRETPETSTLLAGKRTADGSEFEKRTADGSEFESPKKKAKVE

SEQ ID NO: 2370 - protein, 2096 aa, synthetic construct
MPAAKRVKLDGGDKKYSIGLDIGTNSVGWAVITDEYKVPSKKFKVLGNTDRHSIKKNLIGALLFDSGETAEATRLKRTARRRYTRRKNRICYLQEIFSNEMAKVDDSFFHRLEESFLVEEDKKHERHPIFGNIVDEVAYHEKYPTIYHLRKKLVDSTDKADLRLIYLALAHMIKFRGHFLIEGDLNPDNSDVDKLFIQLVQTYNQLFEENPINASGVDAKAILSARLSKSRRLENLIAQLPGEKKNGLFGNLIALSLGLTPNFKSNFDLAEDAKLQLSKDTYDDDLDNLLAQIGDQYADLFLAAKNLSDAILLSDILRVNTEITKAPLSASMIKRYDEHHQDLTLLKALVRQQLPEKYKEIFFDQSKNGYAGYIDGGASQEEFYKFIKPILEKMDGTEELLVKLNREDLLRKQRTFDNGSIPHQIHLGELHAILRRQEDFYPFLKDNREKIEKILTFRIPYYVGPLARGNSRFAWMTRKSEETITPWNFEEVVDKGASAQSFIERMTNFDKNLPNEKVLPKHSLLYEYFTVYNELTKVKYVTEGMRKPAFLSGEQKKAIVDLLFKTNRKVTVKQLKEDYFKKIECFDSVEISGVEDRFNASLGTYHDLLKIIKDKDFLDNEENEDILEDIVLTLTLFEDREMIEERLKTYAHLFDDKVMKQLKRRRYTGWGRLSRKLINGIRDKQSGKTILDFLKSDGFANRNFMQLIHDDSLTFKEDIQKAQVSGQGDSLHEHIANLAGSPAIKKGILQTVKVVDELVKVMGRHKPENIVIEMARENQTTQKGQKNSRERMKRIEEGIKELGSQILKEHPVENTQLQNEKLYLYYLQNGRDMYVDQELDINRLSDYDVDHIVPQSFLKDDSIDNKVLTRSDKARGKSDNVPSEEVVKKMKNYWRQLLNAKLITQRKFDNLTKAERGGLSELDKAGFIKRQLVETRQITKHVAQILDSRMNTKYDENDKLIREVKVITLKSKLVSDFRKDFQFYKVREINNYHHAHDAYLNAVVGTALIKKYPKLESEFVYGDYKVYDVRKMIAKSEQEIGKATAKYFFYSNIMNFFKTEITLANGEIRKRPLIETNGETGEIVWDKGRDFATVRKVLSMPQVNIVKKTEVQTGGFSKESILPKRNSDKLIARKKDWDPKKYGGFDSPTVAYSVLVVAKVEKGKSKKLKSVKELLGITIMERSSFEKNPIDFLEAKGYKEVKKDLIIKLPKYSLFELENGRKRMLASAGELQKGNELALPSKYVNFLYLASHYEKLKGSPEDNEQKQLFVEQHKHYLDEIIEQISEFSKRVILADANLDKVLSAYNKHRDKPIREQAENIIHLFTLTNLGAPAAFKYFDTTIDRKRYTSTKEVLDATLIHQSITGLYETRIDLSQLGGDGGEAAAKGGSGSSGGTLNIEDEYRLHETSKEPDVSLGSTWLSDFPQAWAETGGMGLAVRQAPLIIPLKATSTPVSIKQYPMSQEARLGIKPHIQRLLDQGILVPCQSPWNTPLLPVKKPGTNDYRPVQDLREVNKRVEDIHPTVPNPYNLLSGLPPSHQWYTVLDLKDAFFCLRLHPTSQPLFAFEWRDPEMGISGQLTWTRLPQGFKNSPTLFNEALHRDLAGFRIQHPDLILLQYVDDLLLAATSELDCQQGTRALLQTLGDLGYRASAKKAQICQKQVKYLGYLLKEGQRWLTEARKETVMGQPIPKTPRQLREFLGKAGFCRLFIPGFAEMAAPLYPLTKPGTLFNWGPDQQKAFQEIKQALLTAPALGLPDLTKPFELFVDEKQGYAKGVLTQKLGPWRRPVAYLSKKLDPVAAGWPPCLRMVAAIAVLTKDAGKLTMGQPLVILAPHAVEALVKQPPDRWLSNARMTHYQALLLDTDRVQFGPVVALNPATLLPLPEEGLQHDCLDILAEAHGTRSDLMDQPLPDADHTWYTDGSSFLQEGQRKAGAAVTTETEVIWARALPAGTSAQRAELIALTQALKMAEGKKLNVYTDSRYAFATAHIHGEIYRRRGWLTSEGKEIKNKDEILALLKALFLPKRLSIIHCPGHQKGNSAEARGNRMADQAAREVATRETPETSTLLAGKRTADGSEFEKRTADGSEFESPKKKAKVE

SEQ ID NO: 2371 - protein, 2094 aa, synthetic construct
MPAAKRVKLDGGDKKYSIGLDIGTNSVGWAVITDEYKVPSKKFKVLGNTDRHSIKKNLIGALLFDSGETAEATRLKRTARRRYTRRKNRICYLQEIFSNEMAKVDDSFFHRLEESFLVEEDKKHERHPIFGNIVDEVAYHEKYPTIYHLRKKLVDSTDKADLRLIYLALAHMIKFRGHFLIEGDLNPDNSDVDKLFIQLVQTYNQLFEENPINASGVDAKAILSARLSKSRRLENLIAQLPGEKKNGLFGNLIALSLGLTPNFKSNFDLAEDAKLQLSKDTYDDDLDNLLAQIGDQYADLFLAAKNLSDAILLSDILRVNTEITKAPLSASMIKRYDEHHQDLTLLKALVRQQLPEKYKEIFFDQSKNGYAGYIDGGASQEEFYKFIKPILEKMDGTEELLVKLNREDLLRKQRTFDNGSIPHQIHLGELHAILRRQEDFYPFLKDNREKIEKILTFRIPYYVGPLARGNSRFAWMTRKSEETITPWNFEEVVDKGASAQSFIERMTNFDKNLPNEKVLPKHSLLYEYFTVYNELTKVKYVTEGMRKPAFLSGEQKKAIVDLLFKTNRKVTVKQLKEDYFKKIECFDSVEISGVEDRFNASLGTYHDLLKIIKDKDFLDNEENEDILEDIVLTLTLFEDREMIEERLKTYAHLFDDKVMKQLKRRRYTGWGRLSRKLINGIRDKQSGKTILDFLKSDGFANRNFMQLIHDDSLTFKEDIQKAQVSGQGDSLHEHIANLAGSPAIKKGILQTVKVVDELVKVMGRHKPENIVIEMARENQTTQKGQKNSRERMKRIEEGIKELGSQILKEHPVENTQLQNEKLYLYYLQNGRDMYVDQELDINRLSDYDVDHIVPQSFLKDDSIDNKVLTRSDKARGKSDNVPSEEVVKKMKNYWRQLLNAKLITQRKFDNLTKAERGGLSELDKAGFIKRQLVETRQITKHVAQILDSRMNTKYDENDKLIREVKVITLKSKLVSDFRKDFQFYKVREINNYHHAHDAYLNAVVGTALIKKYPKLESEFVYGDYKVYDVRKMIAKSEQEIGKATAKYFFYSNIMNFFKTEITLANGEIRKRPLIETNGETGEIVWDKGRDFATVRKVLSMPQVNIVKKTEVQTGGFSKESILPKRNSDKLIARKKDWDPKKYGGFDSPTVAYSVLVVAKVEKGKSKKLKSVKELLGITIMERSSFEKNPIDFLEAKGYKEVKKDLIIKLPKYSLFELENGRKRMLASAGELQKGNELALPSKYVNFLYLASHYEKLKGSPEDNEQKQLFVEQHKHYLDEIIEQISEFSKRVILADANLDKVLSAYNKHRDKPIREQAENIIHLFTLTNLGAPAAFKYFDTTIDRKRYTSTKEVLDATLIHQSITGLYETRIDLSQLGGDGGGGSGGGGSSGGTLNIEDEYRLHETSKEPDVSLGSTWLSDFPQAWAETGGMGLAVRQAPLIIPLKATSTPVSIKQYPMSQEARLGIKPHIQRLLDQGILVPCQSPWNTPLLPVKKPGTNDYRPVQDLREVNKRVEDIHPTVPNPYNLLSGLPPSHQWYTVLDLKDAFFCLRLHPTSQPLFAFEWRDPEMGISGQLTWTRLPQGFKNSPTLFNEALHRDLAGFRIQHPDLILLQYVDDLLLAATSELDCQQGTRALLQTLGDLGYRASAKKAQICQKQVKYLGYLLKEGQRWLTEARKETVMGQPIPKTPRQLREFLGKAGFCRLFIPGFAEMAAPLYPLTKPGTLFNWGPDQQKAFQEIKQALLTAPALGLPDLTKPFELFVDEKQGYAKGVLTQKLGPWRRPVAYLSKKLDPVAAGWPPCLRMVAAIAVLTKDAGKLTMGQPLVILAPHAVEALVKQPPDRWLSNARMTHYQALLLDTDRVQFGPVVALNPATLLPLPEEGLQHDCLDILAEAHGTRSDLMDQPLPDADHTWYTDGSSFLQEGQRKAGAAVTTETEVIWARALPAGTSAQRAELIALTQALKMAEGKKLNVYTDSRYAFATAHIHGEIYRRRGWLTSEGKEIKNKDEILALLKALFLPKRLSIIHCPGHQKGNSAEARGNRMADQAAREVATRETPETSTLLAGKRTADGSEFEKRTADGSEFESPKKKAKVE

SEQ ID NO: 2372 - protein, 2096 aa, synthetic construct
MPAAKRVKLDGGDKKYSIGLDIGTNSVGWAVITDEYKVPSKKFKVLGNTDRHSIKKNLIGALLFDSGETAEATRLKRTARRRYTRRKNRICYLQEIFSNEMAKVDDSFFHRLEESFLVEEDKKHERHPIFGNIVDEVAYHEKYPTIYHLRKKLVDSTDKADLRLIYLALAHMIKFRGHFLIEGDLNPDNSDVDKLFIQLVQTYNQLFEENPINASGVDAKAILSARLSKSRRLENLIAQLPGEKKNGLFGNLIALSLGLTPNFKSNFDLAEDAKLQLSKDTYDDDLDNLLAQIGDQYADLFLAAKNLSDAILLSDILRVNTEITKAPLSASMIKRYDEHHQDLTLLKALVRQQLPEKYKEIFFDQSKNGYAGYIDGGASQEEFYKFIKPILEKMDGTEELLVKLNREDLLRKQRTFDNGSIPHQIHLGELHAILRRQEDFYPFLKDNREKIEKILTFRIPYYVGPLARGNSRFAWMTRKSEETITPWNFEEVVDKGASAQSFIERMTNFDKNLPNEKVLPKHSLLYEYFTVYNELTKVKYVTEGMRKPAFLSGEQKKAIVDLLFKTNRKVTVKQLKEDYFKKIECFDSVEISGVEDRFNASLGTYHDLLKIIKDKDFLDNEENEDILEDIVLTLTLFEDREMIEERLKTYAHLFDDKVMKQLKRRRYTGWGRLSRKLINGIRDKQSGKTILDFLKSDGFANRNFMQLIHDDSLTFKEDIQKAQVSGQGDSLHEHIANLAGSPAIKKGILQTVKVVDELVKVMGRHKPENIVIEMARENQTTQKGQKNSRERMKRIEEGIKELGSQILKEHPVENTQLQNEKLYLYYLQNGRDMYVDQELDINRLSDYDVDHIVPQSFLKDDSIDNKVLTRSDKARGKSDNVPSEEVVKKMKNYWRQLLNAKLITQRKFDNLTKAERGGLSELDKAGFIKRQLVETRQITKHVAQILDSRMNTKYDENDKLIREVKVITLKSKLVSDFRKDFQFYKVREINNYHHAHDAYLNAVVGTALIKKYPKLESEFVYGDYKVYDVRKMIAKSEQEIGKATAKYFFYSNIMNFFKTEITLANGEIRKRPLIETNGETGEIVWDKGRDFATVRKVLSMPQVNIVKKTEVQTGGFSKESILPKRNSDKLIARKKDWDPKKYGGFDSPTVAYSVLVVAKVEKGKSKKLKSVKELLGITIMERSSFEKNPIDFLEAKGYKEVKKDLIIKLPKYSLFELENGRKRMLASAGELQKGNELALPSKYVNFLYLASHYEKLKGSPEDNEQKQLFVEQHKHYLDEIIEQISEFSKRVILADANLDKVLSAYNKHRDKPIREQAENIIHLFTLTNLGAPAAFKYFDTTIDRKRYTSTKEVLDATLIHQSITGLYETRIDLSQLGGDGGEAAAKGGSPAPGGTLNIEDEYRLHETSKEPDVSLGSTWLSDFPQAWAETGGMGLAVRQAPLIIPLKATSTPVSIKQYPMSQEARLGIKPHIQRLLDQGILVPCQSPWNTPLLPVKKPGTNDYRPVQDLREVNKRVEDIHPTVPNPYNLLSGLPPSHQWYTVLDLKDAFFCLRLHPTSQPLFAFEWRDPEMGISGQLTWTRLPQGFKNSPTLFNEALHRDLAGFRIQHPDLILLQYVDDLLLAATSELDCQQGTRALLQTLGDLGYRASAKKAQICQKQVKYLGYLLKEGQRWLTEARKETVMGQPIPKTPRQLREFLGKAGFCRLFIPGFAEMAAPLYPLTKPGTLFNWGPDQQKAFQEIKQALLTAPALGLPDLTKPFELFVDEKQGYAKGVLTQKLGPWRRPVAYLSKKLDPVAAGWPPCLRMVAAIAVLTKDAGKLTMGQPLVILAPHAVEALVKQPPDRWLSNARMTHYQALLLDTDRVQFGPVVALNPATLLPLPEEGLQHDCLDILAEAHGTRSDLMDQPLPDADHTWYTDGSSFLQEGQRKAGAAVTTETEVIWARALPAGTSAQRAELIALTQALKMAEGKKLNVYTDSRYAFATAHIHGEIYRRRGWLTSEGKEIKNKDEILALLKALFLPKRLSIIHCPGHQKGNSAEARGNRMADQAAREVATRETPETSTLLAGKRTADGSEFEKRTADGSEFESPKKKAKVE

SEQ ID NO: 2373 - protein, 2100 aa, synthetic construct
MPAAKRVKLDGGDKKYSIGLDIGTNSVGWAVITDEYKVPSKKFKVLGNTDRHSIKKNLIGALLFDSGETAEATRLKRTARRRYTRRKNRICYLQEIFSNEMAKVDDSFFHRLEESFLVEEDKKHERHPIFGNIVDEVAYHEKYPTIYHLRKKLVDSTDKADLRLIYLALAHMIKFRGHFLIEGDLNPDNSDVDKLFIQLVQTYNQLFEENPINASGVDAKAILSARLSKSRRLENLIAQLPGEKKNGLFGNLIALSLGLTPNFKSNFDLAEDAKLQLSKDTYDDDLDNLLAQIGDQYADLFLAAKNLSDAILLSDILRVNTEITKAPLSASMIKRYDEHHQDLTLLKALVRQQLPEKYKEIFFDQSKNGYAGYIDGGASQEEFYKFIKPILEKMDGTEELLVKLNREDLLRKQRTFDNGSIPHQIHLGELHAILRRQEDFYPFLKDNREKIEKILTFRIPYYVGPLARGNSRFAWMTRKSEETITPWNFEEVVDKGASAQSFIERMTNFDKNLPNEKVLPKHSLLYEYFTVYNELTKVKYVTEGMRKPAFLSGEQKKAIVDLLFKTNRKVTVKQLKEDYFKKIECFDSVEISGVEDRFNASLGTYHDLLKIIKDKDFLDNEENEDILEDIVLTLTLFEDREMIEERLKTYAHLFDDKVMKQLKRRRYTGWGRLSRKLINGIRDKQSGKTILDFLKSDGFANRNFMQLIHDDSLTFKEDIQKAQVSGQGDSLHEHIANLAGSPAIKKGILQTVKVVDELVKVMGRHKPENIVIEMARENQTTQKGQKNSRERMKRIEEGIKELGSQILKEHPVENTQLQNEKLYLYYLQNGRDMYVDQELDINRLSDYDVDHIVPQSFLKDDSIDNKVLTRSDKARGKSDNVPSEEVVKKMKNYWRQLLNAKLITQRKFDNLTKAERGGLSELDKAGFIKRQLVETRQITKHVAQILDSRMNTKYDENDKLIREVKVITLKSKLVSDFRKDFQFYKVREINNYHHAHDAYLNAVVGTALIKKYPKLESEFVYGDYKVYDVRKMIAKSEQEIGKATAKYFFYSNIMNFFKTEITLANGEIRKRPLIETNGETGEIVWDKGRDFATVRKVLSMPQVNIVKKTEVQTGGFSKESILPKRNSDKLIARKKDWDPKKYGGFDSPTVAYSVLVVAKVEKGKSKKLKSVKELLGITIMERSSFEKNPIDFLEAKGYKEVKKDLIIKLPKYSLFELENGRKRMLASAGELQKGNELALPSKYVNFLYLASHYEKLKGSPEDNEQKQLFVEQHKHYLDEIIEQISEFSKRVILADANLDKVLSAYNKHRDKPIREQAENIIHLFTLTNLGAPAAFKYFDTTIDRKRYTSTKEVLDATLIHQSITGLYETRIDLSQLGGDGGEAAAKEAAAKEAAAKGGTLNIEDEYRLHETSKEPDVSLGSTWLSDFPQAWAETGGMGLAVRQAPLIIPLKATSTPVSIKQYPMSQEARLGIKPHIQRLLDQGILVPCQSPWNTPLLPVKKPGTNDYRPVQDLREVNKRVEDIHPTVPNPYNLLSGLPPSHQWYTVLDLKDAFFCLRLHPTSQPLFAFEWRDPEMGISGQLTWTRLPQGFKNSPTLFNEALHRDLAGFRIQHPDLILLQYVDDLLLAATSELDCQQGTRALLQTLGDLGYRASAKKAQICQKQVKYLGYLLKEGQRWLTEARKETVMGQPIPKTPRQLREFLGKAGFCRLFIPGFAEMAAPLYPLTKPGTLFNWGPDQQKAFQEIKQALLTAPALGLPDLTKPFELFVDEKQGYAKGVLTQKLGPWRRPVAYLSKKLDPVAAGWPPCLRMVAAIAVLTKDAGKLTMGQPLVILAPHAVEALVKQPPDRWLSNARMTHYQALLLDTDRVQFGPVVALNPATLLPLPEEGLQHDCLDILAEAHGTRSDLMDQPLPDADHTWYTDGSSFLQEGQRKAGAAVTTETEVIWARALPAGTSAQRAELIALTQALKMAEGKKLNVYTDSRYAFATAHIHGEIYRRRGWLTSEGKEIKNKDEILALLKALFLPKRLSIIHCPGHQKGNSAEARGNRMADQAAREVATRETPETSTLLAGKRTADGSEFEKRTADGSEFESPKKKAKVE

SEQ ID NO: 2374 - protein, 2100 aa, synthetic construct
MPAAKRVKLDGGDKKYSIGLDIGTNSVGWAVITDEYKVPSKKFKVLGNTDRHSIKKNLIGALLFDSGETAEATRLKRTARRRYTRRKNRICYLQEIFSNEMAKVDDSFFHRLEESFLVEEDKKHERHPIFGNIVDEVAYHEKYPTIYHLRKKLVDSTDKADLRLIYLALAHMIKFRGHFLIEGDLNPDNSDVDKLFIQLVQTYNQLFEENPINASGVDAKAILSARLSKSRRLENLIAQLPGEKKNGLFGNLIALSLGLTPNFKSNFDLAEDAKLQLSKDTYDDDLDNLLAQIGDQYADLFLAAKNLSDAILLSDILRVNTEITKAPLSASMIKRYDEHHQDLTLLKALVRQQLPEKYKEIFFDQSKNGYAGYIDGGASQEEFYKFIKPILEKMDGTEELLVKLNREDLLRKQRTFDNGSIPHQIHLGELHAILRRQEDFYPFLKDNREKIEKILTFRIPYYVGPLARGNSRFAWMTRKSEETITPWNFEEVVDKGASAQSFIERMTNFDKNLPNEKVLPKHSLLYEYFTVYNELTKVKYVTEGMRKPAFLSGEQKKAIVDLLFKTNRKVTVKQLKEDYFKKIECFDSVEISGVEDRFNASLGTYHDLLKIIKDKDFLDNEENEDILEDIVLTLTLFEDREMIEERLKTYAHLFDDKVMKQLKRRRYTGWGRLSRKLINGIRDKQSGKTILDFLKSDGFANRNFMQLIHDDSLTFKEDIQKAQVSGQGDSLHEHIANLAGSPAIKKGILQTVKVVDELVKVMGRHKPENIVIEMARENQTTQKGQKNSRERMKRIEEGIKELGSQILKEHPVENTQLQNEKLYLYYLQNGRDMYVDQELDINRLSDYDVDHIVPQSFLKDDSIDNKVLTRSDKARGKSDNVPSEEVVKKMKNYWRQLLNAKLITQRKFDNLTKAERGGLSELDKAGFIKRQLVETRQITKHVAQILDSRMNTKYDENDKLIREVKVITLKSKLVSDFRKDFQFYKVREINNYHHAHDAYLNAVVGTALIKKYPKLESEFVYGDYKVYDVRKMIAKSEQEIGKATAKYFFYSNIMNFFKTEITLANGEIRKRPLIETNGETGEIVWDKGRDFATVRKVLSMPQVNIVKKTEVQTGGFSKESILPKRNSDKLIARKKDWDPKKYGGFDSPTVAYSVLVVAKVEKGKSKKLKSVKELLGITIMERSSFEKNPIDFLEAKGYKEVKKDLIIKLPKYSLFELENGRKRMLASAGELQKGNELALPSKYVNFLYLASHYEKLKGSPEDNEQKQLFVEQHKHYLDEIIEQISEFSKRVILADANLDKVLSAYNKHRDKPIREQAENIIHLFTLTNLGAPAAFKYFDTTIDRKRYTSTKEVLDATLIHQSITGLYETRIDLSQLGGDGGGGGGSEAAAKGGGGSGGTLNIEDEYRLHETSKEPDVSLGSTWLSDFPQAWAETGGMGLAVRQAPLIIPLKATSTPVSIKQYPMSQEARLGIKPHIQRLLDQGILVPCQSPWNTPLLPVKKPGTNDYRPVQDLREVNKRVEDIHPTVPNPYNLLSGLPPSHQWYTVLDLKDAFFCLRLHPTSQPLFAFEWRDPEMGISGQLTWTRLPQGFKNSPTLFNEALHRDLAGFRIQHPDLILLQYVDDLLLAATSELDCQQGTRALLQTLGDLGYRASAKKAQICQKQVKYLGYLLKEGQRWLTEARKETVMGQPIPKTPRQLREFLGKAGFCRLFIPGFAEMAAPLYPLTKPGTLFNWGPDQQKAFQEIKQALLTAPALGLPDLTKPFELFVDEKQGYAKGVLTQKLGPWRRPVAYLSKKLDPVAAGWPPCLRMVAAIAVLTKDAGKLTMGQPLVILAPHAVEALVKQPPDRWLSNARMTHYQALLLDTDRVQFGPVVALNPATLLPLPEEGLQHDCLDILAEAHGTRSDLMDQPLPDADHTWYTDGSSFLQEGQRKAGAAVTTETEVIWARALPAGTSAQRAELIALTQALKMAEGKKLNVYTDSRYAFATAHIHGEIYRRRGWLTSEGKEIKNKDEILALLKALFLPKRLSIIHCPGHQKGNSAEARGNRMADQAAREVATRETPETSTLLAGKRTADGSEFEKRTADGSEFESPKKKAKVE

SEQ ID NO: 2375 - protein, 2088 aa, synthetic construct
MPAAKRVKLDGGDKKYSIGLDIGTNSVGWAVITDEYKVPSKKFKVLGNTDRHSIKKNLIGALLFDSGETAEATRLKRTARRRYTRRKNRICYLQEIFSNEMAKVDDSFFHRLEESFLVEEDKKHERHPIFGNIVDEVAYHEKYPTIYHLRKKLVDSTDKADLRLIYLALAHMIKFRGHFLIEGDLNPDNSDVDKLFIQLVQTYNQLFEENPINASGVDAKAILSARLSKSRRLENLIAQLPGEKKNGLFGNLIALSLGLTPNFKSNFDLAEDAKLQLSKDTYDDDLDNLLAQIGDQYADLFLAAKNLSDAILLSDILRVNTEITKAPLSASMIKRYDEHHQDLTLLKALVRQQLPEKYKEIFFDQSKNGYAGYIDGGASQEEFYKFIKPILEKMDGTEELLVKLNREDLLRKQRTFDNGSIPHQIHLGELHAILRRQEDFYPFLKDNREKIEKILTFRIPYYVGPLARGNSRFAWMTRKSEETITPWNFEEVVDKGASAQSFIERMTNFDKNLPNEKVLPKHSLLYEYFTVYNELTKVKYVTEGMRKPAFLSGEQKKAIVDLLFKTNRKVTVKQLKEDYFKKIECFDSVEISGVEDRFNASLGTYHDLLKIIKDKDFLDNEENEDILEDIVLTLTLFEDREMIEERLKTYAHLFDDKVMKQLKRRRYTGWGRLSRKLINGIRDKQSGKTILDFLKSDGFANRNFMQLIHDDSLTFKEDIQKAQVSGQGDSLHEHIANLAGSPAIKKGILQTVKVVDELVKVMGRHKPENIVIEMARENQTTQKGQKNSRERMKRIEEGIKELGSQILKEHPVENTQLQNEKLYLYYLQNGRDMYVDQELDINRLSDYDVDHIVPQSFLKDDSIDNKVLTRSDKARGKSDNVPSEEVVKKMKNYWRQLLNAKLITQRKFDNLTKAERGGLSELDKAGFIKRQLVETRQITKHVAQILDSRMNTKYDENDKLIREVKVITLKSKLVSDFRKDFQFYKVREINNYHHAHDAYLNAVVGTALIKKYPKLESEFVYGDYKVYDVRKMIAKSEQEIGKATAKYFFYSNIMNFFKTEITLANGEIRKRPLIETNGETGEIVWDKGRDFATVRKVLSMPQVNIVKKTEVQTGGFSKESILPKRNSDKLIARKKDWDPKKYGGFDSPTVAYSVLVVAKVEKGKSKKLKSVKELLGITIMERSSFEKNPIDFLEAKGYKEVKKDLIIKLPKYSLFELENGRKRMLASAGELQKGNELALPSKYVNFLYLASHYEKLKGSPEDNEQKQLFVEQHKHYLDEIIEQISEFSKRVILADANLDKVLSAYNKHRDKPIREQAENIIHLFTLTNLGAPAAFKYFDTTIDRKRYTSTKEVLDATLIHQSITGLYETRIDLSQLGGDGGGGGGGTLNIEDEYRLHETSKEPDVSLGSTWLSDFPQAWAETGGMGLAVRQAPLIIPLKATSTPVSIKQYPMSQEARLGIKPHIQRLLDQGILVPCQSPWNTPLLPVKKPGTNDYRPVQDLREVNKRVEDIHPTVPNPYNLLSGLPPSHQWYTVLDLKDAFFCLRLHPTSQPLFAFEWRDPEMGISGQLTWTRLPQGFKNSPTLFNEALHRDLAGFRIQHPDLILLQYVDDLLLAATSELDCQQGTRALLQTLGDLGYRASAKKAQICQKQVKYLGYLLKEGQRWLTEARKETVMGQPIPKTPRQLREFLGKAGFCRLFIPGFAEMAAPLYPLTKPGTLFNWGPDQQKAFQEIKQALLTAPALGLPDLTKPFELFVDEKQGYAKGVLTQKLGPWRRPVAYLSKKLDPVAAGWPPCLRMVAAIAVLTKDAGKLTMGQPLVILAPHAVEALVKQPPDRWLSNARMTHYQALLLDTDRVQFGPVVALNPATLLPLPEEGLQHDCLDILAEAHGTRSDLMDQPLPDADHTWYTDGSSFLQEGQRKAGAAVTTETEVIWARALPAGTSAQRAELIALTQALKMAEGKKLNVYTDSRYAFATAHIHGEIYRRRGWLTSEGKEIKNKDEILALLKALFLPKRLSIIHCPGHQKGNSAEARGNRMADQAAREVATRETPETSTLLAGKRTADGSEFEKRTADGSEFESPKKKAKVE

SEQ ID NO: 2376 - protein, 2118 aa, synthetic construct
MPAAKRVKLDGGDKKYSIGLDIGTNSVGWAVITDEYKVPSKKFKVLGNTDRHSIKKNLIGALLFDSGETAEATRLKRTARRRYTRRKNRICYLQEIFSNEMAKVDDSFFHRLEESFLVEEDKKHERHPIFGNIVDEVAYHEKYPTIYHLRKKLVDSTDKADLRLIYLALAHMIKFRGHFLIEGDLNPDNSDVDKLFIQLVQTYNQLFEENPINASGVDAKAILSARLSKSRRLENLIAQLPGEKKNGLFGNLIALSLGLTPNFKSNFDLAEDAKLQLSKDTYDDDLDNLLAQIGDQYADLFLAAKNLSDAILLSDILRVNTEITKAPLSASMIKRYDEHHQDLTLLKALVRQQLPEKYKEIFFDQSKNGYAGYIDGGASQEEFYKFIKPILEKMDGTEELLVKLNREDLLRKQRTFDNGSIPHQIHLGELHAILRRQEDFYPFLKDNREKIEKILTFRIPYYVGPLARGNSRFAWMTRKSEETITPWNFEEVVDKGASAQSFIERMTNFDKNLPNEKVLPKHSLLYEYFTVYNELTKVKYVTEGMRKPAFLSGEQKKAIVDLLFKTNRKVTVKQLKEDYFKKIECFDSVEISGVEDRFNASLGTYHDLLKIIKDKDFLDNEENEDILEDIVLTLTLFEDREMIEERLKTYAHLFDDKVMKQLKRRRYTGWGRLSRKLINGIRDKQSGKTILDFLKSDGFANRNFMQLIHDDSLTFKEDIQKAQVSGQGDSLHEHIANLAGSPAIKKGILQTVKVVDELVKVMGRHKPENIVIEMARENQTTQKGQKNSRERMKRIEEGIKELGSQILKEHPVENTQLQNEKLYLYYLQNGRDMYVDQELDINRLSDYDVDHIVPQSFLKDDSIDNKVLTRSDKARGKSDNVPSEEVVKKMKNYWRQLLNAKLITQRKFDNLTKAERGGLSELDKAGFIKRQLVETRQITKHVAQILDSRMNTKYDENDKLIREVKVITLKSKLVSDFRKDFQFYKVREINNYHHAHDAYLNAVVGTALIKKYPKLESEFVYGDYKVYDVRKMIAKSEQEIGKATAKYFFYSNIMNFFKTEITLANGEIRKRPLIETNGETGEIVWDKGRDFATVRKVLSMPQVNIVKKTEVQTGGFSKESILPKRNSDKLIARKKDWDPKKYGGFDSPTVAYSVLVVAKVEKGKSKKLKSVKELLGITIMERSSFEKNPIDFLEAKGYKEVKKDLIIKLPKYSLFELENGRKRMLASAGELQKGNELALPSKYVNFLYLASHYEKLKGSPEDNEQKQLFVEQHKHYLDEIIEQISEFSKRVILADANLDKVLSAYNKHRDKPIREQAENIIHLFTLTNLGAPAAFKYFDTTIDRKRYTSTKEVLDATLIHQSITGLYETRIDLSQLGGDGGSGGSSGGSSGSETPGTSESATPESSGGSSGGSSGGTLNIEDEYRLHETSKEPDVSLGSTWLSDFPQAWAETGGMGLAVRQAPLIIPLKATSTPVSIKQYPMSQEARLGIKPHIQRLLDQGILVPCQSPWNTPLLPVKKPGTNDYRPVQDLREVNKRVEDIHPTVPNPYNLLSGLPPSHQWYTVLDLKDAFFCLRLHPTSQPLFAFEWRDPEMGISGQLTWTRLPQGFKNSPTLFNEALHRDLAGFRIQHPDLILLQYVDDLLLAATSELDCQQGTRALLQTLGDLGYRASAKKAQICQKQVKYLGYLLKEGQRWLTEARKETVMGQPIPKTPRQLREFLGKAGFCRLFIPGFAEMAAPLYPLTKPGTLFNWGPDQQKAFQEIKQALLTAPALGLPDLTKPFELFVDEKQGYAKGVLTQKLGPWRRPVAYLSKKLDPVAAGWPPCLRMVAAIAVLTKDAGKLTMGQPLVILAPHAVEALVKQPPDRWLSNARMTHYQALLLDTDRVQFGPVVALNPATLLPLPEEGLQHDCLDILAEAHGTRSDLMDQPLPDADHTWYTDGSSFLQEGQRKAGAAVTTETEVIWARALPAGTSAQRAELIALTQALKMAEGKKLNVYTDSRYAFATAHIHGEIYRRRGWLTSEGKEIKNKDEILALLKALFLPKRLSIIHCPGHQKGNSAEARGNRMADQAAREVATRETPETSTLLAGKRTADGSEFEKRTADGSEFESPKKKAKVE

SEQ ID NO: 2377 - protein, 2096 aa, synthetic construct
MPAAKRVKLDGGDKKYSIGLDIGTNSVGWAVITDEYKVPSKKFKVLGNTDRHSIKKNLIGALLFDSGETAEATRLKRTARRRYTRRKNRICYLQEIFSNEMAKVDDSFFHRLEESFLVEEDKKHERHPIFGNIVDEVAYHEKYPTIYHLRKKLVDSTDKADLRLIYLALAHMIKFRGHFLIEGDLNPDNSDVDKLFIQLVQTYNQLFEENPINASGVDAKAILSARLSKSRRLENLIAQLPGEKKNGLFGNLIALSLGLTPNFKSNFDLAEDAKLQLSKDTYDDDLDNLLAQIGDQYADLFLAAKNLSDAILLSDILRVNTEITKAPLSASMIKRYDEHHQDLTLLKALVRQQLPEKYKEIFFDQSKNGYAGYIDGGASQEEFYKFIKPILEKMDGTEELLVKLNREDLLRKQRTFDNGSIPHQIHLGELHAILRRQEDFYPFLKDNREKIEKILTFRIPYYVGPLARGNSRFAWMTRKSEETITPWNFEEVVDKGASAQSFIERMTNFDKNLPNEKVLPKHSLLYEYFTVYNELTKVKYVTEGMRKPAFLSGEQKKAIVDLLFKTNRKVTVKQLKEDYFKKIECFDSVEISGVEDRFNASLGTYHDLLKIIKDKDFLDNEENEDILEDIVLTLTLFEDREMIEERLKTYAHLFDDKVMKQLKRRRYTGWGRLSRKLINGIRDKQSGKTILDFLKSDGFANRNFMQLIHDDSLTFKEDIQKAQVSGQGDSLHEHIANLAGSPAIKKGILQTVKVVDELVKVMGRHKPENIVIEMARENQTTQKGQKNSRERMKRIEEGIKELGSQILKEHPVENTQLQNEKLYLYYLQNGRDMYVDQELDINRLSDYDVDHIVPQSFLKDDSIDNKVLTRSDKARGKSDNVPSEEVVKKMKNYWRQLLNAKLITQRKFDNLTKAERGGLSELDKAGFIKRQLVETRQITKHVAQILDSRMNTKYDENDKLIREVKVITLKSKLVSDFRKDFQFYKVREINNYHHAHDAYLNAVVGTALIKKYPKLESEFVYGDYKVYDVRKMIAKSEQEIGKATAKYFFYSNIMNFFKTEITLANGEIRKRPLIETNGETGEIVWDKGRDFATVRKVLSMPQVNIVKKTEVQTGGFSKESILPKRNSDKLIARKKDWDPKKYGGFDSPTVAYSVLVVAKVEKGKSKKLKSVKELLGITIMERSSFEKNPIDFLEAKGYKEVKKDLIIKLPKYSLFELENGRKRMLASAGELQKGNELALPSKYVNFLYLASHYEKLKGSPEDNEQKQLFVEQHKHYLDEIIEQISEFSKRVILADANLDKVLSAYNKHRDKPIREQAENIIHLFTLTNLGAPAAFKYFDTTIDRKRYTSTKEVLDATLIHQSITGLYETRIDLSQLGGDGGPAPGGGEAAAKGGTLNIEDEYRLHETSKEPDVSLGSTWLSDFPQAWAETGGMGLAVRQAPLIIPLKATSTPVSIKQYPMSQEARLGIKPHIQRLLDQGILVPCQSPWNTPLLPVKKPGTNDYRPVQDLREVNKRVEDIHPTVPNPYNLLSGLPPSHQWYTVLDLKDAFFCLRLHPTSQPLFAFEWRDPEMGISGQLTWTRLPQGFKNSPTLFNEALHRDLAGFRIQHPDLILLQYVDDLLLAATSELDCQQGTRALLQTLGDLGYRASAKKAQICQKQVKYLGYLLKEGQRWLTEARKETVMGQPIPKTPRQLREFLGKAGFCRLFIPGFAEMAAPLYPLTKPGTLFNWGPDQQKAFQEIKQALLTAPALGLPDLTKPFELFVDEKQGYAKGVLTQKLGPWRRPVAYLSKKLDPVAAGWPPCLRMVAAIAVLTKDAGKLTMGQPLVILAPHAVEALVKQPPDRWLSNARMTHYQALLLDTDRVQFGPVVALNPATLLPLPEEGLQHDCLDILAEAHGTRSDLMDQPLPDADHTWYTDGSSFLQEGQRKAGAAVTTETEVIWARALPAGTSAQRAELIALTQALKMAEGKKLNVYTDSRYAFATAHIHGEIYRRRGWLTSEGKEIKNKDEILALLKALFLPKRLSIIHCPGHQKGNSAEARGNRMADQAAREVATRETPETSTLLAGKRTADGSEFEKRTADGSEFESPKKKAKVE

SEQ ID NO: 2378 - protein, 2090 aa, synthetic construct
MPAAKRVKLDGGDKKYSIGLDIGTNSVGWAVITDEYKVPSKKFKVLGNTDRHSIKKNLIGALLFDSGETAEATRLKRTARRRYTRRKNRICYLQEIFSNEMAKVDDSFFHRLEESFLVEEDKKHERHPIFGNIVDEVAYHEKYPTIYHLRKKLVDSTDKADLRLIYLALAHMIKFRGHFLIEGDLNPDNSDVDKLFIQLVQTYNQLFEENPINASGVDAKAILSARLSKSRRLENLIAQLPGEKKNGLFGNLIALSLGLTPNFKSNFDLAEDAKLQLSKDTYDDDLDNLLAQIGDQYADLFLAAKNLSDAILLSDILRVNTEITKAPLSASMIKRYDEHHQDLTLLKALVRQQLPEKYKEIFFDQSKNGYAGYIDGGASQEEFYKFIKPILEKMDGTEELLVKLNREDLLRKQRTFDNGSIPHQIHLGELHAILRRQEDFYPFLKDNREKIEKILTFRIPYYVGPLARGNSRFAWMTRKSEETITPWNFEEVVDKGASAQSFIERMTNFDKNLPNEKVLPKHSLLYEYFTVYNELTKVKYVTEGMRKPAFLSGEQKKAIVDLLFKTNRKVTVKQLKEDYFKKIECFDSVEISGVEDRFNASLGTYHDLLKIIKDKDFLDNEENEDILEDIVLTLTLFEDREMIEERLKTYAHLFDDKVMKQLKRRRYTGWGRLSRKLINGIRDKQSGKTILDFLKSDGFANRNFMQLIHDDSLTFKEDIQKAQVSGQGDSLHEHIANLAGSPAIKKGILQTVKVVDELVKVMGRHKPENIVIEMARENQTTQKGQKNSRERMKRIEEGIKELGSQILKEHPVENTQLQNEKLYLYYLQNGRDMYVDQELDINRLSDYDVDHIVPQSFLKDDSIDNKVLTRSDKARGKSDNVPSEEVVKKMKNYWRQLLNAKLITQRKFDNLTKAERGGLSELDKAGFIKRQLVETRQITKHVAQILDSRMNTKYDENDKLIREVKVITLKSKLVSDFRKDFQFYKVREINNYHHAHDAYLNAVVGTALIKKYPKLESEFVYGDYKVYDVRKMIAKSEQEIGKATAKYFFYSNIMNFFKTEITLANGEIRKRPLIETNGETGEIVWDKGRDFATVRKVLSMPQVNIVKKTEVQTGGFSKESILPKRNSDKLIARKKDWDPKKYGGFDSPTVAYSVLVVAKVEKGKSKKLKSVKELLGITIMERSSFEKNPIDFLEAKGYKEVKKDLIIKLPKYSLFELENGRKRMLASAGELQKGNELALPSKYVNFLYLASHYEKLKGSPEDNEQKQLFVEQHKHYLDEIIEQISEFSKRVILADANLDKVLSAYNKHRDKPIREQAENIIHLFTLTNLGAPAAFKYFDTTIDRKRYTSTKEVLDATLIHQSITGLYETRIDLSQLGGDGGGGGGGGGTLNIEDEYRLHETSKEPDVSLGSTWLSDFPQAWAETGGMGLAVRQAPLIIPLKATSTPVSIKQYPMSQEARLGIKPHIQRLLDQGILVPCQSPWNTPLLPVKKPGTNDYRPVQDLREVNKRVEDIHPTVPNPYNLLSGLPPSHQWYTVLDLKDAFFCLRLHPTSQPLFAFEWRDPEMGISGQLTWTRLPQGFKNSPTLFNEALHRDLAGFRIQHPDLILLQYVDDLLLAATSELDCQQGTRALLQTLGDLGYRASAKKAQICQKQVKYLGYLLKEGQRWLTEARKETVMGQPIPKTPRQLREFLGKAGFCRLFIPGFAEMAAPLYPLTKPGTLFNWGPDQQKAFQEIKQALLTAPALGLPDLTKPFELFVDEKQGYAKGVLTQKLGPWRRPVAYLSKKLDPVAAGWPPCLRMVAAIAVLTKDAGKLTMGQPLVILAPHAVEALVKQPPDRWLSNARMTHYQALLLDTDRVQFGPVVALNPATLLPLPEEGLQHDCLDILAEAHGTRSDLMDQPLPDADHTWYTDGSSFLQEGQRKAGAAVTTETEVIWARALPAGTSAQRAELIALTQALKMAEGKKLNVYTDSRYAFATAHIHGEIYRRRGWLTSEGKEIKNKDEILALLKALFLPKRLSIIHCPGHQKGNSAEARGNRMADQAAREVATRETPETSTLLAGKRTADGSEFEKRTADGSEFESPKKKAKVE

SEQ ID NO: 2379 - protein, 2094 aa, synthetic construct
MPAAKRVKLDGGDKKYSIGLDIGTNSVGWAVITDEYKVPSKKFKVLGNTDRHSIKKNLIGALLFDSGETAEATRLKRTARRRYTRRKNRICYLQEIFSNEMAKVDDSFFHRLEESFLVEEDKKHERHPIFGNIVDEVAYHEKYPTIYHLRKKLVDSTDKADLRLIYLALAHMIKFRGHFLIEGDLNPDNSDVDKLFIQLVQTYNQLFEENPINASGVDAKAILSARLSKSRRLENLIAQLPGEKKNGLFGNLIALSLGLTPNFKSNFDLAEDAKLQLSKDTYDDDLDNLLAQIGDQYADLFLAAKNLSDAILLSDILRVNTEITKAPLSASMIKRYDEHHQDLTLLKALVRQQLPEKYKEIFFDQSKNGYAGYIDGGASQEEFYKFIKPILEKMDGTEELLVKLNREDLLRKQRTFDNGSIPHQIHLGELHAILRRQEDFYPFLKDNREKIEKILTFRIPYYVGPLARGNSRFAWMTRKSEETITPWNFEEVVDKGASAQSFIERMTNFDKNLPNEKVLPKHSLLYEYFTVYNELTKVKYVTEGMRKPAFLSGEQKKAIVDLLFKTNRKVTVKQLKEDYFKKIECFDSVEISGVEDRFNASLGTYHDLLKIIKDKDFLDNEENEDILEDIVLTLTLFEDREMIEERLKTYAHLFDDKVMKQLKRRRYTGWGRLSRKLINGIRDKQSGKTILDFLKSDGFANRNFMQLIHDDSLTFKEDIQKAQVSGQGDSLHEHIANLAGSPAIKKGILQTVKVVDELVKVMGRHKPENIVIEMARENQTTQKGQKNSRERMKRIEEGIKELGSQILKEHPVENTQLQNEKLYLYYLQNGRDMYVDQELDINRLSDYDVDHIVPQSFLKDDSIDNKVLTRSDKARGKSDNVPSEEVVKKMKNYWRQLLNAKLITQRKFDNLTKAERGGLSELDKAGFIKRQLVETRQITKHVAQILDSRMNTKYDENDKLIREVKVITLKSKLVSDFRKDFQFYKVREINNYHHAHDAYLNAVVGTALIKKYPKLESEFVYGDYKVYDVRKMIAKSEQEIGKATAKYFFYSNIMNFFKTEITLANGEIRKRPLIETNGETGEIVWDKGRDFATVRKVLSMPQVNIVKKTEVQTGGFSKESILPKRNSDKLIARKKDWDPKKYGGFDSPTVAYSVLVVAKVEKGKSKKLKSVKELLGITIMERSSFEKNPIDFLEAKGYKEVKKDLIIKLPKYSLFELENGRKRMLASAGELQKGNELALPSKYVNFLYLASHYEKLKGSPEDNEQKQLFVEQHKHYLDEIIEQISEFSKRVILADANLDKVLSAYNKHRDKPIREQAENIIHLFTLTNLGAPAAFKYFDTTIDRKRYTSTKEVLDATLIHQSITGLYETRIDLSQLGGDGGGSSGGSGGGGGTLNIEDEYRLHETSKEPDVSLGSTWLSDFPQAWAETGGMGLAVRQAPLIIPLKATSTPVSIKQYPMSQEARLGIKPHIQRLLDQGILVPCQSPWNTPLLPVKKPGTNDYRPVQDLREVNKRVEDIHPTVPNPYNLLSGLPPSHQWYTVLDLKDAFFCLRLHPTSQPLFAFEWRDPEMGISGQLTWTRLPQGFKNSPTLFNEALHRDLAGFRIQHPDLILLQYVDDLLLAATSELDCQQGTRALLQTLGDLGYRASAKKAQICQKQVKYLGYLLKEGQRWLTEARKETVMGQPIPKTPRQLREFLGKAGFCRLFIPGFAEMAAPLYPLTKPGTLFNWGPDQQKAFQEIKQALLTAPALGLPDLTKPFELFVDEKQGYAKGVLTQKLGPWRRPVAYLSKKLDPVAAGWPPCLRMVAAIAVLTKDAGKLTMGQPLVILAPHAVEALVKQPPDRWLSNARMTHYQALLLDTDRVQFGPVVALNPATLLPLPEEGLQHDCLDILAEAHGTRSDLMDQPLPDADHTWYTDGSSFLQEGQRKAGAAVTTETEVIWARALPAGTSAQRAELIALTQALKMAEGKKLNVYTDSRYAFATAHIHGEIYRRRGWLTSEGKEIKNKDEILALLKALFLPKRLSIIHCPGHQKGNSAEARGNRMADQAAREVATRETPETSTLLAGKRTADGSEFEKRTADGSEFESPKKKAKVE

SEQ ID NO: 2380 - protein, 2094 aa, synthetic construct
MPAAKRVKLDGGDKKYSIGLDIGTNSVGWAVITDEYKVPSKKFKVLGNTDRHSIKKNLIGALLFDSGETAEATRLKRTARRRYTRRKNRICYLQEIFSNEMAKVDDSFFHRLEESFLVEEDKKHERHPIFGNIVDEVAYHEKYPTIYHLRKKLVDSTDKADLRLIYLALAHMIKFRGHFLIEGDLNPDNSDVDKLFIQLVQTYNQLFEENPINASGVDAKAILSARLSKSRRLENLIAQLPGEKKNGLFGNLIALSLGLTPNFKSNFDLAEDAKLQLSKDTYDDDLDNLLAQIGDQYADLFLAAKNLSDAILLSDILRVNTEITKAPLSASMIKRYDEHHQDLTLLKALVRQQLPEKYKEIFFDQSKNGYAGYIDGGASQEEFYKFIKPILEKMDGTEELLVKLNREDLLRKQRTFDNGSIPHQIHLGELHAILRRQEDFYPFLKDNREKIEKILTFRIPYYVGPLARGNSRFAWMTRKSEETITPWNFEEVVDKGASAQSFIERMTNFDKNLPNEKVLPKHSLLYEYFTVYNELTKVKYVTEGMRKPAFLSGEQKKAIVDLLFKTNRKVTVKQLKEDYFKKIECFDSVEISGVEDRFNASLGTYHDLLKIIKDKDFLDNEENEDILEDIVLTLTLFEDREMIEERLKTYAHLFDDKVMKQLKRRRYTGWGRLSRKLINGIRDKQSGKTILDFLKSDGFANRNFMQLIHDDSLTFKEDIQKAQVSGQGDSLHEHIANLAGSPAIKKGILQTVKVVDELVKVMGRHKPENIVIEMARENQTTQKGQKNSRERMKRIEEGIKELGSQILKEHPVENTQLQNEKLYLYYLQNGRDMYVDQELDINRLSDYDVDHIVPQSFLKDDSIDNKVLTRSDKARGKSDNVPSEEVVKKMKNYWRQLLNAKLITQRKFDNLTKAERGGLSELDKAGFIKRQLVETRQITKHVAQILDSRMNTKYDENDKLIREVKVITLKSKLVSDFRKDFQFYKVREINNYHHAHDAYLNAVVGTALIKKYPKLESEFVYGDYKVYDVRKMIAKSEQEIGKATAKYFFYSNIMNFFKTEITLANGEIRKRPLIETNGETGEIVWDKGRDFATVRKVLSMPQVNIVKKTEVQTGGFSKESILPKRNSDKLIARKKDWDPKKYGGFDSPTVAYSVLVVAKVEKGKSKKLKSVKELLGITIMERSSFEKNPIDFLEAKGYKEVKKDLIIKLPKYSLFELENGRKRMLASAGELQKGNELALPSKYVNFLYLASHYEKLKGSPEDNEQKQLFVEQHKHYLDEIIEQISEFSKRVILADANLDKVLSAYNKHRDKPIREQAENIIHLFTLTNLGAPAAFKYFDTTIDRKRYTSTKEVLDATLIHQSITGLYETRIDLSQLGGDGGPAPGSSGGSGGTLNIEDEYRLHETSKEPDVSLGSTWLSDFPQAWAETGGMGLAVRQAPLIIPLKATSTPVSIKQYPMSQEARLGIKPHIQRLLDQGILVPCQSPWNTPLLPVKKPGTNDYRPVQDLREVNKRVEDIHPTVPNPYNLLSGLPPSHQWYTVLDLKDAFFCLRLHPTSQPLFAFEWRDPEMGISGQLTWTRLPQGFKNSPTLFNEALHRDLAGFRIQHPDLILLQYVDDLLLAATSELDCQQGTRALLQTLGDLGYRASAKKAQICQKQVKYLGYLLKEGQRWLTEARKETVMGQPIPKTPRQLREFLGKAGFCRLFIPGFAEMAAPLYPLTKPGTLFNWGPDQQKAFQEIKQALLTAPALGLPDLTKPFELFVDEKQGYAKGVLTQKLGPWRRPVAYLSKKLDPVAAGWPPCLRMVAAIAVLTKDAGKLTMGQPLVILAPHAVEALVKQPPDRWLSNARMTHYQALLLDTDRVQFGPVVALNPATLLPLPEEGLQHDCLDILAEAHGTRSDLMDQPLPDADHTWYTDGSSFLQEGQRKAGAAVTTETEVIWARALPAGTSAQRAELIALTQALKMAEGKKLNVYTDSRYAFATAHIHGEIYRRRGWLTSEGKEIKNKDEILALLKALFLPKRLSIIHCPGHQKGNSAEARGNRMADQAAREVATRETPETSTLLAGKRTADGSEFEKRTADGSEFESPKKKAKVE

SEQ ID NO: 2381 - protein, 2090 aa, synthetic construct
MPAAKRVKLDGGDKKYSIGLDIGTNSVGWAVITDEYKVPSKKFKVLGNTDRHSIKKNLIGALLFDSGETAEATRLKRTARRRYTRRKNRICYLQEIFSNEMAKVDDSFFHRLEESFLVEEDKKHERHPIFGNIVDEVAYHEKYPTIYHLRKKLVDSTDKADLRLIYLALAHMIKFRGHFLIEGDLNPDNSDVDKLFIQLVQTYNQLFEENPINASGVDAKAILSARLSKSRRLENLIAQLPGEKKNGLFGNLIALSLGLTPNFKSNFDLAEDAKLQLSKDTYDDDLDNLLAQIGDQYADLFLAAKNLSDAILLSDILRVNTEITKAPLSASMIKRYDEHHQDLTLLKALVRQQLPEKYKEIFFDQSKNGYAGYIDGGASQEEFYKFIKPILEKMDGTEELLVKLNREDLLRKQRTFDNGSIPHQIHLGELHAILRRQEDFYPFLKDNREKIEKILTFRIPYYVGPLARGNSRFAWMTRKSEETITPWNFEEVVDKGASAQSFIERMTNFDKNLPNEKVLPKHSLLYEYFTVYNELTKVKYVTEGMRKPAFLSGEQKKAIVDLLFKTNRKVTVKQLKEDYFKKIECFDSVEISGVEDRFNASLGTYHDLLKIIKDKDFLDNEENEDILEDIVLTLTLFEDREMIEERLKTYAHLFDDKVMKQLKRRRYTGWGRLSRKLINGIRDKQSGKTILDFLKSDGFANRNFMQLIHDDSLTFKEDIQKAQVSGQGDSLHEHIANLAGSPAIKKGILQTVKVVDELVKVMGRHKPENIVIEMARENQTTQKGQKNSRERMKRIEEGIKELGSQILKEHPVENTQLQNEKLYLYYLQNGRDMYVDQELDINRLSDYDVDHIVPQSFLKDDSIDNKVLTRSDKARGKSDNVPSEEVVKKMKNYWRQLLNAKLITQRKFDNLTKAERGGLSELDKAGFIKRQLVETRQITKHVAQILDSRMNTKYDENDKLIREVKVITLKSKLVSDFRKDFQFYKVREINNYHHAHDAYLNAVVGTALIKKYPKLESEFVYGDYKVYDVRKMIAKSEQEIGKATAKYFFYSNIMNFFKTEITLANGEIRKRPLIETNGETGEIVWDKGRDFATVRKVLSMPQVNIVKKTEVQTGGFSKESILPKRNSDKLIARKKDWDPKKYGGFDSPTVAYSVLVVAKVEKGKSKKLKSVKELLGITIMERSSFEKNPIDFLEAKGYKEVKKDLIIKLPKYSLFELENGRKRMLASAGELQKGNELALPSKYVNFLYLASHYEKLKGSPEDNEQKQLFVEQHKHYLDEIIEQISEFSKRVILADANLDKVLSAYNKHRDKPIREQAENIIHLFTLTNLGAPAAFKYFDTTIDRKRYTSTKEVLDATLIHQSITGLYETRIDLSQLGGDGGGGGGSGGTLNIEDEYRLHETSKEPDVSLGSTWLSDFPQAWAETGGMGLAVRQAPLIIPLKATSTPVSIKQYPMSQEARLGIKPHIQRLLDQGILVPCQSPWNTPLLPVKKPGTNDYRPVQDLREVNKRVEDIHPTVPNPYNLLSGLPPSHQWYTVLDLKDAFFCLRLHPTSQPLFAFEWRDPEMGISGQLTWTRLPQGFKNSPTLFNEALHRDLAGFRIQHPDLILLQYVDDLLLAATSELDCQQGTRALLQTLGDLGYRASAKKAQICQKQVKYLGYLLKEGQRWLTEARKETVMGQPIPKTPRQLREFLGKAGFCRLFIPGFAEMAAPLYPLTKPGTLFNWGPDQQKAFQEIKQALLTAPALGLPDLTKPFELFVDEKQGYAKGVLTQKLGPWRRPVAYLSKKLDPVAAGWPPCLRMVAAIAVLTKDAGKLTMGQPLVILAPHAVEALVKQPPDRWLSNARMTHYQALLLDTDRVQFGPVVALNPATLLPLPEEGLQHDCLDILAEAHGTRSDLMDQPLPDADHTWYTDGSSFLQEGQRKAGAAVTTETEVIWARALPAGTSAQRAELIALTQALKMAEGKKLNVYTDSRYAFATAHIHGEIYRRRGWLTSEGKEIKNKDEILALLKALFLPKRLSIIHCPGHQKGNSAEARGNRMADQAAREVATRETPETSTLLAGKRTADGSEFEKRTADGSEFESPKKKAKVE

SEQ ID NO: 2382 - protein, 2093 aa, synthetic construct
MPAAKRVKLDGGDKKYSIGLDIGTNSVGWAVITDEYKVPSKKFKVLGNTDRHSIKKNLIGALLFDSGETAEATRLKRTARRRYTRRKNRICYLQEIFSNEMAKVDDSFFHRLEESFLVEEDKKHERHPIFGNIVDEVAYHEKYPTIYHLRKKLVDSTDKADLRLIYLALAHMIKFRGHFLIEGDLNPDNSDVDKLFIQLVQTYNQLFEENPINASGVDAKAILSARLSKSRRLENLIAQLPGEKKNGLFGNLIALSLGLTPNFKSNFDLAEDAKLQLSKDTYDDDLDNLLAQIGDQYADLFLAAKNLSDAILLSDILRVNTEITKAPLSASMIKRYDEHHQDLTLLKALVRQQLPEKYKEIFFDQSKNGYAGYIDGGASQEEFYKFIKPILEKMDGTEELLVKLNREDLLRKQRTFDNGSIPHQIHLGELHAILRRQEDFYPFLKDNREKIEKILTFRIPYYVGPLARGNSRFAWMTRKSEETITPWNFEEVVDKGASAQSFIERMTNFDKNLPNEKVLPKHSLLYEYFTVYNELTKVKYVTEGMRKPAFLSGEQKKAIVDLLFKTNRKVTVKQLKEDYFKKIECFDSVEISGVEDRFNASLGTYHDLLKIIKDKDFLDNEENEDILEDIVLTLTLFEDREMIEERLKTYAHLFDDKVMKQLKRRRYTGWGRLSRKLINGIRDKQSGKTILDFLKSDGFANRNFMQLIHDDSLTFKEDIQKAQVSGQGDSLHEHIANLAGSPAIKKGILQTVKVVDELVKVMGRHKPENIVIEMARENQTTQKGQKNSRERMKRIEEGIKELGSQILKEHPVENTQLQNEKLYLYYLQNGRDMYVDQELDINRLSDYDVDHIVPQSFLKDDSIDNKVLTRSDKARGKSDNVPSEEVVKKMKNYWRQLLNAKLITQRKFDNLTKAERGGLSELDKAGFIKRQLVETRQITKHVAQILDSRMNTKYDENDKLIREVKVITLKSKLVSDFRKDFQFYKVREINNYHHAHDAYLNAVVGTALIKKYPKLESEFVYGDYKVYDVRKMIAKSEQEIGKATAKYFFYSNIMNFFKTEITLANGEIRKRPLIETNGETGEIVWDKGRDFATVRKVLSMPQVNIVKKTEVQTGGFSKESILPKRNSDKLIARKKDWDPKKYGGFDSPTVAYSVLVVAKVEKGKSKKLKSVKELLGITIMERSSFEKNPIDFLEAKGYKEVKKDLIIKLPKYSLFELENGRKRMLASAGELQKGNELALPSKYVNFLYLASHYEKLKGSPEDNEQKQLFVEQHKHYLDEIIEQISEFSKRVILADANLDKVLSAYNKHRDKPIREQAENIIHLFTLTNLGAPAAFKYFDTTIDRKRYTSTKEVLDATLIHQSITGLYETRIDLSQLGGDGGGSSEAAAKGGTLNIEDEYRLHETSKEPDVSLGSTWLSDFPQAWAETGGMGLAVRQAPLIIPLKATSTPVSIKQYPMSQEARLGIKPHIQRLLDQGILVPCQSPWNTPLLPVKKPGTNDYRPVQDLREVNKRVEDIHPTVPNPYNLLSGLPPSHQWYTVLDLKDAFFCLRLHPTSQPLFAFEWRDPEMGISGQLTWTRLPQGFKNSPTLFNEALHRDLAGFRIQHPDLILLQYVDDLLLAATSELDCQQGTRALLQTLGDLGYRASAKKAQICQKQVKYLGYLLKEGQRWLTEARKETVMGQPIPKTPRQLREFLGKAGFCRLFIPGFAEMAAPLYPLTKPGTLFNWGPDQQKAFQEIKQALLTAPALGLPDLTKPFELFVDEKQGYAKGVLTQKLGPWRRPVAYLSKKLDPVAAGWPPCLRMVAAIAVLTKDAGKLTMGQPLVILAPHAVEALVKQPPDRWLSNARMTHYQALLLDTDRVQFGPVVALNPATLLPLPEEGLQHDCLDILAEAHGTRSDLMDQPLPDADHTWYTDGSSFLQEGQRKAGAAVTTETEVIWARALPAGTSAQRAELIALTQALKMAEGKKLNVYTDSRYAFATAHIHGEIYRRRGWLTSEGKEIKNKDEILALLKALFLPKRLSIIHCPGHQKGNSAEARGNRMADQAAREVATRETPETSTLLAGKRTADGSEFEKRTADGSEFESPKKKAKVE

SEQ ID NO: 2383 - protein, 2091 aa, synthetic construct
MPAAKRVKLDGGDKKYSIGLDIGTNSVGWAVITDEYKVPSKKFKVLGNTDRHSIKKNLIGALLFDSGETAEATRLKRTARRRYTRRKNRICYLQEIFSNEMAKVDDSFFHRLEESFLVEEDKKHERHPIFGNIVDEVAYHEKYPTIYHLRKKLVDSTDKADLRLIYLALAHMIKFRGHFLIEGDLNPDNSDVDKLFIQLVQTYNQLFEENPINASGVDAKAILSARLSKSRRLENLIAQLPGEKKNGLFGNLIALSLGLTPNFKSNFDLAEDAKLQLSKDTYDDDLDNLLAQIGDQYADLFLAAKNLSDAILLSDILRVNTEITKAPLSASMIKRYDEHHQDLTLLKALVRQQLPEKYKEIFFDQSKNGYAGYIDGGASQEEFYKFIKPILEKMDGTEELLVKLNREDLLRKQRTFDNGSIPHQIHLGELHAILRRQEDFYPFLKDNREKIEKILTFRIPYYVGPLARGNSRFAWMTRKSEETITPWNFEEVVDKGASAQSFIERMTNFDKNLPNEKVLPKHSLLYEYFTVYNELTKVKYVTEGMRKPAFLSGEQKKAIVDLLFKTNRKVTVKQLKEDYFKKIECFDSVEISGVEDRFNASLGTYHDLLKIIKDKDFLDNEENEDILEDIVLTLTLFEDREMIEERLKTYAHLFDDKVMKQLKRRRYTGWGRLSRKLINGIRDKQSGKTILDFLKSDGFANRNFMQLIHDDSLTFKEDIQKAQVSGQGDSLHEHIANLAGSPAIKKGILQTVKVVDELVKVMGRHKPENIVIEMARENQTTQKGQKNSRERMKRIEEGIKELGSQILKEHPVENTQLQNEKLYLYYLQNGRDMYVDQELDINRLSDYDVDHIVPQSFLKDDSIDNKVLTRSDKARGKSDNVPSEEVVKKMKNYWRQLLNAKLITQRKFDNLTKAERGGLSELDKAGFIKRQLVETRQITKHVAQILDSRMNTKYDENDKLIREVKVITLKSKLVSDFRKDFQFYKVREINNYHHAHDAYLNAVVGTALIKKYPKLESEFVYGDYKVYDVRKMIAKSEQEIGKATAKYFFYSNIMNFFKTEITLANGEIRKRPLIETNGETGEIVWDKGRDFATVRKVLSMPQVNIVKKTEVQTGGFSKESILPKRNSDKLIARKKDWDPKKYGGFDSPTVAYSVLVVAKVEKGKSKKLKSVKELLGITIMERSSFEKNPIDFLEAKGYKEVKKDLIIKLPKYSLFELENGRKRMLASAGELQKGNELALPSKYVNFLYLASHYEKLKGSPEDNEQKQLFVEQHKHYLDEIIEQISEFSKRVILADANLDKVLSAYNKHRDKPIREQAENIIHLFTLTNLGAPAAFKYFDTTIDRKRYTSTKEVLDATLIHQSITGLYETRIDLSQLGGDGGGGGGSSGGTLNIEDEYRLHETSKEPDVSLGSTWLSDFPQAWAETGGMGLAVRQAPLIIPLKATSTPVSIKQYPMSQEARLGIKPHIQRLLDQGILVPCQSPWNTPLLPVKKPGTNDYRPVQDLREVNKRVEDIHPTVPNPYNLLSGLPPSHQWYTVLDLKDAFFCLRLHPTSQPLFAFEWRDPEMGISGQLTWTRLPQGFKNSPTLFNEALHRDLAGFRIQHPDLILLQYVDDLLLAATSELDCQQGTRALLQTLGDLGYRASAKKAQICQKQVKYLGYLLKEGQRWLTEARKETVMGQPIPKTPRQLREFLGKAGFCRLFIPGFAEMAAPLYPLTKPGTLFNWGPDQQKAFQEIKQALLTAPALGLPDLTKPFELFVDEKQGYAKGVLTQKLGPWRRPVAYLSKKLDPVAAGWPPCLRMVAAIAVLTKDAGKLTMGQPLVILAPHAVEALVKQPPDRWLSNARMTHYQALLLDTDRVQFGPVVALNPATLLPLPEEGLQHDCLDILAEAHGTRSDLMDQPLPDADHTWYTDGSSFLQEGQRKAGAAVTTETEVIWARALPAGTSAQRAELIALTQALKMAEGKKLNVYTDSRYAFATAHIHGEIYRRRGWLTSEGKEIKNKDEILALLKALFLPKRLSIIHCPGHQKGNSAEARGNRMADQAAREVATRETPETSTLLAGKRTADGSEFEKRTADGSEFESPKKKAKVE

SEQ ID NO: 2384 - protein, 2096 aa, synthetic construct
MPAAKRVKLDGGDKKYSIGLDIGTNSVGWAVITDEYKVPSKKFKVLGNTDRHSIKKNLIGALLFDSGETAEATRLKRTARRRYTRRKNRICYLQEIFSNEMAKVDDSFFHRLEESFLVEEDKKHERHPIFGNIVDEVAYHEKYPTIYHLRKKLVDSTDKADLRLIYLALAHMIKFRGHFLIEGDLNPDNSDVDKLFIQLVQTYNQLFEENPINASGVDAKAILSARLSKSRRLENLIAQLPGEKKNGLFGNLIALSLGLTPNFKSNFDLAEDAKLQLSKDTYDDDLDNLLAQIGDQYADLFLAAKNLSDAILLSDILRVNTEITKAPLSASMIKRYDEHHQDLTLLKALVRQQLPEKYKEIFFDQSKNGYAGYIDGGASQEEFYKFIKPILEKMDGTEELLVKLNREDLLRKQRTFDNGSIPHQIHLGELHAILRRQEDFYPFLKDNREKIEKILTFRIPYYVGPLARGNSRFAWMTRKSEETITPWNFEEVVDKGASAQSFIERMTNFDKNLPNEKVLPKHSLLYEYFTVYNELTKVKYVTEGMRKPAFLSGEQKKAIVDLLFKTNRKVTVKQLKEDYFKKIECFDSVEISGVEDRFNASLGTYHDLLKIIKDKDFLDNEENEDILEDIVLTLTLFEDREMIEERLKTYAHLFDDKVMKQLKRRRYTGWGRLSRKLINGIRDKQSGKTILDFLKSDGFANRNFMQLIHDDSLTFKEDIQKAQVSGQGDSLHEHIANLAGSPAIKKGILQTVKVVDELVKVMGRHKPENIVIEMARENQTTQKGQKNSRERMKRIEEGIKELGSQILKEHPVENTQLQNEKLYLYYLQNGRDMYVDQELDINRLSDYDVDHIVPQSFLKDDSIDNKVLTRSDKARGKSDNVPSEEVVKKMKNYWRQLLNAKLITQRKFDNLTKAERGGLSELDKAGFIKRQLVETRQITKHVAQILDSRMNTKYDENDKLIREVKVITLKSKLVSDFRKDFQFYKVREINNYHHAHDAYLNAVVGTALIKKYPKLESEFVYGDYKVYDVRKMIAKSEQEIGKATAKYFFYSNIMNFFKTEITLANGEIRKRPLIETNGETGEIVWDKGRDFATVRKVLSMPQVNIVKKTEVQTGGFSKESILPKRNSDKLIARKKDWDPKKYGGFDSPTVAYSVLVVAKVEKGKSKKLKSVKELLGITIMERSSFEKNPIDFLEAKGYKEVKKDLIIKLPKYSLFELENGRKRMLASAGELQKGNELALPSKYVNFLYLASHYEKLKGSPEDNEQKQLFVEQHKHYLDEIIEQISEFSKRVILADANLDKVLSAYNKHRDKPIREQAENIIHLFTLTNLGAPAAFKYFDTTIDRKRYTSTKEVLDATLIHQSITGLYETRIDLSQLGGDGGGSSEAAAKGGGGGTLNIEDEYRLHETSKEPDVSLGSTWLSDFPQAWAETGGMGLAVRQAPLIIPLKATSTPVSIKQYPMSQEARLGIKPHIQRLLDQGILVPCQSPWNTPLLPVKKPGTNDYRPVQDLREVNKRVEDIHPTVPNPYNLLSGLPPSHQWYTVLDLKDAFFCLRLHPTSQPLFAFEWRDPEMGISGQLTWTRLPQGFKNSPTLFNEALHRDLAGFRIQHPDLILLQYVDDLLLAATSELDCQQGTRALLQTLGDLGYRASAKKAQICQKQVKYLGYLLKEGQRWLTEARKETVMGQPIPKTPRQLREFLGKAGFCRLFIPGFAEMAAPLYPLTKPGTLFNWGPDQQKAFQEIKQALLTAPALGLPDLTKPFELFVDEKQGYAKGVLTQKLGPWRRPVAYLSKKLDPVAAGWPPCLRMVAAIAVLTKDAGKLTMGQPLVILAPHAVEALVKQPPDRWLSNARMTHYQALLLDTDRVQFGPVVALNPATLLPLPEEGLQHDCLDILAEAHGTRSDLMDQPLPDADHTWYTDGSSFLQEGQRKAGAAVTTETEVIWARALPAGTSAQRAELIALTQALKMAEGKKLNVYTDSRYAFATAHIHGEIYRRRGWLTSEGKEIKNKDEILALLKALFLPKRLSIIHCPGHQKGNSAEARGNRMADQAAREVATRETPETSTLLAGKRTADGSEFEKRTADGSEFESPKKKAKVE

SEQ ID NO: 2385 - protein, 2096 aa, synthetic construct
MPAAKRVKLDGGDKKYSIGLDIGTNSVGWAVITDEYKVPSKKFKVLGNTDRHSIKKNLIGALLFDSGETAEATRLKRTARRRYTRRKNRICYLQEIFSNEMAKVDDSFFHRLEESFLVEEDKKHERHPIFGNIVDEVAYHEKYPTIYHLRKKLVDSTDKADLRLIYLALAHMIKFRGHFLIEGDLNPDNSDVDKLFIQLVQTYNQLFEENPINASGVDAKAILSARLSKSRRLENLIAQLPGEKKNGLFGNLIALSLGLTPNFKSNFDLAEDAKLQLSKDTYDDDLDNLLAQIGDQYADLFLAAKNLSDAILLSDILRVNTEITKAPLSASMIKRYDEHHQDLTLLKALVRQQLPEKYKEIFFDQSKNGYAGYIDGGASQEEFYKFIKPILEKMDGTEELLVKLNREDLLRKQRTFDNGSIPHQIHLGELHAILRRQEDFYPFLKDNREKIEKILTFRIPYYVGPLARGNSRFAWMTRKSEETITPWNFEEVVDKGASAQSFIERMTNFDKNLPNEKVLPKHSLLYEYFTVYNELTKVKYVTEGMRKPAFLSGEQKKAIVDLLFKTNRKVTVKQLKEDYFKKIECFDSVEISGVEDRFNASLGTYHDLLKIIKDKDFLDNEENEDILEDIVLTLTLFEDREMIEERLKTYAHLFDDKVMKQLKRRRYTGWGRLSRKLINGIRDKQSGKTILDFLKSDGFANRNFMQLIHDDSLTFKEDIQKAQVSGQGDSLHEHIANLAGSPAIKKGILQTVKVVDELVKVMGRHKPENIVIEMARENQTTQKGQKNSRERMKRIEEGIKELGSQILKEHPVENTQLQNEKLYLYYLQNGRDMYVDQELDINRLSDYDVDHIVPQSFLKDDSIDNKVLTRSDKARGKSDNVPSEEVVKKMKNYWRQLLNAKLITQRKFDNLTKAERGGLSELDKAGFIKRQLVETRQITKHVAQILDSRMNTKYDENDKLIREVKVITLKSKLVSDFRKDFQFYKVREINNYHHAHDAYLNAVVGTALIKKYPKLESEFVYGDYKVYDVRKMIAKSEQEIGKATAKYFFYSNIMNFFKTEITLANGEIRKRPLIETNGETGEIVWDKGRDFATVRKVLSMPQVNIVKKTEVQTGGFSKESILPKRNSDKLIARKKDWDPKKYGGFDSPTVAYSVLVVAKVEKGKSKKLKSVKELLGITIMERSSFEKNPIDFLEAKGYKEVKKDLIIKLPKYSLFELENGRKRMLASAGELQKGNELALPSKYVNFLYLASHYEKLKGSPEDNEQKQLFVEQHKHYLDEIIEQISEFSKRVILADANLDKVLSAYNKHRDKPIREQAENIIHLFTLTNLGAPAAFKYFDTTIDRKRYTSTKEVLDATLIHQSITGLYETRIDLSQLGGDGGGGGEAAAKPAPGGTLNIEDEYRLHETSKEPDVSLGSTWLSDFPQAWAETGGMGLAVRQAPLIIPLKATSTPVSIKQYPMSQEARLGIKPHIQRLLDQGILVPCQSPWNTPLLPVKKPGTNDYRPVQDLREVNKRVEDIHPTVPNPYNLLSGLPPSHQWYTVLDLKDAFFCLRLHPTSQPLFAFEWRDPEMGISGQLTWTRLPQGFKNSPTLFNEALHRDLAGFRIQHPDLILLQYVDDLLLAATSELDCQQGTRALLQTLGDLGYRASAKKAQICQKQVKYLGYLLKEGQRWLTEARKETVMGQPIPKTPRQLREFLGKAGFCRLFIPGFAEMAAPLYPLTKPGTLFNWGPDQQKAFQEIKQALLTAPALGLPDLTKPFELFVDEKQGYAKGVLTQKLGPWRRPVAYLSKKLDPVAAGWPPCLRMVAAIAVLTKDAGKLTMGQPLVILAPHAVEALVKQPPDRWLSNARMTHYQALLLDTDRVQFGPVVALNPATLLPLPEEGLQHDCLDILAEAHGTRSDLMDQPLPDADHTWYTDGSSFLQEGQRKAGAAVTTETEVIWARALPAGTSAQRAELIALTQALKMAEGKKLNVYTDSRYAFATAHIHGEIYRRRGWLTSEGKEIKNKDEILALLKALFLPKRLSIIHCPGHQKGNSAEARGNRMADQAAREVATRETPETSTLLAGKRTADGSEFEKRTADGSEFESPKKKAKVE

SEQ ID NO: 2386 - protein, 2096 aa, synthetic construct
MPAAKRVKLDGGDKKYSIGLDIGTNSVGWAVITDEYKVPSKKFKVLGNTDRHSIKKNLIGALLFDSGETAEATRLKRTARRRYTRRKNRICYLQEIFSNEMAKVDDSFFHRLEESFLVEEDKKHERHPIFGNIVDEVAYHEKYPTIYHLRKKLVDSTDKADLRLIYLALAHMIKFRGHFLIEGDLNPDNSDVDKLFIQLVQTYNQLFEENPINASGVDAKAILSARLSKSRRLENLIAQLPGEKKNGLFGNLIALSLGLTPNFKSNFDLAEDAKLQLSKDTYDDDLDNLLAQIGDQYADLFLAAKNLSDAILLSDILRVNTEITKAPLSASMIKRYDEHHQDLTLLKALVRQQLPEKYKEIFFDQSKNGYAGYIDGGASQEEFYKFIKPILEKMDGTEELLVKLNREDLLRKQRTFDNGSIPHQIHLGELHAILRRQEDFYPFLKDNREKIEKILTFRIPYYVGPLARGNSRFAWMTRKSEETITPWNFEEVVDKGASAQSFIERMTNFDKNLPNEKVLPKHSLLYEYFTVYNELTKVKYVTEGMRKPAFLSGEQKKAIVDLLFKTNRKVTVKQLKEDYFKKIECFDSVEISGVEDRFNASLGTYHDLLKIIKDKDFLDNEENEDILEDIVLTLTLFEDREMIEERLKTYAHLFDDKVMKQLKRRRYTGWGRLSRKLINGIRDKQSGKTILDFLKSDGFANRNFMQLIHDDSLTFKEDIQKAQVSGQGDSLHEHIANLAGSPAIKKGILQTVKVVDELVKVMGRHKPENIVIEMARENQTTQKGQKNSRERMKRIEEGIKELGSQILKEHPVENTQLQNEKLYLYYLQNGRDMYVDQELDINRLSDYDVDHIVPQSFLKDDSIDNKVLTRSDKARGKSDNVPSEEVVKKMKNYWRQLLNAKLITQRKFDNLTKAERGGLSELDKAGFIKRQLVETRQITKHVAQILDSRMNTKYDENDKLIREVKVITLKSKLVSDFRKDFQFYKVREINNYHHAHDAYLNAVVGTALIKKYPKLESEFVYGDYKVYDVRKMIAKSEQEIGKATAKYFFYSNIMNFFKTEITLANGEIRKRPLIETNGETGEIVWDKGRDFATVRKVLSMPQVNIVKKTEVQTGGFSKESILPKRNSDKLIARKKDWDPKKYGGFDSPTVAYSVLVVAKVEKGKSKKLKSVKELLGITIMERSSFEKNPIDFLEAKGYKEVKKDLIIKLPKYSLFELENGRKRMLASAGELQKGNELALPSKYVNFLYLASHYEKLKGSPEDNEQKQLFVEQHKHYLDEIIEQISEFSKRVILADANLDKVLSAYNKHRDKPIREQAENIIHLFTLTNLGAPAAFKYFDTTIDRKRYTSTKEVLDATLIHQSITGLYETRIDLSQLGGDGGGSSGGSEAAAKGGTLNIEDEYRLHETSKEPDVSLGSTWLSDFPQAWAETGGMGLAVRQAPLIIPLKATSTPVSIKQYPMSQEARLGIKPHIQRLLDQGILVPCQSPWNTPLLPVKKPGTNDYRPVQDLREVNKRVEDIHPTVPNPYNLLSGLPPSHQWYTVLDLKDAFFCLRLHPTSQPLFAFEWRDPEMGISGQLTWTRLPQGFKNSPTLFNEALHRDLAGFRIQHPDLILLQYVDDLLLAATSELDCQQGTRALLQTLGDLGYRASAKKAQICQKQVKYLGYLLKEGQRWLTEARKETVMGQPIPKTPRQLREFLGKAGFCRLFIPGFAEMAAPLYPLTKPGTLFNWGPDQQKAFQEIKQALLTAPALGLPDLTKPFELFVDEKQGYAKGVLTQKLGPWRRPVAYLSKKLDPVAAGWPPCLRMVAAIAVLTKDAGKLTMGQPLVILAPHAVEALVKQPPDRWLSNARMTHYQALLLDTDRVQFGPVVALNPATLLPLPEEGLQHDCLDILAEAHGTRSDLMDQPLPDADHTWYTDGSSFLQEGQRKAGAAVTTETEVIWARALPAGTSAQRAELIALTQALKMAEGKKLNVYTDSRYAFATAHIHGEIYRRRGWLTSEGKEIKNKDEILALLKALFLPKRLSIIHCPGHQKGNSAEARGNRMADQAAREVATRETPETSTLLAGKRTADGSEFEKRTADGSEFESPKKKAKVE

SEQ ID NO: 2387 - protein, 2094 aa, synthetic construct
MPAAKRVKLDGGDKKYSIGLDIGTNSVGWAVITDEYKVPSKKFKVLGNTDRHSIKKNLIGALLFDSGETAEATRLKRTARRRYTRRKNRICYLQEIFSNEMAKVDDSFFHRLEESFLVEEDKKHERHPIFGNIVDEVAYHEKYPTIYHLRKKLVDSTDKADLRLIYLALAHMIKFRGHFLIEGDLNPDNSDVDKLFIQLVQTYNQLFEENPINASGVDAKAILSARLSKSRRLENLIAQLPGEKKNGLFGNLIALSLGLTPNFKSNFDLAEDAKLQLSKDTYDDDLDNLLAQIGDQYADLFLAAKNLSDAILLSDILRVNTEITKAPLSASMIKRYDEHHQDLTLLKALVRQQLPEKYKEIFFDQSKNGYAGYIDGGASQEEFYKFIKPILEKMDGTEELLVKLNREDLLRKQRTFDNGSIPHQIHLGELHAILRRQEDFYPFLKDNREKIEKILTFRIPYYVGPLARGNSRFAWMTRKSEETITPWNFEEVVDKGASAQSFIERMTNFDKNLPNEKVLPKHSLLYEYFTVYNELTKVKYVTEGMRKPAFLSGEQKKAIVDLLFKTNRKVTVKQLKEDYFKKIECFDSVEISGVEDRFNASLGTYHDLLKIIKDKDFLDNEENEDILEDIVLTLTLFEDREMIEERLKTYAHLFDDKVMKQLKRRRYTGWGRLSRKLINGIRDKQSGKTILDFLKSDGFANRNFMQLIHDDSLTFKEDIQKAQVSGQGDSLHEHIANLAGSPAIKKGILQTVKVVDELVKVMGRHKPENIVIEMARENQTTQKGQKNSRERMKRIEEGIKELGSQILKEHPVENTQLQNEKLYLYYLQNGRDMYVDQELDINRLSDYDVDHIVPQSFLKDDSIDNKVLTRSDKARGKSDNVPSEEVVKKMKNYWRQLLNAKLITQRKFDNLTKAERGGLSELDKAGFIKRQLVETRQITKHVAQILDSRMNTKYDENDKLIREVKVITLKSKLVSDFRKDFQFYKVREINNYHHAHDAYLNAVVGTALIKKYPKLESEFVYGDYKVYDVRKMIAKSEQEIGKATAKYFFYSNIMNFFKTEITLANGEIRKRPLIETNGETGEIVWDKGRDFATVRKVLSMPQVNIVKKTEVQTGGFSKESILPKRNSDKLIARKKDWDPKKYGGFDSPTVAYSVLVVAKVEKGKSKKLKSVKELLGITIMERSSFEKNPIDFLEAKGYKEVKKDLIIKLPKYSLFELENGRKRMLASAGELQKGNELALPSKYVNFLYLASHYEKLKGSPEDNEQKQLFVEQHKHYLDEIIEQISEFSKRVILADANLDKVLSAYNKHRDKPIREQAENIIHLFTLTNLGAPAAFKYFDTTIDRKRYTSTKEVLDATLIHQSITGLYETRIDLSQLGGDGGGGSPAPGSSGGTLNIEDEYRLHETSKEPDVSLGSTWLSDFPQAWAETGGMGLAVRQAPLIIPLKATSTPVSIKQYPMSQEARLGIKPHIQRLLDQGILVPCQSPWNTPLLPVKKPGTNDYRPVQDLREVNKRVEDIHPTVPNPYNLLSGLPPSHQWYTVLDLKDAFFCLRLHPTSQPLFAFEWRDPEMGISGQLTWTRLPQGFKNSPTLFNEALHRDLAGFRIQHPDLILLQYVDDLLLAATSELDCQQGTRALLQTLGDLGYRASAKKAQICQKQVKYLGYLLKEGQRWLTEARKETVMGQPIPKTPRQLREFLGKAGFCRLFIPGFAEMAAPLYPLTKPGTLFNWGPDQQKAFQEIKQALLTAPALGLPDLTKPFELFVDEKQGYAKGVLTQKLGPWRRPVAYLSKKLDPVAAGWPPCLRMVAAIAVLTKDAGKLTMGQPLVILAPHAVEALVKQPPDRWLSNARMTHYQALLLDTDRVQFGPVVALNPATLLPLPEEGLQHDCLDILAEAHGTRSDLMDQPLPDADHTWYTDGSSFLQEGQRKAGAAVTTETEVIWARALPAGTSAQRAELIALTQALKMAEGKKLNVYTDSRYAFATAHIHGEIYRRRGWLTSEGKEIKNKDEILALLKALFLPKRLSIIHCPGHQKGNSAEARGNRMADQAAREVATRETPETSTLLAGKRTADGSEFEKRTADGSEFESPKKKAKVE

SEQ ID NO: 2388 - protein, 2101 aa, synthetic construct
MPAAKRVKLDGGDKKYSIGLDIGTNSVGWAVITDEYKVPSKKFKVLGNTDRHSIKKNLIGALLFDSGETAEATRLKRTARRRYTRRKNRICYLQEIFSNEMAKVDDSFFHRLEESFLVEEDKKHERHPIFGNIVDEVAYHEKYPTIYHLRKKLVDSTDKADLRLIYLALAHMIKFRGHFLIEGDLNPDNSDVDKLFIQLVQTYNQLFEENPINASGVDAKAILSARLSKSRRLENLIAQLPGEKKNGLFGNLIALSLGLTPNFKSNFDLAEDAKLQLSKDTYDDDLDNLLAQIGDQYADLFLAAKNLSDAILLSDILRVNTEITKAPLSASMIKRYDEHHQDLTLLKALVRQQLPEKYKEIFFDQSKNGYAGYIDGGASQEEFYKFIKPILEKMDGTEELLVKLNREDLLRKQRTFDNGSIPHQIHLGELHAILRRQEDFYPFLKDNREKIEKILTFRIPYYVGPLARGNSRFAWMTRKSEETITPWNFEEVVDKGASAQSFIERMTNFDKNLPNEKVLPKHSLLYEYFTVYNELTKVKYVTEGMRKPAFLSGEQKKAIVDLLFKTNRKVTVKQLKEDYFKKIECFDSVEISGVEDRFNASLGTYHDLLKIIKDKDFLDNEENEDILEDIVLTLTLFEDREMIEERLKTYAHLFDDKVMKQLKRRRYTGWGRLSRKLINGIRDKQSGKTILDFLKSDGFANRNFMQLIHDDSLTFKEDIQKAQVSGQGDSLHEHIANLAGSPAIKKGILQTVKVVDELVKVMGRHKPENIVIEMARENQTTQKGQKNSRERMKRIEEGIKELGSQILKEHPVENTQLQNEKLYLYYLQNGRDMYVDQELDINRLSDYDVDHIVPQSFLKDDSIDNKVLTRSDKARGKSDNVPSEEVVKKMKNYWRQLLNAKLITQRKFDNLTKAERGGLSELDKAGFIKRQLVETRQITKHVAQILDSRMNTKYDENDKLIREVKVITLKSKLVSDFRKDFQFYKVREINNYHHAHDAYLNAVVGTALIKKYPKLESEFVYGDYKVYDVRKMIAKSEQEIGKATAKYFFYSNIMNFFKTEITLANGEIRKRPLIETNGETGEIVWDKGRDFATVRKVLSMPQVNIVKKTEVQTGGFSKESILPKRNSDKLIARKKDWDPKKYGGFDSPTVAYSVLVVAKVEKGKSKKLKSVKELLGITIMERSSFEKNPIDFLEAKGYKEVKKDLIIKLPKYSLFELENGRKRMLASAGELQKGNELALPSKYVNFLYLASHYEKLKGSPEDNEQKQLFVEQHKHYLDEIIEQISEFSKRVILADANLDKVLSAYNKHRDKPIREQAENIIHLFTLTNLGAPAAFKYFDTTIDRKRYTSTKEVLDATLIHQSITGLYETRIDLSQLGGDGGSGSETPGTSESATPESGGTLNIEDEYRLHETSKEPDVSLGSTWLSDFPQAWAETGGMGLAVRQAPLIIPLKATSTPVSIKQYPMSQEARLGIKPHIQRLLDQGILVPCQSPWNTPLLPVKKPGTNDYRPVQDLREVNKRVEDIHPTVPNPYNLLSGLPPSHQWYTVLDLKDAFFCLRLHPTSQPLFAFEWRDPEMGISGQLTWTRLPQGFKNSPTLFNEALHRDLAGFRIQHPDLILLQYVDDLLLAATSELDCQQGTRALLQTLGDLGYRASAKKAQICQKQVKYLGYLLKEGQRWLTEARKETVMGQPIPKTPRQLREFLGKAGFCRLFIPGFAEMAAPLYPLTKPGTLFNWGPDQQKAFQEIKQALLTAPALGLPDLTKPFELFVDEKQGYAKGVLTQKLGPWRRPVAYLSKKLDPVAAGWPPCLRMVAAIAVLTKDAGKLTMGQPLVILAPHAVEALVKQPPDRWLSNARMTHYQALLLDTDRVQFGPVVALNPATLLPLPEEGLQHDCLDILAEAHGTRSDLMDQPLPDADHTWYTDGSSFLQEGQRKAGAAVTTETEVIWARALPAGTSAQRAELIALTQALKMAEGKKLNVYTDSRYAFATAHIHGEIYRRRGWLTSEGKEIKNKDEILALLKALFLPKRLSIIHCPGHQKGNSAEARGNRMADQAAREVATRETPETSTLLAGKRTADGSEFEKRTADGSEFESPKKKAKVE

SEQ ID NO: 2389 - protein, 2091 aa, synthetic construct
MPAAKRVKLDGGDKKYSIGLDIGTNSVGWAVITDEYKVPSKKFKVLGNTDRHSIKKNLIGALLFDSGETAEATRLKRTARRRYTRRKNRICYLQEIFSNEMAKVDDSFFHRLEESFLVEEDKKHERHPIFGNIVDEVAYHEKYPTIYHLRKKLVDSTDKADLRLIYLALAHMIKFRGHFLIEGDLNPDNSDVDKLFIQLVQTYNQLFEENPINASGVDAKAILSARLSKSRRLENLIAQLPGEKKNGLFGNLIALSLGLTPNFKSNFDLAEDAKLQLSKDTYDDDLDNLLAQIGDQYADLFLAAKNLSDAILLSDILRVNTEITKAPLSASMIKRYDEHHQDLTLLKALVRQQLPEKYKEIFFDQSKNGYAGYIDGGASQEEFYKFIKPILEKMDGTEELLVKLNREDLLRKQRTFDNGSIPHQIHLGELHAILRRQEDFYPFLKDNREKIEKILTFRIPYYVGPLARGNSRFAWMTRKSEETITPWNFEEVVDKGASAQSFIERMTNFDKNLPNEKVLPKHSLLYEYFTVYNELTKVKYVTEGMRKPAFLSGEQKKAIVDLLFKTNRKVTVKQLKEDYFKKIECFDSVEISGVEDRFNASLGTYHDLLKIIKDKDFLDNEENEDILEDIVLTLTLFEDREMIEERLKTYAHLFDDKVMKQLKRRRYTGWGRLSRKLINGIRDKQSGKTILDFLKSDGFANRNFMQLIHDDSLTFKEDIQKAQVSGQGDSLHEHIANLAGSPAIKKGILQTVKVVDELVKVMGRHKPENIVIEMARENQTTQKGQKNSRERMKRIEEGIKELGSQILKEHPVENTQLQNEKLYLYYLQNGRDMYVDQELDINRLSDYDVDHIVPQSFLKDDSIDNKVLTRSDKARGKSDNVPSEEVVKKMKNYWRQLLNAKLITQRKFDNLTKAERGGLSELDKAGFIKRQLVETRQITKHVAQILDSRMNTKYDENDKLIREVKVITLKSKLVSDFRKDFQFYKVREINNYHHAHDAYLNAVVGTALIKKYPKLESEFVYGDYKVYDVRKMIAKSEQEIGKATAKYFFYSNIMNFFKTEITLANGEIRKRPLIETNGETGEIVWDKGRDFATVRKVLSMPQVNIVKKTEVQTGGFSKESILPKRNSDKLIARKKDWDPKKYGGFDSPTVAYSVLVVAKVEKGKSKKLKSVKELLGITIMERSSFEKNPIDFLEAKGYKEVKKDLIIKLPKYSLFELENGRKRMLASAGELQKGNELALPSKYVNFLYLASHYEKLKGSPEDNEQKQLFVEQHKHYLDEIIEQISEFSKRVILADANLDKVLSAYNKHRDKPIREQAENIIHLFTLTNLGAPAAFKYFDTTIDRKRYTSTKEVLDATLIHQSITGLYETRIDLSQLGGDGGGGSPAPGGTLNIEDEYRLHETSKEPDVSLGSTWLSDFPQAWAETGGMGLAVRQAPLIIPLKATSTPVSIKQYPMSQEARLGIKPHIQRLLDQGILVPCQSPWNTPLLPVKKPGTNDYRPVQDLREVNKRVEDIHPTVPNPYNLLSGLPPSHQWYTVLDLKDAFFCLRLHPTSQPLFAFEWRDPEMGISGQLTWTRLPQGFKNSPTLFNEALHRDLAGFRIQHPDLILLQYVDDLLLAATSELDCQQGTRALLQTLGDLGYRASAKKAQICQKQVKYLGYLLKEGQRWLTEARKETVMGQPIPKTPRQLREFLGKAGFCRLFIPGFAEMAAPLYPLTKPGTLFNWGPDQQKAFQEIKQALLTAPALGLPDLTKPFELFVDEKQGYAKGVLTQKLGPWRRPVAYLSKKLDPVAAGWPPCLRMVAAIAVLTKDAGKLTMGQPLVILAPHAVEALVKQPPDRWLSNARMTHYQALLLDTDRVQFGPVVALNPATLLPLPEEGLQHDCLDILAEAHGTRSDLMDQPLPDADHTWYTDGSSFLQEGQRKAGAAVTTETEVIWARALPAGTSAQRAELIALTQALKMAEGKKLNVYTDSRYAFATAHIHGEIYRRRGWLTSEGKEIKNKDEILALLKALFLPKRLSIIHCPGHQKGNSAEARGNRMADQAAREVATRETPETSTLLAGKRTADGSEFEKRTADGSEFESPKKKAKVE

SEQ ID NO: 2390 - protein, 2096 aa, synthetic construct
MPAAKRVKLDGGDKKYSIGLDIGTNSVGWAVITDEYKVPSKKFKVLGNTDRHSIKKNLIGALLFDSGETAEATRLKRTARRRYTRRKNRICYLQEIFSNEMAKVDDSFFHRLEESFLVEEDKKHERHPIFGNIVDEVAYHEKYPTIYHLRKKLVDSTDKADLRLIYLALAHMIKFRGHFLIEGDLNPDNSDVDKLFIQLVQTYNQLFEENPINASGVDAKAILSARLSKSRRLENLIAQLPGEKKNGLFGNLIALSLGLTPNFKSNFDLAEDAKLQLSKDTYDDDLDNLLAQIGDQYADLFLAAKNLSDAILLSDILRVNTEITKAPLSASMIKRYDEHHQDLTLLKALVRQQLPEKYKEIFFDQSKNGYAGYIDGGASQEEFYKFIKPILEKMDGTEELLVKLNREDLLRKQRTFDNGSIPHQIHLGELHAILRRQEDFYPFLKDNREKIEKILTFRIPYYVGPLARGNSRFAWMTRKSEETITPWNFEEVVDKGASAQSFIERMTNFDKNLPNEKVLPKHSLLYEYFTVYNELTKVKYVTEGMRKPAFLSGEQKKAIVDLLFKTNRKVTVKQLKEDYFKKIECFDSVEISGVEDRFNASLGTYHDLLKIIKDKDFLDNEENEDILEDIVLTLTLFEDREMIEERLKTYAHLFDDKVMKQLKRRRYTGWGRLSRKLINGIRDKQSGKTILDFLKSDGFANRNFMQLIHDDSLTFKEDIQKAQVSGQGDSLHEHIANLAGSPAIKKGILQTVKVVDELVKVMGRHKPENIVIEMARENQTTQKGQKNSRERMKRIEEGIKELGSQILKEHPVENTQLQNEKLYLYYLQNGRDMYVDQELDINRLSDYDVDHIVPQSFLKDDSIDNKVLTRSDKARGKSDNVPSEEVVKKMKNYWRQLLNAKLITQRKFDNLTKAERGGLSELDKAGFIKRQLVETRQITKHVAQILDSRMNTKYDENDKLIREVKVITLKSKLVSDFRKDFQFYKVREINNYHHAHDAYLNAVVGTALIKKYPKLESEFVYGDYKVYDVRKMIAKSEQEIGKATAKYFFYSNIMNFFKTEITLANGEIRKRPLIETNGETGEIVWDKGRDFATVRKVLSMPQVNIVKKTEVQTGGFSKESILPKRNSDKLIARKKDWDPKKYGGFDSPTVAYSVLVVAKVEKGKSKKLKSVKELLGITIMERSSFEKNPIDFLEAKGYKEVKKDLIIKLPKYSLFELENGRKRMLASAGELQKGNELALPSKYVNFLYLASHYEKLKGSPEDNEQKQLFVEQHKHYLDEIIEQISEFSKRVILADANLDKVLSAYNKHRDKPIREQAENIIHLFTLTNLGAPAAFKYFDTTIDRKRYTSTKEVLDATLIHQSITGLYETRIDLSQLGGDGGGSSGGGEAAAKGGTLNIEDEYRLHETSKEPDVSLGSTWLSDFPQAWAETGGMGLAVRQAPLIIPLKATSTPVSIKQYPMSQEARLGIKPHIQRLLDQGILVPCQSPWNTPLLPVKKPGTNDYRPVQDLREVNKRVEDIHPTVPNPYNLLSGLPPSHQWYTVLDLKDAFFCLRLHPTSQPLFAFEWRDPEMGISGQLTWTRLPQGFKNSPTLFNEALHRDLAGFRIQHPDLILLQYVDDLLLAATSELDCQQGTRALLQTLGDLGYRASAKKAQICQKQVKYLGYLLKEGQRWLTEARKETVMGQPIPKTPRQLREFLGKAGFCRLFIPGFAEMAAPLYPLTKPGTLFNWGPDQQKAFQEIKQALLTAPALGLPDLTKPFELFVDEKQGYAKGVLTQKLGPWRRPVAYLSKKLDPVAAGWPPCLRMVAAIAVLTKDAGKLTMGQPLVILAPHAVEALVKQPPDRWLSNARMTHYQALLLDTDRVQFGPVVALNPATLLPLPEEGLQHDCLDILAEAHGTRSDLMDQPLPDADHTWYTDGSSFLQEGQRKAGAAVTTETEVIWARALPAGTSAQRAELIALTQALKMAEGKKLNVYTDSRYAFATAHIHGEIYRRRGWLTSEGKEIKNKDEILALLKALFLPKRLSIIHCPGHQKGNSAEARGNRMADQAAREVATRETPETSTLLAGKRTADGSEFEKRTADGSEFESPKKKAKVE

SEQ ID NO: 2391 - protein, 2096 aa, synthetic construct
MPAAKRVKLDGGDKKYSIGLDIGTNSVGWAVITDEYKVPSKKFKVLGNTDRHSIKKNLIGALLFDSGETAEATRLKRTARRRYTRRKNRICYLQEIFSNEMAKVDDSFFHRLEESFLVEEDKKHERHPIFGNIVDEVAYHEKYPTIYHLRKKLVDSTDKADLRLIYLALAHMIKFRGHFLIEGDLNPDNSDVDKLFIQLVQTYNQLFEENPINASGVDAKAILSARLSKSRRLENLIAQLPGEKKNGLFGNLIALSLGLTPNFKSNFDLAEDAKLQLSKDTYDDDLDNLLAQIGDQYADLFLAAKNLSDAILLSDILRVNTEITKAPLSASMIKRYDEHHQDLTLLKALVRQQLPEKYKEIFFDQSKNGYAGYIDGGASQEEFYKFIKPILEKMDGTEELLVKLNREDLLRKQRTFDNGSIPHQIHLGELHAILRRQEDFYPFLKDNREKIEKILTFRIPYYVGPLARGNSRFAWMTRKSEETITPWNFEEVVDKGASAQSFIERMTNFDKNLPNEKVLPKHSLLYEYFTVYNELTKVKYVTEGMRKPAFLSGEQKKAIVDLLFKTNRKVTVKQLKEDYFKKIECFDSVEISGVEDRFNASLGTYHDLLKIIKDKDFLDNEENEDILEDIVLTLTLFEDREMIEERLKTYAHLFDDKVMKQLKRRRYTGWGRLSRKLINGIRDKQSGKTILDFLKSDGFANRNFMQLIHDDSLTFKEDIQKAQVSGQGDSLHEHIANLAGSPAIKKGILQTVKVVDELVKVMGRHKPENIVIEMARENQTTQKGQKNSRERMKRIEEGIKELGSQILKEHPVENTQLQNEKLYLYYLQNGRDMYVDQELDINRLSDYDVDHIVPQSFLKDDSIDNKVLTRSDKARGKSDNVPSEEVVKKMKNYWRQLLNAKLITQRKFDNLTKAERGGLSELDKAGFIKRQLVETRQITKHVAQILDSRMNTKYDENDKLIREVKVITLKSKLVSDFRKDFQFYKVREINNYHHAHDAYLNAVVGTALIKKYPKLESEFVYGDYKVYDVRKMIAKSEQEIGKATAKYFFYSNIMNFFKTEITLANGEIRKRPLIETNGETGEIVWDKGRDFATVRKVLSMPQVNIVKKTEVQTGGFSKESILPKRNSDKLIARKKDWDPKKYGGFDSPTVAYSVLVVAKVEKGKSKKLKSVKELLGITIMERSSFEKNPIDFLEAKGYKEVKKDLIIKLPKYSLFELENGRKRMLASAGELQKGNELALPSKYVNFLYLASHYEKLKGSPEDNEQKQLFVEQHKHYLDEIIEQISEFSKRVILADANLDKVLSAYNKHRDKPIREQAENIIHLFTLTNLGAPAAFKYFDTTIDRKRYTSTKEVLDATLIHQSITGLYETRIDLSQLGGDGGEAAAKGGGPAPGGTLNIEDEYRLHETSKEPDVSLGSTWLSDFPQAWAETGGMGLAVRQAPLIIPLKATSTPVSIKQYPMSQEARLGIKPHIQRLLDQGILVPCQSPWNTPLLPVKKPGTNDYRPVQDLREVNKRVEDIHPTVPNPYNLLSGLPPSHQWYTVLDLKDAFFCLRLHPTSQPLFAFEWRDPEMGISGQLTWTRLPQGFKNSPTLFNEALHRDLAGFRIQHPDLILLQYVDDLLLAATSELDCQQGTRALLQTLGDLGYRASAKKAQICQKQVKYLGYLLKEGQRWLTEARKETVMGQPIPKTPRQLREFLGKAGFCRLFIPGFAEMAAPLYPLTKPGTLFNWGPDQQKAFQEIKQALLTAPALGLPDLTKPFELFVDEKQGYAKGVLTQKLGPWRRPVAYLSKKLDPVAAGWPPCLRMVAAIAVLTKDAGKLTMGQPLVILAPHAVEALVKQPPDRWLSNARMTHYQALLLDTDRVQFGPVVALNPATLLPLPEEGLQHDCLDILAEAHGTRSDLMDQPLPDADHTWYTDGSSFLQEGQRKAGAAVTTETEVIWARALPAGTSAQRAELIALTQALKMAEGKKLNVYTDSRYAFATAHIHGEIYRRRGWLTSEGKEIKNKDEILALLKALFLPKRLSIIHCPGHQKGNSAEARGNRMADQAAREVATRETPETSTLLAGKRTADGSEFEKRTADGSEFESPKKKAKVE

SEQ ID NO: 2392 - protein, 2096 aa, synthetic construct
MPAAKRVKLDGGDKKYSIGLDIGTNSVGWAVITDEYKVPSKKFKVLGNTDRHSIKKNLIGALLFDSGETAEATRLKRTARRRYTRRKNRICYLQEIFSNEMAKVDDSFFHRLEESFLVEEDKKHERHPIFGNIVDEVAYHEKYPTIYHLRKKLVDSTDKADLRLIYLALAHMIKFRGHFLIEGDLNPDNSDVDKLFIQLVQTYNQLFEENPINASGVDAKAILSARLSKSRRLENLIAQLPGEKKNGLFGNLIALSLGLTPNFKSNFDLAEDAKLQLSKDTYDDDLDNLLAQIGDQYADLFLAAKNLSDAILLSDILRVNTEITKAPLSASMIKRYDEHHQDLTLLKALVRQQLPEKYKEIFFDQSKNGYAGYIDGGASQEEFYKFIKPILEKMDGTEELLVKLNREDLLRKQRTFDNGSIPHQIHLGELHAILRRQEDFYPFLKDNREKIEKILTFRIPYYVGPLARGNSRFAWMTRKSEETITPWNFEEVVDKGASAQSFIERMTNFDKNLPNEKVLPKHSLLYEYFTVYNELTKVKYVTEGMRKPAFLSGEQKKAIVDLLFKTNRKVTVKQLKEDYFKKIECFDSVEISGVEDRFNASLGTYHDLLKIIKDKDFLDNEENEDILEDIVLTLTLFEDREMIEERLKTYAHLFDDKVMKQLKRRRYTGWGRLSRKLINGIRDKQSGKTILDFLKSDGFANRNFMQLIHDDSLTFKEDIQKAQVSGQGDSLHEHIANLAGSPAIKKGILQTVKVVDELVKVMGRHKPENIVIEMARENQTTQKGQKNSRERMKRIEEGIKELGSQILKEHPVENTQLQNEKLYLYYLQNGRDMYVDQELDINRLSDYDVDHIVPQSFLKDDSIDNKVLTRSDKARGKSDNVPSEEVVKKMKNYWRQLLNAKLITQRKFDNLTKAERGGLSELDKAGFIKRQLVETRQITKHVAQILDSRMNTKYDENDKLIREVKVITLKSKLVSDFRKDFQFYKVREINNYHHAHDAYLNAVVGTALIKKYPKLESEFVYGDYKVYDVRKMIAKSEQEIGKATAKYFFYSNIMNFFKTEITLANGEIRKRPLIETNGETGEIVWDKGRDFATVRKVLSMPQVNIVKKTEVQTGGFSKESILPKRNSDKLIARKKDWDPKKYGGFDSPTVAYSVLVVAKVEKGKSKKLKSVKELLGITIMERSSFEKNPIDFLEAKGYKEVKKDLIIKLPKYSLFELENGRKRMLASAGELQKGNELALPSKYVNFLYLASHYEKLKGSPEDNEQKQLFVEQHKHYLDEIIEQISEFSKRVILADANLDKVLSAYNKHRDKPIREQAENIIHLFTLTNLGAPAAFKYFDTTIDRKRYTSTKEVLDATLIHQSITGLYETRIDLSQLGGDGGGGGPAPEAAAKGGTLNIEDEYRLHETSKEPDVSLGSTWLSDFPQAWAETGGMGLAVRQAPLIIPLKATSTPVSIKQYPMSQEARLGIKPHIQRLLDQGILVPCQSPWNTPLLPVKKPGTNDYRPVQDLREVNKRVEDIHPTVPNPYNLLSGLPPSHQWYTVLDLKDAFFCLRLHPTSQPLFAFEWRDPEMGISGQLTWTRLPQGFKNSPTLFNEALHRDLAGFRIQHPDLILLQYVDDLLLAATSELDCQQGTRALLQTLGDLGYRASAKKAQICQKQVKYLGYLLKEGQRWLTEARKETVMGQPIPKTPRQLREFLGKAGFCRLFIPGFAEMAAPLYPLTKPGTLFNWGPDQQKAFQEIKQALLTAPALGLPDLTKPFELFVDEKQGYAKGVLTQKLGPWRRPVAYLSKKLDPVAAGWPPCLRMVAAIAVLTKDAGKLTMGQPLVILAPHAVEALVKQPPDRWLSNARMTHYQALLLDTDRVQFGPVVALNPATLLPLPEEGLQHDCLDILAEAHGTRSDLMDQPLPDADHTWYTDGSSFLQEGQRKAGAAVTTETEVIWARALPAGTSAQRAELIALTQALKMAEGKKLNVYTDSRYAFATAHIHGEIYRRRGWLTSEGKEIKNKDEILALLKALFLPKRLSIIHCPGHQKGNSAEARGNRMADQAAREVATRETPETSTLLAGKRTADGSEFEKRTADGSEFESPKKKAKVE

SEQ ID NO: 2393 - protein, 2094 aa, synthetic construct
MPAAKRVKLDGGDKKYSIGLDIGTNSVGWAVITDEYKVPSKKFKVLGNTDRHSIKKNLIGALLFDSGETAEATRLKRTARRRYTRRKNRICYLQEIFSNEMAKVDDSFFHRLEESFLVEEDKKHERHPIFGNIVDEVAYHEKYPTIYHLRKKLVDSTDKADLRLIYLALAHMIKFRGHFLIEGDLNPDNSDVDKLFIQLVQTYNQLFEENPINASGVDAKAILSARLSKSRRLENLIAQLPGEKKNGLFGNLIALSLGLTPNFKSNFDLAEDAKLQLSKDTYDDDLDNLLAQIGDQYADLFLAAKNLSDAILLSDILRVNTEITKAPLSASMIKRYDEHHQDLTLLKALVRQQLPEKYKEIFFDQSKNGYAGYIDGGASQEEFYKFIKPILEKMDGTEELLVKLNREDLLRKQRTFDNGSIPHQIHLGELHAILRRQEDFYPFLKDNREKIEKILTFRIPYYVGPLARGNSRFAWMTRKSEETITPWNFEEVVDKGASAQSFIERMTNFDKNLPNEKVLPKHSLLYEYFTVYNELTKVKYVTEGMRKPAFLSGEQKKAIVDLLFKTNRKVTVKQLKEDYFKKIECFDSVEISGVEDRFNASLGTYHDLLKIIKDKDFLDNEENEDILEDIVLTLTLFEDREMIEERLKTYAHLFDDKVMKQLKRRRYTGWGRLSRKLINGIRDKQSGKTILDFLKSDGFANRNFMQLIHDDSLTFKEDIQKAQVSGQGDSLHEHIANLAGSPAIKKGILQTVKVVDELVKVMGRHKPENIVIEMARENQTTQKGQKNSRERMKRIEEGIKELGSQILKEHPVENTQLQNEKLYLYYLQNGRDMYVDQELDINRLSDYDVDHIVPQSFLKDDSIDNKVLTRSDKARGKSDNVPSEEVVKKMKNYWRQLLNAKLITQRKFDNLTKAERGGLSELDKAGFIKRQLVETRQITKHVAQILDSRMNTKYDENDKLIREVKVITLKSKLVSDFRKDFQFYKVREINNYHHAHDAYLNAVVGTALIKKYPKLESEFVYGDYKVYDVRKMIAKSEQEIGKATAKYFFYSNIMNFFKTEITLANGEIRKRPLIETNGETGEIVWDKGRDFATVRKVLSMPQVNIVKKTEVQTGGFSKESILPKRNSDKLIARKKDWDPKKYGGFDSPTVAYSVLVVAKVEKGKSKKLKSVKELLGITIMERSSFEKNPIDFLEAKGYKEVKKDLIIKLPKYSLFELENGRKRMLASAGELQKGNELALPSKYVNFLYLASHYEKLKGSPEDNEQKQLFVEQHKHYLDEIIEQISEFSKRVILADANLDKVLSAYNKHRDKPIREQAENIIHLFTLTNLGAPAAFKYFDTTIDRKRYTSTKEVLDATLIHQSITGLYETRIDLSQLGGDGGGSSGSSGSSGGTLNIEDEYRLHETSKEPDVSLGSTWLSDFPQAWAETGGMGLAVRQAPLIIPLKATSTPVSIKQYPMSQEARLGIKPHIQRLLDQGILVPCQSPWNTPLLPVKKPGTNDYRPVQDLREVNKRVEDIHPTVPNPYNLLSGLPPSHQWYTVLDLKDAFFCLRLHPTSQPLFAFEWRDPEMGISGQLTWTRLPQGFKNSPTLFNEALHRDLAGFRIQHPDLILLQYVDDLLLAATSELDCQQGTRALLQTLGDLGYRASAKKAQICQKQVKYLGYLLKEGQRWLTEARKETVMGQPIPKTPRQLREFLGKAGFCRLFIPGFAEMAAPLYPLTKPGTLFNWGPDQQKAFQEIKQALLTAPALGLPDLTKPFELFVDEKQGYAKGVLTQKLGPWRRPVAYLSKKLDPVAAGWPPCLRMVAAIAVLTKDAGKLTMGQPLVILAPHAVEALVKQPPDRWLSNARMTHYQALLLDTDRVQFGPVVALNPATLLPLPEEGLQHDCLDILAEAHGTRSDLMDQPLPDADHTWYTDGSSFLQEGQRKAGAAVTTETEVIWARALPAGTSAQRAELIALTQALKMAEGKKLNVYTDSRYAFATAHIHGEIYRRRGWLTSEGKEIKNKDEILALLKALFLPKRLSIIHCPGHQKGNSAEARGNRMADQAAREVATRETPETSTLLAGKRTADGSEFEKRTADGSEFESPKKKAKVE

SEQ ID NO: 2394 - protein, 2092 aa, synthetic construct
MPAAKRVKLDGGDKKYSIGLDIGTNSVGWAVITDEYKVPSKKFKVLGNTDRHSIKKNLIGALLFDSGETAEATRLKRTARRRYTRRKNRICYLQEIFSNEMAKVDDSFFHRLEESFLVEEDKKHERHPIFGNIVDEVAYHEKYPTIYHLRKKLVDSTDKADLRLIYLALAHMIKFRGHFLIEGDLNPDNSDVDKLFIQLVQTYNQLFEENPINASGVDAKAILSARLSKSRRLENLIAQLPGEKKNGLFGNLIALSLGLTPNFKSNFDLAEDAKLQLSKDTYDDDLDNLLAQIGDQYADLFLAAKNLSDAILLSDILRVNTEITKAPLSASMIKRYDEHHQDLTLLKALVRQQLPEKYKEIFFDQSKNGYAGYIDGGASQEEFYKFIKPILEKMDGTEELLVKLNREDLLRKQRTFDNGSIPHQIHLGELHAILRRQEDFYPFLKDNREKIEKILTFRIPYYVGPLARGNSRFAWMTRKSEETITPWNFEEVVDKGASAQSFIERMTNFDKNLPNEKVLPKHSLLYEYFTVYNELTKVKYVTEGMRKPAFLSGEQKKAIVDLLFKTNRKVTVKQLKEDYFKKIECFDSVEISGVEDRFNASLGTYHDLLKIIKDKDFLDNEENEDILEDIVLTLTLFEDREMIEERLKTYAHLFDDKVMKQLKRRRYTGWGRLSRKLINGIRDKQSGKTILDFLKSDGFANRNFMQLIHDDSLTFKEDIQKAQVSGQGDSLHEHIANLAGSPAIKKGILQTVKVVDELVKVMGRHKPENIVIEMARENQTTQKGQKNSRERMKRIEEGIKELGSQILKEHPVENTQLQNEKLYLYYLQNGRDMYVDQELDINRLSDYDVDHIVPQSFLKDDSIDNKVLTRSDKARGKSDNVPSEEVVKKMKNYWRQLLNAKLITQRKFDNLTKAERGGLSELDKAGFIKRQLVETRQITKHVAQILDSRMNTKYDENDKLIREVKVITLKSKLVSDFRKDFQFYKVREINNYHHAHDAYLNAVVGTALIKKYPKLESEFVYGDYKVYDVRKMIAKSEQEIGKATAKYFFYSNIMNFFKTEITLANGEIRKRPLIETNGETGEIVWDKGRDFATVRKVLSMPQVNIVKKTEVQTGGFSKESILPKRNSDKLIARKKDWDPKKYGGFDSPTVAYSVLVVAKVEKGKSKKLKSVKELLGITIMERSSFEKNPIDFLEAKGYKEVKKDLIIKLPKYSLFELENGRKRMLASAGELQKGNELALPSKYVNFLYLASHYEKLKGSPEDNEQKQLFVEQHKHYLDEIIEQISEFSKRVILADANLDKVLSAYNKHRDKPIREQAENIIHLFTLTNLGAPAAFKYFDTTIDRKRYTSTKEVLDATLIHQSITGLYETRIDLSQLGGDGGPAPAPAPGGTLNIEDEYRLHETSKEPDVSLGSTWLSDFPQAWAETGGMGLAVRQAPLIIPLKATSTPVSIKQYPMSQEARLGIKPHIQRLLDQGILVPCQSPWNTPLLPVKKPGTNDYRPVQDLREVNKRVEDIHPTVPNPYNLLSGLPPSHQWYTVLDLKDAFFCLRLHPTSQPLFAFEWRDPEMGISGQLTWTRLPQGFKNSPTLFNEALHRDLAGFRIQHPDLILLQYVDDLLLAATSELDCQQGTRALLQTLGDLGYRASAKKAQICQKQVKYLGYLLKEGQRWLTEARKETVMGQPIPKTPRQLREFLGKAGFCRLFIPGFAEMAAPLYPLTKPGTLFNWGPDQQKAFQEIKQALLTAPALGLPDLTKPFELFVDEKQGYAKGVLTQKLGPWRRPVAYLSKKLDPVAAGWPPCLRMVAAIAVLTKDAGKLTMGQPLVILAPHAVEALVKQPPDRWLSNARMTHYQALLLDTDRVQFGPVVALNPATLLPLPEEGLQHDCLDILAEAHGTRSDLMDQPLPDADHTWYTDGSSFLQEGQRKAGAAVTTETEVIWARALPAGTSAQRAELIALTQALKMAEGKKLNVYTDSRYAFATAHIHGEIYRRRGWLTSEGKEIKNKDEILALLKALFLPKRLSIIHCPGHQKGNSAEARGNRMADQAAREVATRETPETSTLLAGKRTADGSEFEKRTADGSEFESPKKKAKVE

SEQ ID NO: 2395 - protein, 2091 aa, synthetic construct
MPAAKRVKLDGGDKKYSIGLDIGTNSVGWAVITDEYKVPSKKFKVLGNTDRHSIKKNLIGALLFDSGETAEATRLKRTARRRYTRRKNRICYLQEIFSNEMAKVDDSFFHRLEESFLVEEDKKHERHPIFGNIVDEVAYHEKYPTIYHLRKKLVDSTDKADLRLIYLALAHMIKFRGHFLIEGDLNPDNSDVDKLFIQLVQTYNQLFEENPINASGVDAKAILSARLSKSRRLENLIAQLPGEKKNGLFGNLIALSLGLTPNFKSNFDLAEDAKLQLSKDTYDDDLDNLLAQIGDQYADLFLAAKNLSDAILLSDILRVNTEITKAPLSASMIKRYDEHHQDLTLLKALVRQQLPEKYKEIFFDQSKNGYAGYIDGGASQEEFYKFIKPILEKMDGTEELLVKLNREDLLRKQRTFDNGSIPHQIHLGELHAILRRQEDFYPFLKDNREKIEKILTFRIPYYVGPLARGNSRFAWMTRKSEETITPWNFEEVVDKGASAQSFIERMTNFDKNLPNEKVLPKHSLLYEYFTVYNELTKVKYVTEGMRKPAFLSGEQKKAIVDLLFKTNRKVTVKQLKEDYFKKIECFDSVEISGVEDRFNASLGTYHDLLKIIKDKDFLDNEENEDILEDIVLTLTLFEDREMIEERLKTYAHLFDDKVMKQLKRRRYTGWGRLSRKLINGIRDKQSGKTILDFLKSDGFANRNFMQLIHDDSLTFKEDIQKAQVSGQGDSLHEHIANLAGSPAIKKGILQTVKVVDELVKVMGRHKPENIVIEMARENQTTQKGQKNSRERMKRIEEGIKELGSQILKEHPVENTQLQNEKLYLYYLQNGRDMYVDQELDINRLSDYDVDHIVPQSFLKDDSIDNKVLTRSDKARGKSDNVPSEEVVKKMKNYWRQLLNAKLITQRKFDNLTKAERGGLSELDKAGFIKRQLVETRQITKHVAQILDSRMNTKYDENDKLIREVKVITLKSKLVSDFRKDFQFYKVREINNYHHAHDAYLNAVVGTALIKKYPKLESEFVYGDYKVYDVRKMIAKSEQEIGKATAKYFFYSNIMNFFKTEITLANGEIRKRPLIETNGETGEIVWDKGRDFATVRKVLSMPQVNIVKKTEVQTGGFSKESILPKRNSDKLIARKKDWDPKKYGGFDSPTVAYSVLVVAKVEKGKSKKLKSVKELLGITIMERSSFEKNPIDFLEAKGYKEVKKDLIIKLPKYSLFELENGRKRMLASAGELQKGNELALPSKYVNFLYLASHYEKLKGSPEDNEQKQLFVEQHKHYLDEIIEQISEFSKRVILADANLDKVLSAYNKHRDKPIREQAENIIHLFTLTNLGAPAAFKYFDTTIDRKRYTSTKEVLDATLIHQSITGLYETRIDLSQLGGDGGPAPGGGGGTLNIEDEYRLHETSKEPDVSLGSTWLSDFPQAWAETGGMGLAVRQAPLIIPLKATSTPVSIKQYPMSQEARLGIKPHIQRLLDQGILVPCQSPWNTPLLPVKKPGTNDYRPVQDLREVNKRVEDIHPTVPNPYNLLSGLPPSHQWYTVLDLKDAFFCLRLHPTSQPLFAFEWRDPEMGISGQLTWTRLPQGFKNSPTLFNEALHRDLAGFRIQHPDLILLQYVDDLLLAATSELDCQQGTRALLQTLGDLGYRASAKKAQICQKQVKYLGYLLKEGQRWLTEARKETVMGQPIPKTPRQLREFLGKAGFCRLFIPGFAEMAAPLYPLTKPGTLFNWGPDQQKAFQEIKQALLTAPALGLPDLTKPFELFVDEKQGYAKGVLTQKLGPWRRPVAYLSKKLDPVAAGWPPCLRMVAAIAVLTKDAGKLTMGQPLVILAPHAVEALVKQPPDRWLSNARMTHYQALLLDTDRVQFGPVVALNPATLLPLPEEGLQHDCLDILAEAHGTRSDLMDQPLPDADHTWYTDGSSFLQEGQRKAGAAVTTETEVIWARALPAGTSAQRAELIALTQALKMAEGKKLNVYTDSRYAFATAHIHGEIYRRRGWLTSEGKEIKNKDEILALLKALFLPKRLSIIHCPGHQKGNSAEARGNRMADQAAREVATRETPETSTLLAGKRTADGSEFEKRTADGSEFESPKKKAKVE

SEQ ID NO: 2396 - protein, 2097 aa, synthetic construct
MPAAKRVKLDGGDKKYSIGLDIGTNSVGWAVITDEYKVPSKKFKVLGNTDRHSIKKNLIGALLFDSGETAEATRLKRTARRRYTRRKNRICYLQEIFSNEMAKVDDSFFHRLEESFLVEEDKKHERHPIFGNIVDEVAYHEKYPTIYHLRKKLVDSTDKADLRLIYLALAHMIKFRGHFLIEGDLNPDNSDVDKLFIQLVQTYNQLFEENPINASGVDAKAILSARLSKSRRLENLIAQLPGEKKNGLFGNLIALSLGLTPNFKSNFDLAEDAKLQLSKDTYDDDLDNLLAQIGDQYADLFLAAKNLSDAILLSDILRVNTEITKAPLSASMIKRYDEHHQDLTLLKALVRQQLPEKYKEIFFDQSKNGYAGYIDGGASQEEFYKFIKPILEKMDGTEELLVKLNREDLLRKQRTFDNGSIPHQIHLGELHAILRRQEDFYPFLKDNREKIEKILTFRIPYYVGPLARGNSRFAWMTRKSEETITPWNFEEVVDKGASAQSFIERMTNFDKNLPNEKVLPKHSLLYEYFTVYNELTKVKYVTEGMRKPAFLSGEQKKAIVDLLFKTNRKVTVKQLKEDYFKKIECFDSVEISGVEDRFNASLGTYHDLLKIIKDKDFLDNEENEDILEDIVLTLTLFEDREMIEERLKTYAHLFDDKVMKQLKRRRYTGWGRLSRKLINGIRDKQSGKTILDFLKSDGFANRNFMQLIHDDSLTFKEDIQKAQVSGQGDSLHEHIANLAGSPAIKKGILQTVKVVDELVKVMGRHKPENIVIEMARENQTTQKGQKNSRERMKRIEEGIKELGSQILKEHPVENTQLQNEKLYLYYLQNGRDMYVDQELDINRLSDYDVDHIVPQSFLKDDSIDNKVLTRSDKARGKSDNVPSEEVVKKMKNYWRQLLNAKLITQRKFDNLTKAERGGLSELDKAGFIKRQLVETRQITKHVAQILDSRMNTKYDENDKLIREVKVITLKSKLVSDFRKDFQFYKVREINNYHHAHDAYLNAVVGTALIKKYPKLESEFVYGDYKVYDVRKMIAKSEQEIGKATAKYFFYSNIMNFFKTEITLANGEIRKRPLIETNGETGEIVWDKGRDFATVRKVLSMPQVNIVKKTEVQTGGFSKESILPKRNSDKLIARKKDWDPKKYGGFDSPTVAYSVLVVAKVEKGKSKKLKSVKELLGITIMERSSFEKNPIDFLEAKGYKEVKKDLIIKLPKYSLFELENGRKRMLASAGELQKGNELALPSKYVNFLYLASHYEKLKGSPEDNEQKQLFVEQHKHYLDEIIEQISEFSKRVILADANLDKVLSAYNKHRDKPIREQAENIIHLFTLTNLGAPAAFKYFDTTIDRKRYTSTKEVLDATLIHQSITGLYETRIDLSQLGGDGGGSSGSSGSSGSSGGTLNIEDEYRLHETSKEPDVSLGSTWLSDFPQAWAETGGMGLAVRQAPLIIPLKATSTPVSIKQYPMSQEARLGIKPHIQRLLDQGILVPCQSPWNTPLLPVKKPGTNDYRPVQDLREVNKRVEDIHPTVPNPYNLLSGLPPSHQWYTVLDLKDAFFCLRLHPTSQPLFAFEWRDPEMGISGQLTWTRLPQGFKNSPTLFNEALHRDLAGFRIQHPDLILLQYVDDLLLAATSELDCQQGTRALLQTLGDLGYRASAKKAQICQKQVKYLGYLLKEGQRWLTEARKETVMGQPIPKTPRQLREFLGKAGFCRLFIPGFAEMAAPLYPLTKPGTLFNWGPDQQKAFQEIKQALLTAPALGLPDLTKPFELFVDEKQGYAKGVLTQKLGPWRRPVAYLSKKLDPVAAGWPPCLRMVAAIAVLTKDAGKLTMGQPLVILAPHAVEALVKQPPDRWLSNARMTHYQALLLDTDRVQFGPVVALNPATLLPLPEEGLQHDCLDILAEAHGTRSDLMDQPLPDADHTWYTDGSSFLQEGQRKAGAAVTTETEVIWARALPAGTSAQRAELIALTQALKMAEGKKLNVYTDSRYAFATAHIHGEIYRRRGWLTSEGKEIKNKDEILALLKALFLPKRLSIIHCPGHQKGNSAEARGNRMADQAAREVATRETPETSTLLAGKRTADGSEFEKRTADGSEFESPKKKAKVE

SEQ ID NO: 2397 - protein, 2091 aa, synthetic construct
MPAAKRVKLDGGDKKYSIGLDIGTNSVGWAVITDEYKVPSKKFKVLGNTDRHSIKKNLIGALLFDSGETAEATRLKRTARRRYTRRKNRICYLQEIFSNEMAKVDDSFFHRLEESFLVEEDKKHERHPIFGNIVDEVAYHEKYPTIYHLRKKLVDSTDKADLRLIYLALAHMIKFRGHFLIEGDLNPDNSDVDKLFIQLVQTYNQLFEENPINASGVDAKAILSARLSKSRRLENLIAQLPGEKKNGLFGNLIALSLGLTPNFKSNFDLAEDAKLQLSKDTYDDDLDNLLAQIGDQYADLFLAAKNLSDAILLSDILRVNTEITKAPLSASMIKRYDEHHQDLTLLKALVRQQLPEKYKEIFFDQSKNGYAGYIDGGASQEEFYKFIKPILEKMDGTEELLVKLNREDLLRKQRTFDNGSIPHQIHLGELHAILRRQEDFYPFLKDNREKIEKILTFRIPYYVGPLARGNSRFAWMTRKSEETITPWNFEEVVDKGASAQSFIERMTNFDKNLPNEKVLPKHSLLYEYFTVYNELTKVKYVTEGMRKPAFLSGEQKKAIVDLLFKTNRKVTVKQLKEDYFKKIECFDSVEISGVEDRFNASLGTYHDLLKIIKDKDFLDNEENEDILEDIVLTLTLFEDREMIEERLKTYAHLFDDKVMKQLKRRRYTGWGRLSRKLINGIRDKQSGKTILDFLKSDGFANRNFMQLIHDDSLTFKEDIQKAQVSGQGDSLHEHIANLAGSPAIKKGILQTVKVVDELVKVMGRHKPENIVIEMARENQTTQKGQKNSRERMKRIEEGIKELGSQILKEHPVENTQLQNEKLYLYYLQNGRDMYVDQELDINRLSDYDVDHIVPQSFLKDDSIDNKVLTRSDKARGKSDNVPSEEVVKKMKNYWRQLLNAKLITQRKFDNLTKAERGGLSELDKAGFIKRQLVETRQITKHVAQILDSRMNTKYDENDKLIREVKVITLKSKLVSDFRKDFQFYKVREINNYHHAHDAYLNAVVGTALIKKYPKLESEFVYGDYKVYDVRKMIAKSEQEIGKATAKYFFYSNIMNFFKTEITLANGEIRKRPLIETNGETGEIVWDKGRDFATVRKVLSMPQVNIVKKTEVQTGGFSKESILPKRNSDKLIARKKDWDPKKYGGFDSPTVAYSVLVVAKVEKGKSKKLKSVKELLGITIMERSSFEKNPIDFLEAKGYKEVKKDLIIKLPKYSLFELENGRKRMLASAGELQKGNELALPSKYVNFLYLASHYEKLKGSPEDNEQKQLFVEQHKHYLDEIIEQISEFSKRVILADANLDKVLSAYNKHRDKPIREQAENIIHLFTLTNLGAPAAFKYFDTTIDRKRYTSTKEVLDATLIHQSITGLYETRIDLSQLGGDGGGGGGGSGGTLNIEDEYRLHETSKEPDVSLGSTWLSDFPQAWAETGGMGLAVRQAPLIIPLKATSTPVSIKQYPMSQEARLGIKPHIQRLLDQGILVPCQSPWNTPLLPVKKPGTNDYRPVQDLREVNKRVEDIHPTVPNPYNLLSGLPPSHQWYTVLDLKDAFFCLRLHPTSQPLFAFEWRDPEMGISGQLTWTRLPQGFKNSPTLFNEALHRDLAGFRIQHPDLILLQYVDDLLLAATSELDCQQGTRALLQTLGDLGYRASAKKAQICQKQVKYLGYLLKEGQRWLTEARKETVMGQPIPKTPRQLREFLGKAGFCRLFIPGFAEMAAPLYPLTKPGTLFNWGPDQQKAFQEIKQALLTAPALGLPDLTKPFELFVDEKQGYAKGVLTQKLGPWRRPVAYLSKKLDPVAAGWPPCLRMVAAIAVLTKDAGKLTMGQPLVILAPHAVEALVKQPPDRWLSNARMTHYQALLLDTDRVQFGPVVALNPATLLPLPEEGLQHDCLDILAEAHGTRSDLMDQPLPDADHTWYTDGSSFLQEGQRKAGAAVTTETEVIWARALPAGTSAQRAELIALTQALKMAEGKKLNVYTDSRYAFATAHIHGEIYRRRGWLTSEGKEIKNKDEILALLKALFLPKRLSIIHCPGHQKGNSAEARGNRMADQAAREVATRETPETSTLLAGKRTADGSEFEKRTADGSEFESPKKKAKVE

SEQ ID NO: 2398 - protein, 2091 aa, synthetic construct
MPAAKRVKLDGGDKKYSIGLDIGTNSVGWAVITDEYKVPSKKFKVLGNTDRHSIKKNLIGALLFDSGETAEATRLKRTARRRYTRRKNRICYLQEIFSNEMAKVDDSFFHRLEESFLVEEDKKHERHPIFGNIVDEVAYHEKYPTIYHLRKKLVDSTDKADLRLIYLALAHMIKFRGHFLIEGDLNPDNSDVDKLFIQLVQTYNQLFEENPINASGVDAKAILSARLSKSRRLENLIAQLPGEKKNGLFGNLIALSLGLTPNFKSNFDLAEDAKLQLSKDTYDDDLDNLLAQIGDQYADLFLAAKNLSDAILLSDILRVNTEITKAPLSASMIKRYDEHHQDLTLLKALVRQQLPEKYKEIFFDQSKNGYAGYIDGGASQEEFYKFIKPILEKMDGTEELLVKLNREDLLRKQRTFDNGSIPHQIHLGELHAILRRQEDFYPFLKDNREKIEKILTFRIPYYVGPLARGNSRFAWMTRKSEETITPWNFEEVVDKGASAQSFIERMTNFDKNLPNEKVLPKHSLLYEYFTVYNELTKVKYVTEGMRKPAFLSGEQKKAIVDLLFKTNRKVTVKQLKEDYFKKIECFDSVEISGVEDRFNASLGTYHDLLKIIKDKDFLDNEENEDILEDIVLTLTLFEDREMIEERLKTYAHLFDDKVMKQLKRRRYTGWGRLSRKLINGIRDKQSGKTILDFLKSDGFANRNFMQLIHDDSLTFKEDIQKAQVSGQGDSLHEHIANLAGSPAIKKGILQTVKVVDELVKVMGRHKPENIVIEMARENQTTQKGQKNSRERMKRIEEGIKELGSQILKEHPVENTQLQNEKLYLYYLQNGRDMYVDQELDINRLSDYDVDHIVPQSFLKDDSIDNKVLTRSDKARGKSDNVPSEEVVKKMKNYWRQLLNAKLITQRKFDNLTKAERGGLSELDKAGFIKRQLVETRQITKHVAQILDSRMNTKYDENDKLIREVKVITLKSKLVSDFRKDFQFYKVREINNYHHAHDAYLNAVVGTALIKKYPKLESEFVYGDYKVYDVRKMIAKSEQEIGKATAKYFFYSNIMNFFKTEITLANGEIRKRPLIETNGETGEIVWDKGRDFATVRKVLSMPQVNIVKKTEVQTGGFSKESILPKRNSDKLIARKKDWDPKKYGGFDSPTVAYSVLVVAKVEKGKSKKLKSVKELLGITIMERSSFEKNPIDFLEAKGYKEVKKDLIIKLPKYSLFELENGRKRMLASAGELQKGNELALPSKYVNFLYLASHYEKLKGSPEDNEQKQLFVEQHKHYLDEIIEQISEFSKRVILADANLDKVLSAYNKHRDKPIREQAENIIHLFTLTNLGAPAAFKYFDTTIDRKRYTSTKEVLDATLIHQSITGLYETRIDLSQLGGDGGGGSGGSGGTLNIEDEYRLHETSKEPDVSLGSTWLSDFPQAWAETGGMGLAVRQAPLIIPLKATSTPVSIKQYPMSQEARLGIKPHIQRLLDQGILVPCQSPWNTPLLPVKKPGTNDYRPVQDLREVNKRVEDIHPTVPNPYNLLSGLPPSHQWYTVLDLKDAFFCLRLHPTSQPLFAFEWRDPEMGISGQLTWTRLPQGFKNSPTLFNEALHRDLAGFRIQHPDLILLQYVDDLLLAATSELDCQQGTRALLQTLGDLGYRASAKKAQICQKQVKYLGYLLKEGQRWLTEARKETVMGQPIPKTPRQLREFLGKAGFCRLFIPGFAEMAAPLYPLTKPGTLFNWGPDQQKAFQEIKQALLTAPALGLPDLTKPFELFVDEKQGYAKGVLTQKLGPWRRPVAYLSKKLDPVAAGWPPCLRMVAAIAVLTKDAGKLTMGQPLVILAPHAVEALVKQPPDRWLSNARMTHYQALLLDTDRVQFGPVVALNPATLLPLPEEGLQHDCLDILAEAHGTRSDLMDQPLPDADHTWYTDGSSFLQEGQRKAGAAVTTETEVIWARALPAGTSAQRAELIALTQALKMAEGKKLNVYTDSRYAFATAHIHGEIYRRRGWLTSEGKEIKNKDEILALLKALFLPKRLSIIHCPGHQKGNSAEARGNRMADQAAREVATRETPETSTLLAGKRTADGSEFEKRTADGSEFESPKKKAKVE

SEQ ID NO: 2399 - protein, 2094 aa, synthetic construct
MPAAKRVKLDGGDKKYSIGLDIGTNSVGWAVITDEYKVPSKKFKVLGNTDRHSIKKNLIGALLFDSGETAEATRLKRTARRRYTRRKNRICYLQEIFSNEMAKVDDSFFHRLEESFLVEEDKKHERHPIFGNIVDEVAYHEKYPTIYHLRKKLVDSTDKADLRLIYLALAHMIKFRGHFLIEGDLNPDNSDVDKLFIQLVQTYNQLFEENPINASGVDAKAILSARLSKSRRLENLIAQLPGEKKNGLFGNLIALSLGLTPNFKSNFDLAEDAKLQLSKDTYDDDLDNLLAQIGDQYADLFLAAKNLSDAILLSDILRVNTEITKAPLSASMIKRYDEHHQDLTLLKALVRQQLPEKYKEIFFDQSKNGYAGYIDGGASQEEFYKFIKPILEKMDGTEELLVKLNREDLLRKQRTFDNGSIPHQIHLGELHAILRRQEDFYPFLKDNREKIEKILTFRIPYYVGPLARGNSRFAWMTRKSEETITPWNFEEVVDKGASAQSFIERMTNFDKNLPNEKVLPKHSLLYEYFTVYNELTKVKYVTEGMRKPAFLSGEQKKAIVDLLFKTNRKVTVKQLKEDYFKKIECFDSVEISGVEDRFNASLGTYHDLLKIIKDKDFLDNEENEDILEDIVLTLTLFEDREMIEERLKTYAHLFDDKVMKQLKRRRYTGWGRLSRKLINGIRDKQSGKTILDFLKSDGFANRNFMQLIHDDSLTFKEDIQKAQVSGQGDSLHEHIANLAGSPAIKKGILQTVKVVDELVKVMGRHKPENIVIEMARENQTTQKGQKNSRERMKRIEEGIKELGSQILKEHPVENTQLQNEKLYLYYLQNGRDMYVDQELDINRLSDYDVDHIVPQSFLKDDSIDNKVLTRSDKARGKSDNVPSEEVVKKMKNYWRQLLNAKLITQRKFDNLTKAERGGLSELDKAGFIKRQLVETRQITKHVAQILDSRMNTKYDENDKLIREVKVITLKSKLVSDFRKDFQFYKVREINNYHHAHDAYLNAVVGTALIKKYPKLESEFVYGDYKVYDVRKMIAKSEQEIGKATAKYFFYSNIMNFFKTEITLANGEIRKRPLIETNGETGEIVWDKGRDFATVRKVLSMPQVNIVKKTEVQTGGFSKESILPKRNSDKLIARKKDWDPKKYGGFDSPTVAYSVLVVAKVEKGKSKKLKSVKELLGITIMERSSFEKNPIDFLEAKGYKEVKKDLIIKLPKYSLFELENGRKRMLASAGELQKGNELALPSKYVNFLYLASHYEKLKGSPEDNEQKQLFVEQHKHYLDEIIEQISEFSKRVILADANLDKVLSAYNKHRDKPIREQAENIIHLFTLTNLGAPAAFKYFDTTIDRKRYTSTKEVLDATLIHQSITGLYETRIDLSQLGGDGGGSSGGSPAPGGTLNIEDEYRLHETSKEPDVSLGSTWLSDFPQAWAETGGMGLAVRQAPLIIPLKATSTPVSIKQYPMSQEARLGIKPHIQRLLDQGILVPCQSPWNTPLLPVKKPGTNDYRPVQDLREVNKRVEDIHPTVPNPYNLLSGLPPSHQWYTVLDLKDAFFCLRLHPTSQPLFAFEWRDPEMGISGQLTWTRLPQGFKNSPTLFNEALHRDLAGFRIQHPDLILLQYVDDLLLAATSELDCQQGTRALLQTLGDLGYRASAKKAQICQKQVKYLGYLLKEGQRWLTEARKETVMGQPIPKTPRQLREFLGKAGFCRLFIPGFAEMAAPLYPLTKPGTLFNWGPDQQKAFQEIKQALLTAPALGLPDLTKPFELFVDEKQGYAKGVLTQKLGPWRRPVAYLSKKLDPVAAGWPPCLRMVAAIAVLTKDAGKLTMGQPLVILAPHAVEALVKQPPDRWLSNARMTHYQALLLDTDRVQFGPVVALNPATLLPLPEEGLQHDCLDILAEAHGTRSDLMDQPLPDADHTWYTDGSSFLQEGQRKAGAAVTTETEVIWARALPAGTSAQRAELIALTQALKMAEGKKLNVYTDSRYAFATAHIHGEIYRRRGWLTSEGKEIKNKDEILALLKALFLPKRLSIIHCPGHQKGNSAEARGNRMADQAAREVATRETPETSTLLAGKRTADGSEFEKRTADGSEFESPKKKAKVE

SEQ ID NO: 2400 - protein, 2096 aa, synthetic construct
MPAAKRVKLDGGDKKYSIGLDIGTNSVGWAVITDEYKVPSKKFKVLGNTDRHSIKKNLIGALLFDSGETAEATRLKRTARRRYTRRKNRICYLQEIFSNEMAKVDDSFFHRLEESFLVEEDKKHERHPIFGNIVDEVAYHEKYPTIYHLRKKLVDSTDKADLRLIYLALAHMIKFRGHFLIEGDLNPDNSDVDKLFIQLVQTYNQLFEENPINASGVDAKAILSARLSKSRRLENLIAQLPGEKKNGLFGNLIALSLGLTPNFKSNFDLAEDAKLQLSKDTYDDDLDNLLAQIGDQYADLFLAAKNLSDAILLSDILRVNTEITKAPLSASMIKRYDEHHQDLTLLKALVRQQLPEKYKEIFFDQSKNGYAGYIDGGASQEEFYKFIKPILEKMDGTEELLVKLNREDLLRKQRTFDNGSIPHQIHLGELHAILRRQEDFYPFLKDNREKIEKILTFRIPYYVGPLARGNSRFAWMTRKSEETITPWNFEEVVDKGASAQSFIERMTNFDKNLPNEKVLPKHSLLYEYFTVYNELTKVKYVTEGMRKPAFLSGEQKKAIVDLLFKTNRKVTVKQLKEDYFKKIECFDSVEISGVEDRFNASLGTYHDLLKIIKDKDFLDNEENEDILEDIVLTLTLFEDREMIEERLKTYAHLFDDKVMKQLKRRRYTGWGRLSRKLINGIRDKQSGKTILDFLKSDGFANRNFMQLIHDDSLTFKEDIQKAQVSGQGDSLHEHIANLAGSPAIKKGILQTVKVVDELVKVMGRHKPENIVIEMARENQTTQKGQKNSRERMKRIEEGIKELGSQILKEHPVENTQLQNEKLYLYYLQNGRDMYVDQELDINRLSDYDVDHIVPQSFLKDDSIDNKVLTRSDKARGKSDNVPSEEVVKKMKNYWRQLLNAKLITQRKFDNLTKAERGGLSELDKAGFIKRQLVETRQITKHVAQILDSRMNTKYDENDKLIREVKVITLKSKLVSDFRKDFQFYKVREINNYHHAHDAYLNAVVGTALIKKYPKLESEFVYGDYKVYDVRKMIAKSEQEIGKATAKYFFYSNIMNFFKTEITLANGEIRKRPLIETNGETGEIVWDKGRDFATVRKVLSMPQVNIVKKTEVQTGGFSKESILPKRNSDKLIARKKDWDPKKYGGFDSPTVAYSVLVVAKVEKGKSKKLKSVKELLGITIMERSSFEKNPIDFLEAKGYKEVKKDLIIKLPKYSLFELENGRKRMLASAGELQKGNELALPSKYVNFLYLASHYEKLKGSPEDNEQKQLFVEQHKHYLDEIIEQISEFSKRVILADANLDKVLSAYNKHRDKPIREQAENIIHLFTLTNLGAPAAFKYFDTTIDRKRYTSTKEVLDATLIHQSITGLYETRIDLSQLGGDGGPAPEAAAKGGGGGTLNIEDEYRLHETSKEPDVSLGSTWLSDFPQAWAETGGMGLAVRQAPLIIPLKATSTPVSIKQYPMSQEARLGIKPHIQRLLDQGILVPCQSPWNTPLLPVKKPGTNDYRPVQDLREVNKRVEDIHPTVPNPYNLLSGLPPSHQWYTVLDLKDAFFCLRLHPTSQPLFAFEWRDPEMGISGQLTWTRLPQGFKNSPTLFNEALHRDLAGFRIQHPDLILLQYVDDLLLAATSELDCQQGTRALLQTLGDLGYRASAKKAQICQKQVKYLGYLLKEGQRWLTEARKETVMGQPIPKTPRQLREFLGKAGFCRLFIPGFAEMAAPLYPLTKPGTLFNWGPDQQKAFQEIKQALLTAPALGLPDLTKPFELFVDEKQGYAKGVLTQKLGPWRRPVAYLSKKLDPVAAGWPPCLRMVAAIAVLTKDAGKLTMGQPLVILAPHAVEALVKQPPDRWLSNARMTHYQALLLDTDRVQFGPVVALNPATLLPLPEEGLQHDCLDILAEAHGTRSDLMDQPLPDADHTWYTDGSSFLQEGQRKAGAAVTTETEVIWARALPAGTSAQRAELIALTQALKMAEGKKLNVYTDSRYAFATAHIHGEIYRRRGWLTSEGKEIKNKDEILALLKALFLPKRLSIIHCPGHQKGNSAEARGNRMADQAAREVATRETPETSTLLAGKRTADGSEFEKRTADGSEFESPKKKAKVE

SEQ ID NO: 2401 - protein, 2094 aa, synthetic construct
MPAAKRVKLDGGDKKYSIGLDIGTNSVGWAVITDEYKVPSKKFKVLGNTDRHSIKKNLIGALLFDSGETAEATRLKRTARRRYTRRKNRICYLQEIFSNEMAKVDDSFFHRLEESFLVEEDKKHERHPIFGNIVDEVAYHEKYPTIYHLRKKLVDSTDKADLRLIYLALAHMIKFRGHFLIEGDLNPDNSDVDKLFIQLVQTYNQLFEENPINASGVDAKAILSARLSKSRRLENLIAQLPGEKKNGLFGNLIALSLGLTPNFKSNFDLAEDAKLQLSKDTYDDDLDNLLAQIGDQYADLFLAAKNLSDAILLSDILRVNTEITKAPLSASMIKRYDEHHQDLTLLKALVRQQLPEKYKEIFFDQSKNGYAGYIDGGASQEEFYKFIKPILEKMDGTEELLVKLNREDLLRKQRTFDNGSIPHQIHLGELHAILRRQEDFYPFLKDNREKIEKILTFRIPYYVGPLARGNSRFAWMTRKSEETITPWNFEEVVDKGASAQSFIERMTNFDKNLPNEKVLPKHSLLYEYFTVYNELTKVKYVTEGMRKPAFLSGEQKKAIVDLLFKTNRKVTVKQLKEDYFKKIECFDSVEISGVEDRFNASLGTYHDLLKIIKDKDFLDNEENEDILEDIVLTLTLFEDREMIEERLKTYAHLFDDKVMKQLKRRRYTGWGRLSRKLINGIRDKQSGKTILDFLKSDGFANRNFMQLIHDDSLTFKEDIQKAQVSGQGDSLHEHIANLAGSPAIKKGILQTVKVVDELVKVMGRHKPENIVIEMARENQTTQKGQKNSRERMKRIEEGIKELGSQILKEHPVENTQLQNEKLYLYYLQNGRDMYVDQELDINRLSDYDVDHIVPQSFLKDDSIDNKVLTRSDKARGKSDNVPSEEVVKKMKNYWRQLLNAKLITQRKFDNLTKAERGGLSELDKAGFIKRQLVETRQITKHVAQILDSRMNTKYDENDKLIREVKVITLKSKLVSDFRKDFQFYKVREINNYHHAHDAYLNAVVGTALIKKYPKLESEFVYGDYKVYDVRKMIAKSEQEIGKATAKYFFYSNIMNFFKTEITLANGEIRKRPLIETNGETGEIVWDKGRDFATVRKVLSMPQVNIVKKTEVQTGGFSKESILPKRNSDKLIARKKDWDPKKYGGFDSPTVAYSVLVVAKVEKGKSKKLKSVKELLGITIMERSSFEKNPIDFLEAKGYKEVKKDLIIKLPKYSLFELENGRKRMLASAGELQKGNELALPSKYVNFLYLASHYEKLKGSPEDNEQKQLFVEQHKHYLDEIIEQISEFSKRVILADANLDKVLSAYNKHRDKPIREQAENIIHLFTLTNLGAPAAFKYFDTTIDRKRYTSTKEVLDATLIHQSITGLYETRIDLSQLGGDGGPAPGGGGGSGGTLNIEDEYRLHETSKEPDVSLGSTWLSDFPQAWAETGGMGLAVRQAPLIIPLKATSTPVSIKQYPMSQEARLGIKPHIQRLLDQGILVPCQSPWNTPLLPVKKPGTNDYRPVQDLREVNKRVEDIHPTVPNPYNLLSGLPPSHQWYTVLDLKDAFFCLRLHPTSQPLFAFEWRDPEMGISGQLTWTRLPQGFKNSPTLFNEALHRDLAGFRIQHPDLILLQYVDDLLLAATSELDCQQGTRALLQTLGDLGYRASAKKAQICQKQVKYLGYLLKEGQRWLTEARKETVMGQPIPKTPRQLREFLGKAGFCRLFIPGFAEMAAPLYPLTKPGTLFNWGPDQQKAFQEIKQALLTAPALGLPDLTKPFELFVDEKQGYAKGVLTQKLGPWRRPVAYLSKKLDPVAAGWPPCLRMVAAIAVLTKDAGKLTMGQPLVILAPHAVEALVKQPPDRWLSNARMTHYQALLLDTDRVQFGPVVALNPATLLPLPEEGLQHDCLDILAEAHGTRSDLMDQPLPDADHTWYTDGSSFLQEGQRKAGAAVTTETEVIWARALPAGTSAQRAELIALTQALKMAEGKKLNVYTDSRYAFATAHIHGEIYRRRGWLTSEGKEIKNKDEILALLKALFLPKRLSIIHCPGHQKGNSAEARGNRMADQAAREVATRETPETSTLLAGKRTADGSEFEKRTADGSEFESPKKKAKVE

SEQ ID NO: 2402 - protein, 2094 aa, synthetic construct
MPAAKRVKLDGGDKKYSIGLDIGTNSVGWAVITDEYKVPSKKFKVLGNTDRHSIKKNLIGALLFDSGETAEATRLKRTARRRYTRRKNRICYLQEIFSNEMAKVDDSFFHRLEESFLVEEDKKHERHPIFGNIVDEVAYHEKYPTIYHLRKKLVDSTDKADLRLIYLALAHMIKFRGHFLIEGDLNPDNSDVDKLFIQLVQTYNQLFEENPINASGVDAKAILSARLSKSRRLENLIAQLPGEKKNGLFGNLIALSLGLTPNFKSNFDLAEDAKLQLSKDTYDDDLDNLLAQIGDQYADLFLAAKNLSDAILLSDILRVNTEITKAPLSASMIKRYDEHHQDLTLLKALVRQQLPEKYKEIFFDQSKNGYAGYIDGGASQEEFYKFIKPILEKMDGTEELLVKLNREDLLRKQRTFDNGSIPHQIHLGELHAILRRQEDFYPFLKDNREKIEKILTFRIPYYVGPLARGNSRFAWMTRKSEETITPWNFEEVVDKGASAQSFIERMTNFDKNLPNEKVLPKHSLLYEYFTVYNELTKVKYVTEGMRKPAFLSGEQKKAIVDLLFKTNRKVTVKQLKEDYFKKIECFDSVEISGVEDRFNASLGTYHDLLKIIKDKDFLDNEENEDILEDIVLTLTLFEDREMIEERLKTYAHLFDDKVMKQLKRRRYTGWGRLSRKLINGIRDKQSGKTILDFLKSDGFANRNFMQLIHDDSLTFKEDIQKAQVSGQGDSLHEHIANLAGSPAIKKGILQTVKVVDELVKVMGRHKPENIVIEMARENQTTQKGQKNSRERMKRIEEGIKELGSQILKEHPVENTQLQNEKLYLYYLQNGRDMYVDQELDINRLSDYDVDHIVPQSFLKDDSIDNKVLTRSDKARGKSDNVPSEEVVKKMKNYWRQLLNAKLITQRKFDNLTKAERGGLSELDKAGFIKRQLVETRQITKHVAQILDSRMNTKYDENDKLIREVKVITLKSKLVSDFRKDFQFYKVREINNYHHAHDAYLNAVVGTALIKKYPKLESEFVYGDYKVYDVRKMIAKSEQEIGKATAKYFFYSNIMNFFKTEITLANGEIRKRPLIETNGETGEIVWDKGRDFATVRKVLSMPQVNIVKKTEVQTGGFSKESILPKRNSDKLIARKKDWDPKKYGGFDSPTVAYSVLVVAKVEKGKSKKLKSVKELLGITIMERSSFEKNPIDFLEAKGYKEVKKDLIIKLPKYSLFELENGRKRMLASAGELQKGNELALPSKYVNFLYLASHYEKLKGSPEDNEQKQLFVEQHKHYLDEIIEQISEFSKRVILADANLDKVLSAYNKHRDKPIREQAENIIHLFTLTNLGAPAAFKYFDTTIDRKRYTSTKEVLDATLIHQSITGLYETRIDLSQLGGDGGGSSGGGPAPGGTLNIEDEYRLHETSKEPDVSLGSTWLSDFPQAWAETGGMGLAVRQAPLIIPLKATSTPVSIKQYPMSQEARLGIKPHIQRLLDQGILVPCQSPWNTPLLPVKKPGTNDYRPVQDLREVNKRVEDIHPTVPNPYNLLSGLPPSHQWYTVLDLKDAFFCLRLHPTSQPLFAFEWRDPEMGISGQLTWTRLPQGFKNSPTLFNEALHRDLAGFRIQHPDLILLQYVDDLLLAATSELDCQQGTRALLQTLGDLGYRASAKKAQICQKQVKYLGYLLKEGQRWLTEARKETVMGQPIPKTPRQLREFLGKAGFCRLFIPGFAEMAAPLYPLTKPGTLFNWGPDQQKAFQEIKQALLTAPALGLPDLTKPFELFVDEKQGYAKGVLTQKLGPWRRPVAYLSKKLDPVAAGWPPCLRMVAAIAVLTKDAGKLTMGQPLVILAPHAVEALVKQPPDRWLSNARMTHYQALLLDTDRVQFGPVVALNPATLLPLPEEGLQHDCLDILAEAHGTRSDLMDQPLPDADHTWYTDGSSFLQEGQRKAGAAVTTETEVIWARALPAGTSAQRAELIALTQALKMAEGKKLNVYTDSRYAFATAHIHGEIYRRRGWLTSEGKEIKNKDEILALLKALFLPKRLSIIHCPGHQKGNSAEARGNRMADQAAREVATRETPETSTLLAGKRTADGSEFEKRTADGSEFESPKKKAKVE

SEQ ID NO: 2403 - protein, 2094 aa, synthetic construct
MPAAKRVKLDGGDKKYSIGLDIGTNSVGWAVITDEYKVPSKKFKVLGNTDRHSIKKNLIGALLFDSGETAEATRLKRTARRRYTRRKNRICYLQEIFSNEMAKVDDSFFHRLEESFLVEEDKKHERHPIFGNIVDEVAYHEKYPTIYHLRKKLVDSTDKADLRLIYLALAHMIKFRGHFLIEGDLNPDNSDVDKLFIQLVQTYNQLFEENPINASGVDAKAILSARLSKSRRLENLIAQLPGEKKNGLFGNLIALSLGLTPNFKSNFDLAEDAKLQLSKDTYDDDLDNLLAQIGDQYADLFLAAKNLSDAILLSDILRVNTEITKAPLSASMIKRYDEHHQDLTLLKALVRQQLPEKYKEIFFDQSKNGYAGYIDGGASQEEFYKFIKPILEKMDGTEELLVKLNREDLLRKQRTFDNGSIPHQIHLGELHAILRRQEDFYPFLKDNREKIEKILTFRIPYYVGPLARGNSRFAWMTRKSEETITPWNFEEVVDKGASAQSFIERMTNFDKNLPNEKVLPKHSLLYEYFTVYNELTKVKYVTEGMRKPAFLSGEQKKAIVDLLFKTNRKVTVKQLKEDYFKKIECFDSVEISGVEDRFNASLGTYHDLLKIIKDKDFLDNEENEDILEDIVLTLTLFEDREMIEERLKTYAHLFDDKVMKQLKRRRYTGWGRLSRKLINGIRDKQSGKTILDFLKSDGFANRNFMQLIHDDSLTFKEDIQKAQVSGQGDSLHEHIANLAGSPAIKKGILQTVKVVDELVKVMGRHKPENIVIEMARENQTTQKGQKNSRERMKRIEEGIKELGSQILKEHPVENTQLQNEKLYLYYLQNGRDMYVDQELDINRLSDYDVDHIVPQSFLKDDSIDNKVLTRSDKARGKSDNVPSEEVVKKMKNYWRQLLNAKLITQRKFDNLTKAERGGLSELDKAGFIKRQLVETRQITKHVAQILDSRMNTKYDENDKLIREVKVITLKSKLVSDFRKDFQFYKVREINNYHHAHDAYLNAVVGTALIKKYPKLESEFVYGDYKVYDVRKMIAKSEQEIGKATAKYFFYSNIMNFFKTEITLANGEIRKRPLIETNGETGEIVWDKGRDFATVRKVLSMPQVNIVKKTEVQTGGFSKESILPKRNSDKLIARKKDWDPKKYGGFDSPTVAYSVLVVAKVEKGKSKKLKSVKELLGITIMERSSFEKNPIDFLEAKGYKEVKKDLIIKLPKYSLFELENGRKRMLASAGELQKGNELALPSKYVNFLYLASHYEKLKGSPEDNEQKQLFVEQHKHYLDEIIEQISEFSKRVILADANLDKVLSAYNKHRDKPIREQAENIIHLFTLTNLGAPAAFKYFDTTIDRKRYTSTKEVLDATLIHQSITGLYETRIDLSQLGGDGGPAPGGSGGGGGTLNIEDEYRLHETSKEPDVSLGSTWLSDFPQAWAETGGMGLAVRQAPLIIPLKATSTPVSIKQYPMSQEARLGIKPHIQRLLDQGILVPCQSPWNTPLLPVKKPGTNDYRPVQDLREVNKRVEDIHPTVPNPYNLLSGLPPSHQWYTVLDLKDAFFCLRLHPTSQPLFAFEWRDPEMGISGQLTWTRLPQGFKNSPTLFNEALHRDLAGFRIQHPDLILLQYVDDLLLAATSELDCQQGTRALLQTLGDLGYRASAKKAQICQKQVKYLGYLLKEGQRWLTEARKETVMGQPIPKTPRQLREFLGKAGFCRLFIPGFAEMAAPLYPLTKPGTLFNWGPDQQKAFQEIKQALLTAPALGLPDLTKPFELFVDEKQGYAKGVLTQKLGPWRRPVAYLSKKLDPVAAGWPPCLRMVAAIAVLTKDAGKLTMGQPLVILAPHAVEALVKQPPDRWLSNARMTHYQALLLDTDRVQFGPVVALNPATLLPLPEEGLQHDCLDILAEAHGTRSDLMDQPLPDADHTWYTDGSSFLQEGQRKAGAAVTTETEVIWARALPAGTSAQRAELIALTQALKMAEGKKLNVYTDSRYAFATAHIHGEIYRRRGWLTSEGKEIKNKDEILALLKALFLPKRLSIIHCPGHQKGNSAEARGNRMADQAAREVATRETPETSTLLAGKRTADGSEFEKRTADGSEFESPKKKAKVE

SEQ ID NO: 2404 - protein, 2096 aa, synthetic construct
MPAAKRVKLDGGDKKYSIGLDIGTNSVGWAVITDEYKVPSKKFKVLGNTDRHSIKKNLIGALLFDSGETAEATRLKRTARRRYTRRKNRICYLQEIFSNEMAKVDDSFFHRLEESFLVEEDKKHERHPIFGNIVDEVAYHEKYPTIYHLRKKLVDSTDKADLRLIYLALAHMIKFRGHFLIEGDLNPDNSDVDKLFIQLVQTYNQLFEENPINASGVDAKAILSARLSKSRRLENLIAQLPGEKKNGLFGNLIALSLGLTPNFKSNFDLAEDAKLQLSKDTYDDDLDNLLAQIGDQYADLFLAAKNLSDAILLSDILRVNTEITKAPLSASMIKRYDEHHQDLTLLKALVRQQLPEKYKEIFFDQSKNGYAGYIDGGASQEEFYKFIKPILEKMDGTEELLVKLNREDLLRKQRTFDNGSIPHQIHLGELHAILRRQEDFYPFLKDNREKIEKILTFRIPYYVGPLARGNSRFAWMTRKSEETITPWNFEEVVDKGASAQSFIERMTNFDKNLPNEKVLPKHSLLYEYFTVYNELTKVKYVTEGMRKPAFLSGEQKKAIVDLLFKTNRKVTVKQLKEDYFKKIECFDSVEISGVEDRFNASLGTYHDLLKIIKDKDFLDNEENEDILEDIVLTLTLFEDREMIEERLKTYAHLFDDKVMKQLKRRRYTGWGRLSRKLINGIRDKQSGKTILDFLKSDGFANRNFMQLIHDDSLTFKEDIQKAQVSGQGDSLHEHIANLAGSPAIKKGILQTVKVVDELVKVMGRHKPENIVIEMARENQTTQKGQKNSRERMKRIEEGIKELGSQILKEHPVENTQLQNEKLYLYYLQNGRDMYVDQELDINRLSDYDVDHIVPQSFLKDDSIDNKVLTRSDKARGKSDNVPSEEVVKKMKNYWRQLLNAKLITQRKFDNLTKAERGGLSELDKAGFIKRQLVETRQITKHVAQILDSRMNTKYDENDKLIREVKVITLKSKLVSDFRKDFQFYKVREINNYHHAHDAYLNAVVGTALIKKYPKLESEFVYGDYKVYDVRKMIAKSEQEIGKATAKYFFYSNIMNFFKTEITLANGEIRKRPLIETNGETGEIVWDKGRDFATVRKVLSMPQVNIVKKTEVQTGGFSKESILPKRNSDKLIARKKDWDPKKYGGFDSPTVAYSVLVVAKVEKGKSKKLKSVKELLGITIMERSSFEKNPIDFLEAKGYKEVKKDLIIKLPKYSLFELENGRKRMLASAGELQKGNELALPSKYVNFLYLASHYEKLKGSPEDNEQKQLFVEQHKHYLDEIIEQISEFSKRVILADANLDKVLSAYNKHRDKPIREQAENIIHLFTLTNLGAPAAFKYFDTTIDRKRYTSTKEVLDATLIHQSITGLYETRIDLSQLGGDGGGGSGSSEAAAKGGTLNIEDEYRLHETSKEPDVSLGSTWLSDFPQAWAETGGMGLAVRQAPLIIPLKATSTPVSIKQYPMSQEARLGIKPHIQRLLDQGILVPCQSPWNTPLLPVKKPGTNDYRPVQDLREVNKRVEDIHPTVPNPYNLLSGLPPSHQWYTVLDLKDAFFCLRLHPTSQPLFAFEWRDPEMGISGQLTWTRLPQGFKNSPTLFNEALHRDLAGFRIQHPDLILLQYVDDLLLAATSELDCQQGTRALLQTLGDLGYRASAKKAQICQKQVKYLGYLLKEGQRWLTEARKETVMGQPIPKTPRQLREFLGKAGFCRLFIPGFAEMAAPLYPLTKPGTLFNWGPDQQKAFQEIKQALLTAPALGLPDLTKPFELFVDEKQGYAKGVLTQKLGPWRRPVAYLSKKLDPVAAGWPPCLRMVAAIAVLTKDAGKLTMGQPLVILAPHAVEALVKQPPDRWLSNARMTHYQALLLDTDRVQFGPVVALNPATLLPLPEEGLQHDCLDILAEAHGTRSDLMDQPLPDADHTWYTDGSSFLQEGQRKAGAAVTTETEVIWARALPAGTSAQRAELIALTQALKMAEGKKLNVYTDSRYAFATAHIHGEIYRRRGWLTSEGKEIKNKDEILALLKALFLPKRLSIIHCPGHQKGNSAEARGNRMADQAAREVATRETPETSTLLAGKRTADGSEFEKRTADGSEFESPKKKAKVE

SEQ ID NO: 2405 - protein, 2100 aa, synthetic construct
MPAAKRVKLDGGDKKYSIGLDIGTNSVGWAVITDEYKVPSKKFKVLGNTDRHSIKKNLIGALLFDSGETAEATRLKRTARRRYTRRKNRICYLQEIFSNEMAKVDDSFFHRLEESFLVEEDKKHERHPIFGNIVDEVAYHEKYPTIYHLRKKLVDSTDKADLRLIYLALAHMIKFRGHFLIEGDLNPDNSDVDKLFIQLVQTYNQLFEENPINASGVDAKAILSARLSKSRRLENLIAQLPGEKKNGLFGNLIALSLGLTPNFKSNFDLAEDAKLQLSKDTYDDDLDNLLAQIGDQYADLFLAAKNLSDAILLSDILRVNTEITKAPLSASMIKRYDEHHQDLTLLKALVRQQLPEKYKEIFFDQSKNGYAGYIDGGASQEEFYKFIKPILEKMDGTEELLVKLNREDLLRKQRTFDNGSIPHQIHLGELHAILRRQEDFYPFLKDNREKIEKILTFRIPYYVGPLARGNSRFAWMTRKSEETITPWNFEEVVDKGASAQSFIERMTNFDKNLPNEKVLPKHSLLYEYFTVYNELTKVKYVTEGMRKPAFLSGEQKKAIVDLLFKTNRKVTVKQLKEDYFKKIECFDSVEISGVEDRFNASLGTYHDLLKIIKDKDFLDNEENEDILEDIVLTLTLFEDREMIEERLKTYAHLFDDKVMKQLKRRRYTGWGRLSRKLINGIRDKQSGKTILDFLKSDGFANRNFMQLIHDDSLTFKEDIQKAQVSGQGDSLHEHIANLAGSPAIKKGILQTVKVVDELVKVMGRHKPENIVIEMARENQTTQKGQKNSRERMKRIEEGIKELGSQILKEHPVENTQLQNEKLYLYYLQNGRDMYVDQELDINRLSDYDVDHIVPQSFLKDDSIDNKVLTRSDKARGKSDNVPSEEVVKKMKNYWRQLLNAKLITQRKFDNLTKAERGGLSELDKAGFIKRQLVETRQITKHVAQILDSRMNTKYDENDKLIREVKVITLKSKLVSDFRKDFQFYKVREINNYHHAHDAYLNAVVGTALIKKYPKLESEFVYGDYKVYDVRKMIAKSEQEIGKATAKYFFYSNIMNFFKTEITLANGEIRKRPLIETNGETGEIVWDKGRDFATVRKVLSMPQVNIVKKTEVQTGGFSKESILPKRNSDKLIARKKDWDPKKYGGFDSPTVAYSVLVVAKVEKGKSKKLKSVKELLGITIMERSSFEKNPIDFLEAKGYKEVKKDLIIKLPKYSLFELENGRKRMLASAGELQKGNELALPSKYVNFLYLASHYEKLKGSPEDNEQKQLFVEQHKHYLDEIIEQISEFSKRVILADANLDKVLSAYNKHRDKPIREQAENIIHLFTLTNLGAPAAFKYFDTTIDRKRYTSTKEVLDATLIHQSITGLYETRIDLSQLGGDGGGSSGSSGSSGSSGSSGGTLNIEDEYRLHETSKEPDVSLGSTWLSDFPQAWAETGGMGLAVRQAPLIIPLKATSTPVSIKQYPMSQEARLGIKPHIQRLLDQGILVPCQSPWNTPLLPVKKPGTNDYRPVQDLREVNKRVEDIHPTVPNPYNLLSGLPPSHQWYTVLDLKDAFFCLRLHPTSQPLFAFEWRDPEMGISGQLTWTRLPQGFKNSPTLFNEALHRDLAGFRIQHPDLILLQYVDDLLLAATSELDCQQGTRALLQTLGDLGYRASAKKAQICQKQVKYLGYLLKEGQRWLTEARKETVMGQPIPKTPRQLREFLGKAGFCRLFIPGFAEMAAPLYPLTKPGTLFNWGPDQQKAFQEIKQALLTAPALGLPDLTKPFELFVDEKQGYAKGVLTQKLGPWRRPVAYLSKKLDPVAAGWPPCLRMVAAIAVLTKDAGKLTMGQPLVILAPHAVEALVKQPPDRWLSNARMTHYQALLLDTDRVQFGPVVALNPATLLPLPEEGLQHDCLDILAEAHGTRSDLMDQPLPDADHTWYTDGSSFLQEGQRKAGAAVTTETEVIWARALPAGTSAQRAELIALTQALKMAEGKKLNVYTDSRYAFATAHIHGEIYRRRGWLTSEGKEIKNKDEILALLKALFLPKRLSIIHCPGHQKGNSAEARGNRMADQAAREVATRETPETSTLLAGKRTADGSEFEKRTADGSEFESPKKKAKVE

SEQ ID NO: 2406 - protein, 2091 aa, synthetic construct
MPAAKRVKLDGGDKKYSIGLDIGTNSVGWAVITDEYKVPSKKFKVLGNTDRHSIKKNLIGALLFDSGETAEATRLKRTARRRYTRRKNRICYLQEIFSNEMAKVDDSFFHRLEESFLVEEDKKHERHPIFGNIVDEVAYHEKYPTIYHLRKKLVDSTDKADLRLIYLALAHMIKFRGHFLIEGDLNPDNSDVDKLFIQLVQTYNQLFEENPINASGVDAKAILSARLSKSRRLENLIAQLPGEKKNGLFGNLIALSLGLTPNFKSNFDLAEDAKLQLSKDTYDDDLDNLLAQIGDQYADLFLAAKNLSDAILLSDILRVNTEITKAPLSASMIKRYDEHHQDLTLLKALVRQQLPEKYKEIFFDQSKNGYAGYIDGGASQEEFYKFIKPILEKMDGTEELLVKLNREDLLRKQRTFDNGSIPHQIHLGELHAILRRQEDFYPFLKDNREKIEKILTFRIPYYVGPLARGNSRFAWMTRKSEETITPWNFEEVVDKGASAQSFIERMTNFDKNLPNEKVLPKHSLLYEYFTVYNELTKVKYVTEGMRKPAFLSGEQKKAIVDLLFKTNRKVTVKQLKEDYFKKIECFDSVEISGVEDRFNASLGTYHDLLKIIKDKDFLDNEENEDILEDIVLTLTLFEDREMIEERLKTYAHLFDDKVMKQLKRRRYTGWGRLSRKLINGIRDKQSGKTILDFLKSDGFANRNFMQLIHDDSLTFKEDIQKAQVSGQGDSLHEHIANLAGSPAIKKGILQTVKVVDELVKVMGRHKPENIVIEMARENQTTQKGQKNSRERMKRIEEGIKELGSQILKEHPVENTQLQNEKLYLYYLQNGRDMYVDQELDINRLSDYDVDHIVPQSFLKDDSIDNKVLTRSDKARGKSDNVPSEEVVKKMKNYWRQLLNAKLITQRKFDNLTKAERGGLSELDKAGFIKRQLVETRQITKHVAQILDSRMNTKYDENDKLIREVKVITLKSKLVSDFRKDFQFYKVREINNYHHAHDAYLNAVVGTALIKKYPKLESEFVYGDYKVYDVRKMIAKSEQEIGKATAKYFFYSNIMNFFKTEITLANGEIRKRPLIETNGETGEIVWDKGRDFATVRKVLSMPQVNIVKKTEVQTGGFSKESILPKRNSDKLIARKKDWDPKKYGGFDSPTVAYSVLVVAKVEKGKSKKLKSVKELLGITIMERSSFEKNPIDFLEAKGYKEVKKDLIIKLPKYSLFELENGRKRMLASAGELQKGNELALPSKYVNFLYLASHYEKLKGSPEDNEQKQLFVEQHKHYLDEIIEQISEFSKRVILADANLDKVLSAYNKHRDKPIREQAENIIHLFTLTNLGAPAAFKYFDTTIDRKRYTSTKEVLDATLIHQSITGLYETRIDLSQLGGDGGGSSGGSGGTLNIEDEYRLHETSKEPDVSLGSTWLSDFPQAWAETGGMGLAVRQAPLIIPLKATSTPVSIKQYPMSQEARLGIKPHIQRLLDQGILVPCQSPWNTPLLPVKKPGTNDYRPVQDLREVNKRVEDIHPTVPNPYNLLSGLPPSHQWYTVLDLKDAFFCLRLHPTSQPLFAFEWRDPEMGISGQLTWTRLPQGFKNSPTLFNEALHRDLAGFRIQHPDLILLQYVDDLLLAATSELDCQQGTRALLQTLGDLGYRASAKKAQICQKQVKYLGYLLKEGQRWLTEARKETVMGQPIPKTPRQLREFLGKAGFCRLFIPGFAEMAAPLYPLTKPGTLFNWGPDQQKAFQEIKQALLTAPALGLPDLTKPFELFVDEKQGYAKGVLTQKLGPWRRPVAYLSKKLDPVAAGWPPCLRMVAAIAVLTKDAGKLTMGQPLVILAPHAVEALVKQPPDRWLSNARMTHYQALLLDTDRVQFGPVVALNPATLLPLPEEGLQHDCLDILAEAHGTRSDLMDQPLPDADHTWYTDGSSFLQEGQRKAGAAVTTETEVIWARALPAGTSAQRAELIALTQALKMAEGKKLNVYTDSRYAFATAHIHGEIYRRRGWLTSEGKEIKNKDEILALLKALFLPKRLSIIHCPGHQKGNSAEARGNRMADQAAREVATRETPETSTLLAGKRTADGSEFEKRTADGSEFESPKKKAKVE

SEQ ID NO: 2407 - protein, 2094 aa, synthetic construct
MPAAKRVKLDGGDKKYSIGLDIGTNSVGWAVITDEYKVPSKKFKVLGNTDRHSIKKNLIGALLFDSGETAEATRLKRTARRRYTRRKNRICYLQEIFSNEMAKVDDSFFHRLEESFLVEEDKKHERHPIFGNIVDEVAYHEKYPTIYHLRKKLVDSTDKADLRLIYLALAHMIKFRGHFLIEGDLNPDNSDVDKLFIQLVQTYNQLFEENPINASGVDAKAILSARLSKSRRLENLIAQLPGEKKNGLFGNLIALSLGLTPNFKSNFDLAEDAKLQLSKDTYDDDLDNLLAQIGDQYADLFLAAKNLSDAILLSDILRVNTEITKAPLSASMIKRYDEHHQDLTLLKALVRQQLPEKYKEIFFDQSKNGYAGYIDGGASQEEFYKFIKPILEKMDGTEELLVKLNREDLLRKQRTFDNGSIPHQIHLGELHAILRRQEDFYPFLKDNREKIEKILTFRIPYYVGPLARGNSRFAWMTRKSEETITPWNFEEVVDKGASAQSFIERMTNFDKNLPNEKVLPKHSLLYEYFTVYNELTKVKYVTEGMRKPAFLSGEQKKAIVDLLFKTNRKVTVKQLKEDYFKKIECFDSVEISGVEDRFNASLGTYHDLLKIIKDKDFLDNEENEDILEDIVLTLTLFEDREMIEERLKTYAHLFDDKVMKQLKRRRYTGWGRLSRKLINGIRDKQSGKTILDFLKSDGFANRNFMQLIHDDSLTFKEDIQKAQVSGQGDSLHEHIANLAGSPAIKKGILQTVKVVDELVKVMGRHKPENIVIEMARENQTTQKGQKNSRERMKRIEEGIKELGSQILKEHPVENTQLQNEKLYLYYLQNGRDMYVDQELDINRLSDYDVDHIVPQSFLKDDSIDNKVLTRSDKARGKSDNVPSEEVVKKMKNYWRQLLNAKLITQRKFDNLTKAERGGLSELDKAGFIKRQLVETRQITKHVAQILDSRMNTKYDENDKLIREVKVITLKSKLVSDFRKDFQFYKVREINNYHHAHDAYLNAVVGTALIKKYPKLESEFVYGDYKVYDVRKMIAKSEQEIGKATAKYFFYSNIMNFFKTEITLANGEIRKRPLIETNGETGEIVWDKGRDFATVRKVLSMPQVNIVKKTEVQTGGFSKESILPKRNSDKLIARKKDWDPKKYGGFDSPTVAYSVLVVAKVEKGKSKKLKSVKELLGITIMERSSFEKNPIDFLEAKGYKEVKKDLIIKLPKYSLFELENGRKRMLASAGELQKGNELALPSKYVNFLYLASHYEKLKGSPEDNEQKQLFVEQHKHYLDEIIEQISEFSKRVILADANLDKVLSAYNKHRDKPIREQAENIIHLFTLTNLGAPAAFKYFDTTIDRKRYTSTKEVLDATLIHQSITGLYETRIDLSQLGGDGGGSSPAPGGSGGTLNIEDEYRLHETSKEPDVSLGSTWLSDFPQAWAETGGMGLAVRQAPLIIPLKATSTPVSIKQYPMSQEARLGIKPHIQRLLDQGILVPCQSPWNTPLLPVKKPGTNDYRPVQDLREVNKRVEDIHPTVPNPYNLLSGLPPSHQWYTVLDLKDAFFCLRLHPTSQPLFAFEWRDPEMGISGQLTWTRLPQGFKNSPTLFNEALHRDLAGFRIQHPDLILLQYVDDLLLAATSELDCQQGTRALLQTLGDLGYRASAKKAQICQKQVKYLGYLLKEGQRWLTEARKETVMGQPIPKTPRQLREFLGKAGFCRLFIPGFAEMAAPLYPLTKPGTLFNWGPDQQKAFQEIKQALLTAPALGLPDLTKPFELFVDEKQGYAKGVLTQKLGPWRRPVAYLSKKLDPVAAGWPPCLRMVAAIAVLTKDAGKLTMGQPLVILAPHAVEALVKQPPDRWLSNARMTHYQALLLDTDRVQFGPVVALNPATLLPLPEEGLQHDCLDILAEAHGTRSDLMDQPLPDADHTWYTDGSSFLQEGQRKAGAAVTTETEVIWARALPAGTSAQRAELIALTQALKMAEGKKLNVYTDSRYAFATAHIHGEIYRRRGWLTSEGKEIKNKDEILALLKALFLPKRLSIIHCPGHQKGNSAEARGNRMADQAAREVATRETPETSTLLAGKRTADGSEFEKRTADGSEFESPKKKAKVE

SEQ ID NO: 2408 - protein, 2096 aa, synthetic construct
MPAAKRVKLDGGDKKYSIGLDIGTNSVGWAVITDEYKVPSKKFKVLGNTDRHSIKKNLIGALLFDSGETAEATRLKRTARRRYTRRKNRICYLQEIFSNEMAKVDDSFFHRLEESFLVEEDKKHERHPIFGNIVDEVAYHEKYPTIYHLRKKLVDSTDKADLRLIYLALAHMIKFRGHFLIEGDLNPDNSDVDKLFIQLVQTYNQLFEENPINASGVDAKAILSARLSKSRRLENLIAQLPGEKKNGLFGNLIALSLGLTPNFKSNFDLAEDAKLQLSKDTYDDDLDNLLAQIGDQYADLFLAAKNLSDAILLSDILRVNTEITKAPLSASMIKRYDEHHQDLTLLKALVRQQLPEKYKEIFFDQSKNGYAGYIDGGASQEEFYKFIKPILEKMDGTEELLVKLNREDLLRKQRTFDNGSIPHQIHLGELHAILRRQEDFYPFLKDNREKIEKILTFRIPYYVGPLARGNSRFAWMTRKSEETITPWNFEEVVDKGASAQSFIERMTNFDKNLPNEKVLPKHSLLYEYFTVYNELTKVKYVTEGMRKPAFLSGEQKKAIVDLLFKTNRKVTVKQLKEDYFKKIECFDSVEISGVEDRFNASLGTYHDLLKIIKDKDFLDNEENEDILEDIVLTLTLFEDREMIEERLKTYAHLFDDKVMKQLKRRRYTGWGRLSRKLINGIRDKQSGKTILDFLKSDGFANRNFMQLIHDDSLTFKEDIQKAQVSGQGDSLHEHIANLAGSPAIKKGILQTVKVVDELVKVMGRHKPENIVIEMARENQTTQKGQKNSRERMKRIEEGIKELGSQILKEHPVENTQLQNEKLYLYYLQNGRDMYVDQELDINRLSDYDVDHIVPQSFLKDDSIDNKVLTRSDKARGKSDNVPSEEVVKKMKNYWRQLLNAKLITQRKFDNLTKAERGGLSELDKAGFIKRQLVETRQITKHVAQILDSRMNTKYDENDKLIREVKVITLKSKLVSDFRKDFQFYKVREINNYHHAHDAYLNAVVGTALIKKYPKLESEFVYGDYKVYDVRKMIAKSEQEIGKATAKYFFYSNIMNFFKTEITLANGEIRKRPLIETNGETGEIVWDKGRDFATVRKVLSMPQVNIVKKTEVQTGGFSKESILPKRNSDKLIARKKDWDPKKYGGFDSPTVAYSVLVVAKVEKGKSKKLKSVKELLGITIMERSSFEKNPIDFLEAKGYKEVKKDLIIKLPKYSLFELENGRKRMLASAGELQKGNELALPSKYVNFLYLASHYEKLKGSPEDNEQKQLFVEQHKHYLDEIIEQISEFSKRVILADANLDKVLSAYNKHRDKPIREQAENIIHLFTLTNLGAPAAFKYFDTTIDRKRYTSTKEVLDATLIHQSITGLYETRIDLSQLGGDGGGGSEAAAKGSSGGTLNIEDEYRLHETSKEPDVSLGSTWLSDFPQAWAETGGMGLAVRQAPLIIPLKATSTPVSIKQYPMSQEARLGIKPHIQRLLDQGILVPCQSPWNTPLLPVKKPGTNDYRPVQDLREVNKRVEDIHPTVPNPYNLLSGLPPSHQWYTVLDLKDAFFCLRLHPTSQPLFAFEWRDPEMGISGQLTWTRLPQGFKNSPTLFNEALHRDLAGFRIQHPDLILLQYVDDLLLAATSELDCQQGTRALLQTLGDLGYRASAKKAQICQKQVKYLGYLLKEGQRWLTEARKETVMGQPIPKTPRQLREFLGKAGFCRLFIPGFAEMAAPLYPLTKPGTLFNWGPDQQKAFQEIKQALLTAPALGLPDLTKPFELFVDEKQGYAKGVLTQKLGPWRRPVAYLSKKLDPVAAGWPPCLRMVAAIAVLTKDAGKLTMGQPLVILAPHAVEALVKQPPDRWLSNARMTHYQALLLDTDRVQFGPVVALNPATLLPLPEEGLQHDCLDILAEAHGTRSDLMDQPLPDADHTWYTDGSSFLQEGQRKAGAAVTTETEVIWARALPAGTSAQRAELIALTQALKMAEGKKLNVYTDSRYAFATAHIHGEIYRRRGWLTSEGKEIKNKDEILALLKALFLPKRLSIIHCPGHQKGNSAEARGNRMADQAAREVATRETPETSTLLAGKRTADGSEFEKRTADGSEFESPKKKAKVE

SEQ ID NO: 2409 - protein, 2094 aa, synthetic construct
MPAAKRVKLDGGDKKYSIGLDIGTNSVGWAVITDEYKVPSKKFKVLGNTDRHSIKKNLIGALLFDSGETAEATRLKRTARRRYTRRKNRICYLQEIFSNEMAKVDDSFFHRLEESFLVEEDKKHERHPIFGNIVDEVAYHEKYPTIYHLRKKLVDSTDKADLRLIYLALAHMIKFRGHFLIEGDLNPDNSDVDKLFIQLVQTYNQLFEENPINASGVDAKAILSARLSKSRRLENLIAQLPGEKKNGLFGNLIALSLGLTPNFKSNFDLAEDAKLQLSKDTYDDDLDNLLAQIGDQYADLFLAAKNLSDAILLSDILRVNTEITKAPLSASMIKRYDEHHQDLTLLKALVRQQLPEKYKEIFFDQSKNGYAGYIDGGASQEEFYKFIKPILEKMDGTEELLVKLNREDLLRKQRTFDNGSIPHQIHLGELHAILRRQEDFYPFLKDNREKIEKILTFRIPYYVGPLARGNSRFAWMTRKSEETITPWNFEEVVDKGASAQSFIERMTNFDKNLPNEKVLPKHSLLYEYFTVYNELTKVKYVTEGMRKPAFLSGEQKKAIVDLLFKTNRKVTVKQLKEDYFKKIECFDSVEISGVEDRFNASLGTYHDLLKIIKDKDFLDNEENEDILEDIVLTLTLFEDREMIEERLKTYAHLFDDKVMKQLKRRRYTGWGRLSRKLINGIRDKQSGKTILDFLKSDGFANRNFMQLIHDDSLTFKEDIQKAQVSGQGDSLHEHIANLAGSPAIKKGILQTVKVVDELVKVMGRHKPENIVIEMARENQTTQKGQKNSRERMKRIEEGIKELGSQILKEHPVENTQLQNEKLYLYYLQNGRDMYVDQELDINRLSDYDVDHIVPQSFLKDDSIDNKVLTRSDKARGKSDNVPSEEVVKKMKNYWRQLLNAKLITQRKFDNLTKAERGGLSELDKAGFIKRQLVETRQITKHVAQILDSRMNTKYDENDKLIREVKVITLKSKLVSDFRKDFQFYKVREINNYHHAHDAYLNAVVGTALIKKYPKLESEFVYGDYKVYDVRKMIAKSEQEIGKATAKYFFYSNIMNFFKTEITLANGEIRKRPLIETNGETGEIVWDKGRDFATVRKVLSMPQVNIVKKTEVQTGGFSKESILPKRNSDKLIARKKDWDPKKYGGFDSPTVAYSVLVVAKVEKGKSKKLKSVKELLGITIMERSSFEKNPIDFLEAKGYKEVKKDLIIKLPKYSLFELENGRKRMLASAGELQKGNELALPSKYVNFLYLASHYEKLKGSPEDNEQKQLFVEQHKHYLDEIIEQISEFSKRVILADANLDKVLSAYNKHRDKPIREQAENIIHLFTLTNLGAPAAFKYFDTTIDRKRYTSTKEVLDATLIHQSITGLYETRIDLSQLGGDGGGGGGSSGGSGGTLNIEDEYRLHETSKEPDVSLGSTWLSDFPQAWAETGGMGLAVRQAPLIIPLKATSTPVSIKQYPMSQEARLGIKPHIQRLLDQGILVPCQSPWNTPLLPVKKPGTNDYRPVQDLREVNKRVEDIHPTVPNPYNLLSGLPPSHQWYTVLDLKDAFFCLRLHPTSQPLFAFEWRDPEMGISGQLTWTRLPQGFKNSPTLFNEALHRDLAGFRIQHPDLILLQYVDDLLLAATSELDCQQGTRALLQTLGDLGYRASAKKAQICQKQVKYLGYLLKEGQRWLTEARKETVMGQPIPKTPRQLREFLGKAGFCRLFIPGFAEMAAPLYPLTKPGTLFNWGPDQQKAFQEIKQALLTAPALGLPDLTKPFELFVDEKQGYAKGVLTQKLGPWRRPVAYLSKKLDPVAAGWPPCLRMVAAIAVLTKDAGKLTMGQPLVILAPHAVEALVKQPPDRWLSNARMTHYQALLLDTDRVQFGPVVALNPATLLPLPEEGLQHDCLDILAEAHGTRSDLMDQPLPDADHTWYTDGSSFLQEGQRKAGAAVTTETEVIWARALPAGTSAQRAELIALTQALKMAEGKKLNVYTDSRYAFATAHIHGEIYRRRGWLTSEGKEIKNKDEILALLKALFLPKRLSIIHCPGHQKGNSAEARGNRMADQAAREVATRETPETSTLLAGKRTADGSEFEKRTADGSEFESPKKKAKVE

SEQ ID NO: 2410 - protein, 2110 aa, synthetic construct
MPAAKRVKLDGGDKKYSIGLDIGTNSVGWAVITDEYKVPSKKFKVLGNTDRHSIKKNLIGALLFDSGETAEATRLKRTARRRYTRRKNRICYLQEIFSNEMAKVDDSFFHRLEESFLVEEDKKHERHPIFGNIVDEVAYHEKYPTIYHLRKKLVDSTDKADLRLIYLALAHMIKFRGHFLIEGDLNPDNSDVDKLFIQLVQTYNQLFEENPINASGVDAKAILSARLSKSRRLENLIAQLPGEKKNGLFGNLIALSLGLTPNFKSNFDLAEDAKLQLSKDTYDDDLDNLLAQIGDQYADLFLAAKNLSDAILLSDILRVNTEITKAPLSASMIKRYDEHHQDLTLLKALVRQQLPEKYKEIFFDQSKNGYAGYIDGGASQEEFYKFIKPILEKMDGTEELLVKLNREDLLRKQRTFDNGSIPHQIHLGELHAILRRQEDFYPFLKDNREKIEKILTFRIPYYVGPLARGNSRFAWMTRKSEETITPWNFEEVVDKGASAQSFIERMTNFDKNLPNEKVLPKHSLLYEYFTVYNELTKVKYVTEGMRKPAFLSGEQKKAIVDLLFKTNRKVTVKQLKEDYFKKIECFDSVEISGVEDRFNASLGTYHDLLKIIKDKDFLDNEENEDILEDIVLTLTLFEDREMIEERLKTYAHLFDDKVMKQLKRRRYTGWGRLSRKLINGIRDKQSGKTILDFLKSDGFANRNFMQLIHDDSLTFKEDIQKAQVSGQGDSLHEHIANLAGSPAIKKGILQTVKVVDELVKVMGRHKPENIVIEMARENQTTQKGQKNSRERMKRIEEGIKELGSQILKEHPVENTQLQNEKLYLYYLQNGRDMYVDQELDINRLSDYDVDHIVPQSFLKDDSIDNKVLTRSDKARGKSDNVPSEEVVKKMKNYWRQLLNAKLITQRKFDNLTKAERGGLSELDKAGFIKRQLVETRQITKHVAQILDSRMNTKYDENDKLIREVKVITLKSKLVSDFRKDFQFYKVREINNYHHAHDAYLNAVVGTALIKKYPKLESEFVYGDYKVYDVRKMIAKSEQEIGKATAKYFFYSNIMNFFKTEITLANGEIRKRPLIETNGETGEIVWDKGRDFATVRKVLSMPQVNIVKKTEVQTGGFSKESILPKRNSDKLIARKKDWDPKKYGGFDSPTVAYSVLVVAKVEKGKSKKLKSVKELLGITIMERSSFEKNPIDFLEAKGYKEVKKDLIIKLPKYSLFELENGRKRMLASAGELQKGNELALPSKYVNFLYLASHYEKLKGSPEDNEQKQLFVEQHKHYLDEIIEQISEFSKRVILADANLDKVLSAYNKHRDKPIREQAENIIHLFTLTNLGAPAAFKYFDTTIDRKRYTSTKEVLDATLIHQSITGLYETRIDLSQLGGDGGGGGGSGGGGSGGGGSGGGGSGGGGSGGTLNIEDEYRLHETSKEPDVSLGSTWLSDFPQAWAETGGMGLAVRQAPLIIPLKATSTPVSIKQYPMSQEARLGIKPHIQRLLDQGILVPCQSPWNTPLLPVKKPGTNDYRPVQDLREVNKRVEDIHPTVPNPYNLLSGLPPSHQWYTVLDLKDAFFCLRLHPTSQPLFAFEWRDPEMGISGQLTWTRLPQGFKNSPTLFNEALHRDLAGFRIQHPDLILLQYVDDLLLAATSELDCQQGTRALLQTLGDLGYRASAKKAQICQKQVKYLGYLLKEGQRWLTEARKETVMGQPIPKTPRQLREFLGKAGFCRLFIPGFAEMAAPLYPLTKPGTLFNWGPDQQKAFQEIKQALLTAPALGLPDLTKPFELFVDEKQGYAKGVLTQKLGPWRRPVAYLSKKLDPVAAGWPPCLRMVAAIAVLTKDAGKLTMGQPLVILAPHAVEALVKQPPDRWLSNARMTHYQALLLDTDRVQFGPVVALNPATLLPLPEEGLQHDCLDILAEAHGTRSDLMDQPLPDADHTWYTDGSSFLQEGQRKAGAAVTTETEVIWARALPAGTSAQRAELIALTQALKMAEGKKLNVYTDSRYAFATAHIHGEIYRRRGWLTSEGKEIKNKDEILALLKALFLPKRLSIIHCPGHQKGNSAEARGNRMADQAAREVATRETPETSTLLAGKRTADGSEFEKRTADGSEFESPKKKAKVE

SEQ ID NO: 2411 - protein, 2091 aa, synthetic construct
MPAAKRVKLDGGDKKYSIGLDIGTNSVGWAVITDEYKVPSKKFKVLGNTDRHSIKKNLIGALLFDSGETAEATRLKRTARRRYTRRKNRICYLQEIFSNEMAKVDDSFFHRLEESFLVEEDKKHERHPIFGNIVDEVAYHEKYPTIYHLRKKLVDSTDKADLRLIYLALAHMIKFRGHFLIEGDLNPDNSDVDKLFIQLVQTYNQLFEENPINASGVDAKAILSARLSKSRRLENLIAQLPGEKKNGLFGNLIALSLGLTPNFKSNFDLAEDAKLQLSKDTYDDDLDNLLAQIGDQYADLFLAAKNLSDAILLSDILRVNTEITKAPLSASMIKRYDEHHQDLTLLKALVRQQLPEKYKEIFFDQSKNGYAGYIDGGASQEEFYKFIKPILEKMDGTEELLVKLNREDLLRKQRTFDNGSIPHQIHLGELHAILRRQEDFYPFLKDNREKIEKILTFRIPYYVGPLARGNSRFAWMTRKSEETITPWNFEEVVDKGASAQSFIERMTNFDKNLPNEKVLPKHSLLYEYFTVYNELTKVKYVTEGMRKPAFLSGEQKKAIVDLLFKTNRKVTVKQLKEDYFKKIECFDSVEISGVEDRFNASLGTYHDLLKIIKDKDFLDNEENEDILEDIVLTLTLFEDREMIEERLKTYAHLFDDKVMKQLKRRRYTGWGRLSRKLINGIRDKQSGKTILDFLKSDGFANRNFMQLIHDDSLTFKEDIQKAQVSGQGDSLHEHIANLAGSPAIKKGILQTVKVVDELVKVMGRHKPENIVIEMARENQTTQKGQKNSRERMKRIEEGIKELGSQILKEHPVENTQLQNEKLYLYYLQNGRDMYVDQELDINRLSDYDVDHIVPQSFLKDDSIDNKVLTRSDKARGKSDNVPSEEVVKKMKNYWRQLLNAKLITQRKFDNLTKAERGGLSELDKAGFIKRQLVETRQITKHVAQILDSRMNTKYDENDKLIREVKVITLKSKLVSDFRKDFQFYKVREINNYHHAHDAYLNAVVGTALIKKYPKLESEFVYGDYKVYDVRKMIAKSEQEIGKATAKYFFYSNIMNFFKTEITLANGEIRKRPLIETNGETGEIVWDKGRDFATVRKVLSMPQVNIVKKTEVQTGGFSKESILPKRNSDKLIARKKDWDPKKYGGFDSPTVAYSVLVVAKVEKGKSKKLKSVKELLGITIMERSSFEKNPIDFLEAKGYKEVKKDLIIKLPKYSLFELENGRKRMLASAGELQKGNELALPSKYVNFLYLASHYEKLKGSPEDNEQKQLFVEQHKHYLDEIIEQISEFSKRVILADANLDKVLSAYNKHRDKPIREQAENIIHLFTLTNLGAPAAFKYFDTTIDRKRYTSTKEVLDATLIHQSITGLYETRIDLSQLGGDGGGSSGSSGGTLNIEDEYRLHETSKEPDVSLGSTWLSDFPQAWAETGGMGLAVRQAPLIIPLKATSTPVSIKQYPMSQEARLGIKPHIQRLLDQGILVPCQSPWNTPLLPVKKPGTNDYRPVQDLREVNKRVEDIHPTVPNPYNLLSGLPPSHQWYTVLDLKDAFFCLRLHPTSQPLFAFEWRDPEMGISGQLTWTRLPQGFKNSPTLFNEALHRDLAGFRIQHPDLILLQYVDDLLLAATSELDCQQGTRALLQTLGDLGYRASAKKAQICQKQVKYLGYLLKEGQRWLTEARKETVMGQPIPKTPRQLREFLGKAGFCRLFIPGFAEMAAPLYPLTKPGTLFNWGPDQQKAFQEIKQALLTAPALGLPDLTKPFELFVDEKQGYAKGVLTQKLGPWRRPVAYLSKKLDPVAAGWPPCLRMVAAIAVLTKDAGKLTMGQPLVILAPHAVEALVKQPPDRWLSNARMTHYQALLLDTDRVQFGPVVALNPATLLPLPEEGLQHDCLDILAEAHGTRSDLMDQPLPDADHTWYTDGSSFLQEGQRKAGAAVTTETEVIWARALPAGTSAQRAELIALTQALKMAEGKKLNVYTDSRYAFATAHIHGEIYRRRGWLTSEGKEIKNKDEILALLKALFLPKRLSIIHCPGHQKGNSAEARGNRMADQAAREVATRETPETSTLLAGKRTADGSEFEKRTADGSEFESPKKKAKVE

SEQ ID NO: 2412 - protein, 2096 aa, synthetic construct
MPAAKRVKLDGGDKKYSIGLDIGTNSVGWAVITDEYKVPSKKFKVLGNTDRHSIKKNLIGALLFDSGETAEATRLKRTARRRYTRRKNRICYLQEIFSNEMAKVDDSFFHRLEESFLVEEDKKHERHPIFGNIVDEVAYHEKYPTIYHLRKKLVDSTDKADLRLIYLALAHMIKFRGHFLIEGDLNPDNSDVDKLFIQLVQTYNQLFEENPINASGVDAKAILSARLSKSRRLENLIAQLPGEKKNGLFGNLIALSLGLTPNFKSNFDLAEDAKLQLSKDTYDDDLDNLLAQIGDQYADLFLAAKNLSDAILLSDILRVNTEITKAPLSASMIKRYDEHHQDLTLLKALVRQQLPEKYKEIFFDQSKNGYAGYIDGGASQEEFYKFIKPILEKMDGTEELLVKLNREDLLRKQRTFDNGSIPHQIHLGELHAILRRQEDFYPFLKDNREKIEKILTFRIPYYVGPLARGNSRFAWMTRKSEETITPWNFEEVVDKGASAQSFIERMTNFDKNLPNEKVLPKHSLLYEYFTVYNELTKVKYVTEGMRKPAFLSGEQKKAIVDLLFKTNRKVTVKQLKEDYFKKIECFDSVEISGVEDRFNASLGTYHDLLKIIKDKDFLDNEENEDILEDIVLTLTLFEDREMIEERLKTYAHLFDDKVMKQLKRRRYTGWGRLSRKLINGIRDKQSGKTILDFLKSDGFANRNFMQLIHDDSLTFKEDIQKAQVSGQGDSLHEHIANLAGSPAIKKGILQTVKVVDELVKVMGRHKPENIVIEMARENQTTQKGQKNSRERMKRIEEGIKELGSQILKEHPVENTQLQNEKLYLYYLQNGRDMYVDQELDINRLSDYDVDHIVPQSFLKDDSIDNKVLTRSDKARGKSDNVPSEEVVKKMKNYWRQLLNAKLITQRKFDNLTKAERGGLSELDKAGFIKRQLVETRQITKHVAQILDSRMNTKYDENDKLIREVKVITLKSKLVSDFRKDFQFYKVREINNYHHAHDAYLNAVVGTALIKKYPKLESEFVYGDYKVYDVRKMIAKSEQEIGKATAKYFFYSNIMNFFKTEITLANGEIRKRPLIETNGETGEIVWDKGRDFATVRKVLSMPQVNIVKKTEVQTGGFSKESILPKRNSDKLIARKKDWDPKKYGGFDSPTVAYSVLVVAKVEKGKSKKLKSVKELLGITIMERSSFEKNPIDFLEAKGYKEVKKDLIIKLPKYSLFELENGRKRMLASAGELQKGNELALPSKYVNFLYLASHYEKLKGSPEDNEQKQLFVEQHKHYLDEIIEQISEFSKRVILADANLDKVLSAYNKHRDKPIREQAENIIHLFTLTNLGAPAAFKYFDTTIDRKRYTSTKEVLDATLIHQSITGLYETRIDLSQLGGDGGEAAAKGGGGSSGGTLNIEDEYRLHETSKEPDVSLGSTWLSDFPQAWAETGGMGLAVRQAPLIIPLKATSTPVSIKQYPMSQEARLGIKPHIQRLLDQGILVPCQSPWNTPLLPVKKPGTNDYRPVQDLREVNKRVEDIHPTVPNPYNLLSGLPPSHQWYTVLDLKDAFFCLRLHPTSQPLFAFEWRDPEMGISGQLTWTRLPQGFKNSPTLFNEALHRDLAGFRIQHPDLILLQYVDDLLLAATSELDCQQGTRALLQTLGDLGYRASAKKAQICQKQVKYLGYLLKEGQRWLTEARKETVMGQPIPKTPRQLREFLGKAGFCRLFIPGFAEMAAPLYPLTKPGTLFNWGPDQQKAFQEIKQALLTAPALGLPDLTKPFELFVDEKQGYAKGVLTQKLGPWRRPVAYLSKKLDPVAAGWPPCLRMVAAIAVLTKDAGKLTMGQPLVILAPHAVEALVKQPPDRWLSNARMTHYQALLLDTDRVQFGPVVALNPATLLPLPEEGLQHDCLDILAEAHGTRSDLMDQPLPDADHTWYTDGSSFLQEGQRKAGAAVTTETEVIWARALPAGTSAQRAELIALTQALKMAEGKKLNVYTDSRYAFATAHIHGEIYRRRGWLTSEGKEIKNKDEILALLKALFLPKRLSIIHCPGHQKGNSAEARGNRMADQAAREVATRETPETSTLLAGKRTADGSEFEKRTADGSEFESPKKKAKVE

SEQ ID NO: 2413 - protein, 2096 aa, synthetic construct
MPAAKRVKLDGGDKKYSIGLDIGTNSVGWAVITDEYKVPSKKFKVLGNTDRHSIKKNLIGALLFDSGETAEATRLKRTARRRYTRRKNRICYLQEIFSNEMAKVDDSFFHRLEESFLVEEDKKHERHPIFGNIVDEVAYHEKYPTIYHLRKKLVDSTDKADLRLIYLALAHMIKFRGHFLIEGDLNPDNSDVDKLFIQLVQTYNQLFEENPINASGVDAKAILSARLSKSRRLENLIAQLPGEKKNGLFGNLIALSLGLTPNFKSNFDLAEDAKLQLSKDTYDDDLDNLLAQIGDQYADLFLAAKNLSDAILLSDILRVNTEITKAPLSASMIKRYDEHHQDLTLLKALVRQQLPEKYKEIFFDQSKNGYAGYIDGGASQEEFYKFIKPILEKMDGTEELLVKLNREDLLRKQRTFDNGSIPHQIHLGELHAILRRQEDFYPFLKDNREKIEKILTFRIPYYVGPLARGNSRFAWMTRKSEETITPWNFEEVVDKGASAQSFIERMTNFDKNLPNEKVLPKHSLLYEYFTVYNELTKVKYVTEGMRKPAFLSGEQKKAIVDLLFKTNRKVTVKQLKEDYFKKIECFDSVEISGVEDRFNASLGTYHDLLKIIKDKDFLDNEENEDILEDIVLTLTLFEDREMIEERLKTYAHLFDDKVMKQLKRRRYTGWGRLSRKLINGIRDKQSGKTILDFLKSDGFANRNFMQLIHDDSLTFKEDIQKAQVSGQGDSLHEHIANLAGSPAIKKGILQTVKVVDELVKVMGRHKPENIVIEMARENQTTQKGQKNSRERMKRIEEGIKELGSQILKEHPVENTQLQNEKLYLYYLQNGRDMYVDQELDINRLSDYDVDHIVPQSFLKDDSIDNKVLTRSDKARGKSDNVPSEEVVKKMKNYWRQLLNAKLITQRKFDNLTKAERGGLSELDKAGFIKRQLVETRQITKHVAQILDSRMNTKYDENDKLIREVKVITLKSKLVSDFRKDFQFYKVREINNYHHAHDAYLNAVVGTALIKKYPKLESEFVYGDYKVYDVRKMIAKSEQEIGKATAKYFFYSNIMNFFKTEITLANGEIRKRPLIETNGETGEIVWDKGRDFATVRKVLSMPQVNIVKKTEVQTGGFSKESILPKRNSDKLIARKKDWDPKKYGGFDSPTVAYSVLVVAKVEKGKSKKLKSVKELLGITIMERSSFEKNPIDFLEAKGYKEVKKDLIIKLPKYSLFELENGRKRMLASAGELQKGNELALPSKYVNFLYLASHYEKLKGSPEDNEQKQLFVEQHKHYLDEIIEQISEFSKRVILADANLDKVLSAYNKHRDKPIREQAENIIHLFTLTNLGAPAAFKYFDTTIDRKRYTSTKEVLDATLIHQSITGLYETRIDLSQLGGDGGGGSGGGEAAAKGGTLNIEDEYRLHETSKEPDVSLGSTWLSDFPQAWAETGGMGLAVRQAPLIIPLKATSTPVSIKQYPMSQEARLGIKPHIQRLLDQGILVPCQSPWNTPLLPVKKPGTNDYRPVQDLREVNKRVEDIHPTVPNPYNLLSGLPPSHQWYTVLDLKDAFFCLRLHPTSQPLFAFEWRDPEMGISGQLTWTRLPQGFKNSPTLFNEALHRDLAGFRIQHPDLILLQYVDDLLLAATSELDCQQGTRALLQTLGDLGYRASAKKAQICQKQVKYLGYLLKEGQRWLTEARKETVMGQPIPKTPRQLREFLGKAGFCRLFIPGFAEMAAPLYPLTKPGTLFNWGPDQQKAFQEIKQALLTAPALGLPDLTKPFELFVDEKQGYAKGVLTQKLGPWRRPVAYLSKKLDPVAAGWPPCLRMVAAIAVLTKDAGKLTMGQPLVILAPHAVEALVKQPPDRWLSNARMTHYQALLLDTDRVQFGPVVALNPATLLPLPEEGLQHDCLDILAEAHGTRSDLMDQPLPDADHTWYTDGSSFLQEGQRKAGAAVTTETEVIWARALPAGTSAQRAELIALTQALKMAEGKKLNVYTDSRYAFATAHIHGEIYRRRGWLTSEGKEIKNKDEILALLKALFLPKRLSIIHCPGHQKGNSAEARGNRMADQAAREVATRETPETSTLLAGKRTADGSEFEKRTADGSEFESPKKKAKVE

SEQ ID NO: 2414 - protein, 2094 aa, synthetic construct
MPAAKRVKLDGGDKKYSIGLDIGTNSVGWAVITDEYKVPSKKFKVLGNTDRHSIKKNLIGALLFDSGETAEATRLKRTARRRYTRRKNRICYLQEIFSNEMAKVDDSFFHRLEESFLVEEDKKHERHPIFGNIVDEVAYHEKYPTIYHLRKKLVDSTDKADLRLIYLALAHMIKFRGHFLIEGDLNPDNSDVDKLFIQLVQTYNQLFEENPINASGVDAKAILSARLSKSRRLENLIAQLPGEKKNGLFGNLIALSLGLTPNFKSNFDLAEDAKLQLSKDTYDDDLDNLLAQIGDQYADLFLAAKNLSDAILLSDILRVNTEITKAPLSASMIKRYDEHHQDLTLLKALVRQQLPEKYKEIFFDQSKNGYAGYIDGGASQEEFYKFIKPILEKMDGTEELLVKLNREDLLRKQRTFDNGSIPHQIHLGELHAILRRQEDFYPFLKDNREKIEKILTFRIPYYVGPLARGNSRFAWMTRKSEETITPWNFEEVVDKGASAQSFIERMTNFDKNLPNEKVLPKHSLLYEYFTVYNELTKVKYVTEGMRKPAFLSGEQKKAIVDLLFKTNRKVTVKQLKEDYFKKIECFDSVEISGVEDRFNASLGTYHDLLKIIKDKDFLDNEENEDILEDIVLTLTLFEDREMIEERLKTYAHLFDDKVMKQLKRRRYTGWGRLSRKLINGIRDKQSGKTILDFLKSDGFANRNFMQLIHDDSLTFKEDIQKAQVSGQGDSLHEHIANLAGSPAIKKGILQTVKVVDELVKVMGRHKPENIVIEMARENQTTQKGQKNSRERMKRIEEGIKELGSQILKEHPVENTQLQNEKLYLYYLQNGRDMYVDQELDINRLSDYDVDHIVPQSFLKDDSIDNKVLTRSDKARGKSDNVPSEEVVKKMKNYWRQLLNAKLITQRKFDNLTKAERGGLSELDKAGFIKRQLVETRQITKHVAQILDSRMNTKYDENDKLIREVKVITLKSKLVSDFRKDFQFYKVREINNYHHAHDAYLNAVVGTALIKKYPKLESEFVYGDYKVYDVRKMIAKSEQEIGKATAKYFFYSNIMNFFKTEITLANGEIRKRPLIETNGETGEIVWDKGRDFATVRKVLSMPQVNIVKKTEVQTGGFSKESILPKRNSDKLIARKKDWDPKKYGGFDSPTVAYSVLVVAKVEKGKSKKLKSVKELLGITIMERSSFEKNPIDFLEAKGYKEVKKDLIIKLPKYSLFELENGRKRMLASAGELQKGNELALPSKYVNFLYLASHYEKLKGSPEDNEQKQLFVEQHKHYLDEIIEQISEFSKRVILADANLDKVLSAYNKHRDKPIREQAENIIHLFTLTNLGAPAAFKYFDTTIDRKRYTSTKEVLDATLIHQSITGLYETRIDLSQLGGDGGPAPGSSGGGGGTLNIEDEYRLHETSKEPDVSLGSTWLSDFPQAWAETGGMGLAVRQAPLIIPLKATSTPVSIKQYPMSQEARLGIKPHIQRLLDQGILVPCQSPWNTPLLPVKKPGTNDYRPVQDLREVNKRVEDIHPTVPNPYNLLSGLPPSHQWYTVLDLKDAFFCLRLHPTSQPLFAFEWRDPEMGISGQLTWTRLPQGFKNSPTLFNEALHRDLAGFRIQHPDLILLQYVDDLLLAATSELDCQQGTRALLQTLGDLGYRASAKKAQICQKQVKYLGYLLKEGQRWLTEARKETVMGQPIPKTPRQLREFLGKAGFCRLFIPGFAEMAAPLYPLTKPGTLFNWGPDQQKAFQEIKQALLTAPALGLPDLTKPFELFVDEKQGYAKGVLTQKLGPWRRPVAYLSKKLDPVAAGWPPCLRMVAAIAVLTKDAGKLTMGQPLVILAPHAVEALVKQPPDRWLSNARMTHYQALLLDTDRVQFGPVVALNPATLLPLPEEGLQHDCLDILAEAHGTRSDLMDQPLPDADHTWYTDGSSFLQEGQRKAGAAVTTETEVIWARALPAGTSAQRAELIALTQALKMAEGKKLNVYTDSRYAFATAHIHGEIYRRRGWLTSEGKEIKNKDEILALLKALFLPKRLSIIHCPGHQKGNSAEARGNRMADQAAREVATRETPETSTLLAGKRTADGSEFEKRTADGSEFESPKKKAKVE

SEQ ID NO: 2415 - protein, 2089 aa, synthetic construct
MPAAKRVKLDGGDKKYSIGLDIGTNSVGWAVITDEYKVPSKKFKVLGNTDRHSIKKNLIGALLFDSGETAEATRLKRTARRRYTRRKNRICYLQEIFSNEMAKVDDSFFHRLEESFLVEEDKKHERHPIFGNIVDEVAYHEKYPTIYHLRKKLVDSTDKADLRLIYLALAHMIKFRGHFLIEGDLNPDNSDVDKLFIQLVQTYNQLFEENPINASGVDAKAILSARLSKSRRLENLIAQLPGEKKNGLFGNLIALSLGLTPNFKSNFDLAEDAKLQLSKDTYDDDLDNLLAQIGDQYADLFLAAKNLSDAILLSDILRVNTEITKAPLSASMIKRYDEHHQDLTLLKALVRQQLPEKYKEIFFDQSKNGYAGYIDGGASQEEFYKFIKPILEKMDGTEELLVKLNREDLLRKQRTFDNGSIPHQIHLGELHAILRRQEDFYPFLKDNREKIEKILTFRIPYYVGPLARGNSRFAWMTRKSEETITPWNFEEVVDKGASAQSFIERMTNFDKNLPNEKVLPKHSLLYEYFTVYNELTKVKYVTEGMRKPAFLSGEQKKAIVDLLFKTNRKVTVKQLKEDYFKKIECFDSVEISGVEDRFNASLGTYHDLLKIIKDKDFLDNEENEDILEDIVLTLTLFEDREMIEERLKTYAHLFDDKVMKQLKRRRYTGWGRLSRKLINGIRDKQSGKTILDFLKSDGFANRNFMQLIHDDSLTFKEDIQKAQVSGQGDSLHEHIANLAGSPAIKKGILQTVKVVDELVKVMGRHKPENIVIEMARENQTTQKGQKNSRERMKRIEEGIKELGSQILKEHPVENTQLQNEKLYLYYLQNGRDMYVDQELDINRLSDYDVDHIVPQSFLKDDSIDNKVLTRSDKARGKSDNVPSEEVVKKMKNYWRQLLNAKLITQRKFDNLTKAERGGLSELDKAGFIKRQLVETRQITKHVAQILDSRMNTKYDENDKLIREVKVITLKSKLVSDFRKDFQFYKVREINNYHHAHDAYLNAVVGTALIKKYPKLESEFVYGDYKVYDVRKMIAKSEQEIGKATAKYFFYSNIMNFFKTEITLANGEIRKRPLIETNGETGEIVWDKGRDFATVRKVLSMPQVNIVKKTEVQTGGFSKESILPKRNSDKLIARKKDWDPKKYGGFDSPTVAYSVLVVAKVEKGKSKKLKSVKELLGITIMERSSFEKNPIDFLEAKGYKEVKKDLIIKLPKYSLFELENGRKRMLASAGELQKGNELALPSKYVNFLYLASHYEKLKGSPEDNEQKQLFVEQHKHYLDEIIEQISEFSKRVILADANLDKVLSAYNKHRDKPIREQAENIIHLFTLTNLGAPAAFKYFDTTIDRKRYTSTKEVLDATLIHQSITGLYETRIDLSQLGGDGGGGGGGGTLNIEDEYRLHETSKEPDVSLGSTWLSDFPQAWAETGGMGLAVRQAPLIIPLKATSTPVSIKQYPMSQEARLGIKPHIQRLLDQGILVPCQSPWNTPLLPVKKPGTNDYRPVQDLREVNKRVEDIHPTVPNPYNLLSGLPPSHQWYTVLDLKDAFFCLRLHPTSQPLFAFEWRDPEMGISGQLTWTRLPQGFKNSPTLFNEALHRDLAGFRIQHPDLILLQYVDDLLLAATSELDCQQGTRALLQTLGDLGYRASAKKAQICQKQVKYLGYLLKEGQRWLTEARKETVMGQPIPKTPRQLREFLGKAGFCRLFIPGFAEMAAPLYPLTKPGTLFNWGPDQQKAFQEIKQALLTAPALGLPDLTKPFELFVDEKQGYAKGVLTQKLGPWRRPVAYLSKKLDPVAAGWPPCLRMVAAIAVLTKDAGKLTMGQPLVILAPHAVEALVKQPPDRWLSNARMTHYQALLLDTDRVQFGPVVALNPATLLPLPEEGLQHDCLDILAEAHGTRSDLMDQPLPDADHTWYTDGSSFLQEGQRKAGAAVTTETEVIWARALPAGTSAQRAELIALTQALKMAEGKKLNVYTDSRYAFATAHIHGEIYRRRGWLTSEGKEIKNKDEILALLKALFLPKRLSIIHCPGHQKGNSAEARGNRMADQAAREVATRETPETSTLLAGKRTADGSEFEKRTADGSEFESPKKKAKVE

SEQ ID NO: 2416 - protein, 2094 aa, synthetic construct
MPAAKRVKLDGGDKKYSIGLDIGTNSVGWAVITDEYKVPSKKFKVLGNTDRHSIKKNLIGALLFDSGETAEATRLKRTARRRYTRRKNRICYLQEIFSNEMAKVDDSFFHRLEESFLVEEDKKHERHPIFGNIVDEVAYHEKYPTIYHLRKKLVDSTDKADLRLIYLALAHMIKFRGHFLIEGDLNPDNSDVDKLFIQLVQTYNQLFEENPINASGVDAKAILSARLSKSRRLENLIAQLPGEKKNGLFGNLIALSLGLTPNFKSNFDLAEDAKLQLSKDTYDDDLDNLLAQIGDQYADLFLAAKNLSDAILLSDILRVNTEITKAPLSASMIKRYDEHHQDLTLLKALVRQQLPEKYKEIFFDQSKNGYAGYIDGGASQEEFYKFIKPILEKMDGTEELLVKLNREDLLRKQRTFDNGSIPHQIHLGELHAILRRQEDFYPFLKDNREKIEKILTFRIPYYVGPLARGNSRFAWMTRKSEETITPWNFEEVVDKGASAQSFIERMTNFDKNLPNEKVLPKHSLLYEYFTVYNELTKVKYVTEGMRKPAFLSGEQKKAIVDLLFKTNRKVTVKQLKEDYFKKIECFDSVEISGVEDRFNASLGTYHDLLKIIKDKDFLDNEENEDILEDIVLTLTLFEDREMIEERLKTYAHLFDDKVMKQLKRRRYTGWGRLSRKLINGIRDKQSGKTILDFLKSDGFANRNFMQLIHDDSLTFKEDIQKAQVSGQGDSLHEHIANLAGSPAIKKGILQTVKVVDELVKVMGRHKPENIVIEMARENQTTQKGQKNSRERMKRIEEGIKELGSQILKEHPVENTQLQNEKLYLYYLQNGRDMYVDQELDINRLSDYDVDHIVPQSFLKDDSIDNKVLTRSDKARGKSDNVPSEEVVKKMKNYWRQLLNAKLITQRKFDNLTKAERGGLSELDKAGFIKRQLVETRQITKHVAQILDSRMNTKYDENDKLIREVKVITLKSKLVSDFRKDFQFYKVREINNYHHAHDAYLNAVVGTALIKKYPKLESEFVYGDYKVYDVRKMIAKSEQEIGKATAKYFFYSNIMNFFKTEITLANGEIRKRPLIETNGETGEIVWDKGRDFATVRKVLSMPQVNIVKKTEVQTGGFSKESILPKRNSDKLIARKKDWDPKKYGGFDSPTVAYSVLVVAKVEKGKSKKLKSVKELLGITIMERSSFEKNPIDFLEAKGYKEVKKDLIIKLPKYSLFELENGRKRMLASAGELQKGNELALPSKYVNFLYLASHYEKLKGSPEDNEQKQLFVEQHKHYLDEIIEQISEFSKRVILADANLDKVLSAYNKHRDKPIREQAENIIHLFTLTNLGAPAAFKYFDTTIDRKRYTSTKEVLDATLIHQSITGLYETRIDLSQLGGDGGGGGGGSPAPGGTLNIEDEYRLHETSKEPDVSLGSTWLSDFPQAWAETGGMGLAVRQAPLIIPLKATSTPVSIKQYPMSQEARLGIKPHIQRLLDQGILVPCQSPWNTPLLPVKKPGTNDYRPVQDLREVNKRVEDIHPTVPNPYNLLSGLPPSHQWYTVLDLKDAFFCLRLHPTSQPLFAFEWRDPEMGISGQLTWTRLPQGFKNSPTLFNEALHRDLAGFRIQHPDLILLQYVDDLLLAATSELDCQQGTRALLQTLGDLGYRASAKKAQICQKQVKYLGYLLKEGQRWLTEARKETVMGQPIPKTPRQLREFLGKAGFCRLFIPGFAEMAAPLYPLTKPGTLFNWGPDQQKAFQEIKQALLTAPALGLPDLTKPFELFVDEKQGYAKGVLTQKLGPWRRPVAYLSKKLDPVAAGWPPCLRMVAAIAVLTKDAGKLTMGQPLVILAPHAVEALVKQPPDRWLSNARMTHYQALLLDTDRVQFGPVVALNPATLLPLPEEGLQHDCLDILAEAHGTRSDLMDQPLPDADHTWYTDGSSFLQEGQRKAGAAVTTETEVIWARALPAGTSAQRAELIALTQALKMAEGKKLNVYTDSRYAFATAHIHGEIYRRRGWLTSEGKEIKNKDEILALLKALFLPKRLSIIHCPGHQKGNSAEARGNRMADQAAREVATRETPETSTLLAGKRTADGSEFEKRTADGSEFESPKKKAKVE

SEQ ID NO: 2417 - protein, 2100 aa, synthetic construct
MPAAKRVKLDGGDKKYSIGLDIGTNSVGWAVITDEYKVPSKKFKVLGNTDRHSIKKNLIGALLFDSGETAEATRLKRTARRRYTRRKNRICYLQEIFSNEMAKVDDSFFHRLEESFLVEEDKKHERHPIFGNIVDEVAYHEKYPTIYHLRKKLVDSTDKADLRLIYLALAHMIKFRGHFLIEGDLNPDNSDVDKLFIQLVQTYNQLFEENPINASGVDAKAILSARLSKSRRLENLIAQLPGEKKNGLFGNLIALSLGLTPNFKSNFDLAEDAKLQLSKDTYDDDLDNLLAQIGDQYADLFLAAKNLSDAILLSDILRVNTEITKAPLSASMIKRYDEHHQDLTLLKALVRQQLPEKYKEIFFDQSKNGYAGYIDGGASQEEFYKFIKPILEKMDGTEELLVKLNREDLLRKQRTFDNGSIPHQIHLGELHAILRRQEDFYPFLKDNREKIEKILTFRIPYYVGPLARGNSRFAWMTRKSEETITPWNFEEVVDKGASAQSFIERMTNFDKNLPNEKVLPKHSLLYEYFTVYNELTKVKYVTEGMRKPAFLSGEQKKAIVDLLFKTNRKVTVKQLKEDYFKKIECFDSVEISGVEDRFNASLGTYHDLLKIIKDKDFLDNEENEDILEDIVLTLTLFEDREMIEERLKTYAHLFDDKVMKQLKRRRYTGWGRLSRKLINGIRDKQSGKTILDFLKSDGFANRNFMQLIHDDSLTFKEDIQKAQVSGQGDSLHEHIANLAGSPAIKKGILQTVKVVDELVKVMGRHKPENIVIEMARENQTTQKGQKNSRERMKRIEEGIKELGSQILKEHPVENTQLQNEKLYLYYLQNGRDMYVDQELDINRLSDYDVDHIVPQSFLKDDSIDNKVLTRSDKARGKSDNVPSEEVVKKMKNYWRQLLNAKLITQRKFDNLTKAERGGLSELDKAGFIKRQLVETRQITKHVAQILDSRMNTKYDENDKLIREVKVITLKSKLVSDFRKDFQFYKVREINNYHHAHDAYLNAVVGTALIKKYPKLESEFVYGDYKVYDVRKMIAKSEQEIGKATAKYFFYSNIMNFFKTEITLANGEIRKRPLIETNGETGEIVWDKGRDFATVRKVLSMPQVNIVKKTEVQTGGFSKESILPKRNSDKLIARKKDWDPKKYGGFDSPTVAYSVLVVAKVEKGKSKKLKSVKELLGITIMERSSFEKNPIDFLEAKGYKEVKKDLIIKLPKYSLFELENGRKRMLASAGELQKGNELALPSKYVNFLYLASHYEKLKGSPEDNEQKQLFVEQHKHYLDEIIEQISEFSKRVILADANLDKVLSAYNKHRDKPIREQAENIIHLFTLTNLGAPAAFKYFDTTIDRKRYTSTKEVLDATLIHQSITGLYETRIDLSQLGGDGGGGSGGSGGSGGSGGSGGTLNIEDEYRLHETSKGPDVPLGSTWLSDFPQAWAETGGMGLAFRQAPLIISLKATSTPVSIKQYPMSQEARLGIKPHIQRLLDQGILVPCQSPWNTPLLPVKKPGTNDYRPVQDLREVNKRVEDIHPTVPNPYNLLSGLPPSHQWYTVLDLKDAFFCLRLHPTSQSLFAFEWKDPEMGISGQLTWTRLPQGFKNSPTLFDEALHRDLADFRIQHPDLILLQYVDDLLLAATSELDCQQGTRALLQTLGDLGYRASAKKAQICQKQVKYLGYLLKEGQRWLTEARKETVMGQPTPKTPRQLREFLGTAGLCRLWIPGFAEMAAPLYPLTKTGTLFKWGPDQQKAYQEIKQALLTAPALGLPDLTKPFELFVDEKQGYAKGVLTQKLGPWRRPVAYLSKKLDPVAAGWPPCLRMVAAIAVLTKDVGKLTMGQPLVILAPHAVEALVKQPPDRWLSNARMTHYQALLLDTDRVQFGPIVALNPATLLPLPEEGLQHDCLDILAEAHGTRPDLTDQPLPDADHTWYTDGSSFLQEGQRRAGAAVTTETEVIWAKALPAGTSAQRAELIALTQALKMAAGKKLNVYTDSRYAFATAHIHGEIYRRRGLLTSEGKEIKNKDEILALLKALFLPKRLSIIHCPGHQKGNHAEARGNRMADQAAREVATRETPETSTLLAGKRTADGSEFEKRTADGSEFESPKKKAKVE

SEQ ID NO: 2418 - protein, 2096 aa, synthetic construct
MPAAKRVKLDGGDKKYSIGLDIGTNSVGWAVITDEYKVPSKKFKVLGNTDRHSIKKNLIGALLFDSGETAEATRLKRTARRRYTRRKNRICYLQEIFSNEMAKVDDSFFHRLEESFLVEEDKKHERHPIFGNIVDEVAYHEKYPTIYHLRKKLVDSTDKADLRLIYLALAHMIKFRGHFLIEGDLNPDNSDVDKLFIQLVQTYNQLFEENPINASGVDAKAILSARLSKSRRLENLIAQLPGEKKNGLFGNLIALSLGLTPNFKSNFDLAEDAKLQLSKDTYDDDLDNLLAQIGDQYADLFLAAKNLSDAILLSDILRVNTEITKAPLSASMIKRYDEHHQDLTLLKALVRQQLPEKYKEIFFDQSKNGYAGYIDGGASQEEFYKFIKPILEKMDGTEELLVKLNREDLLRKQRTFDNGSIPHQIHLGELHAILRRQEDFYPFLKDNREKIEKILTFRIPYYVGPLARGNSRFAWMTRKSEETITPWNFEEVVDKGASAQSFIERMTNFDKNLPNEKVLPKHSLLYEYFTVYNELTKVKYVTEGMRKPAFLSGEQKKAIVDLLFKTNRKVTVKQLKEDYFKKIECFDSVEISGVEDRFNASLGTYHDLLKIIKDKDFLDNEENEDILEDIVLTLTLFEDREMIEERLKTYAHLFDDKVMKQLKRRRYTGWGRLSRKLINGIRDKQSGKTILDFLKSDGFANRNFMQLIHDDSLTFKEDIQKAQVSGQGDSLHEHIANLAGSPAIKKGILQTVKVVDELVKVMGRHKPENIVIEMARENQTTQKGQKNSRERMKRIEEGIKELGSQILKEHPVENTQLQNEKLYLYYLQNGRDMYVDQELDINRLSDYDVDHIVPQSFLKDDSIDNKVLTRSDKARGKSDNVPSEEVVKKMKNYWRQLLNAKLITQRKFDNLTKAERGGLSELDKAGFIKRQLVETRQITKHVAQILDSRMNTKYDENDKLIREVKVITLKSKLVSDFRKDFQFYKVREINNYHHAHDAYLNAVVGTALIKKYPKLESEFVYGDYKVYDVRKMIAKSEQEIGKATAKYFFYSNIMNFFKTEITLANGEIRKRPLIETNGETGEIVWDKGRDFATVRKVLSMPQVNIVKKTEVQTGGFSKESILPKRNSDKLIARKKDWDPKKYGGFDSPTVAYSVLVVAKVEKGKSKKLKSVKELLGITIMERSSFEKNPIDFLEAKGYKEVKKDLIIKLPKYSLFELENGRKRMLASAGELQKGNELALPSKYVNFLYLASHYEKLKGSPEDNEQKQLFVEQHKHYLDEIIEQISEFSKRVILADANLDKVLSAYNKHRDKPIREQAENIIHLFTLTNLGAPAAFKYFDTTIDRKRYTSTKEVLDATLIHQSITGLYETRIDLSQLGGDGGEAAAKGGGPAPGGTLNIEDEYRLHETSKGPDVPLGSTWLSDFPQAWAETGGMGLAFRQAPLIISLKATSTPVSIKQYPMSQEARLGIKPHIQRLLDQGILVPCQSPWNTPLLPVKKPGTNDYRPVQDLREVNKRVEDIHPTVPNPYNLLSGLPPSHQWYTVLDLKDAFFCLRLHPTSQSLFAFEWKDPEMGISGQLTWTRLPQGFKNSPTLFDEALHRDLADFRIQHPDLILLQYVDDLLLAATSELDCQQGTRALLQTLGDLGYRASAKKAQICQKQVKYLGYLLKEGQRWLTEARKETVMGQPTPKTPRQLREFLGTAGLCRLWIPGFAEMAAPLYPLTKTGTLFKWGPDQQKAYQEIKQALLTAPALGLPDLTKPFELFVDEKQGYAKGVLTQKLGPWRRPVAYLSKKLDPVAAGWPPCLRMVAAIAVLTKDVGKLTMGQPLVILAPHAVEALVKQPPDRWLSNARMTHYQALLLDTDRVQFGPIVALNPATLLPLPEEGLQHDCLDILAEAHGTRPDLTDQPLPDADHTWYTDGSSFLQEGQRRAGAAVTTETEVIWAKALPAGTSAQRAELIALTQALKMAAGKKLNVYTDSRYAFATAHIHGEIYRRRGLLTSEGKEIKNKDEILALLKALFLPKRLSIIHCPGHQKGNHAEARGNRMADQAAREVATRETPETSTLLAGKRTADGSEFEKRTADGSEFESPKKKAKVE

SEQ ID NO: 2419 - protein, 2094 aa, synthetic construct
MPAAKRVKLDGGDKKYSIGLDIGTNSVGWAVITDEYKVPSKKFKVLGNTDRHSIKKNLIGALLFDSGETAEATRLKRTARRRYTRRKNRICYLQEIFSNEMAKVDDSFFHRLEESFLVEEDKKHERHPIFGNIVDEVAYHEKYPTIYHLRKKLVDSTDKADLRLIYLALAHMIKFRGHFLIEGDLNPDNSDVDKLFIQLVQTYNQLFEENPINASGVDAKAILSARLSKSRRLENLIAQLPGEKKNGLFGNLIALSLGLTPNFKSNFDLAEDAKLQLSKDTYDDDLDNLLAQIGDQYADLFLAAKNLSDAILLSDILRVNTEITKAPLSASMIKRYDEHHQDLTLLKALVRQQLPEKYKEIFFDQSKNGYAGYIDGGASQEEFYKFIKPILEKMDGTEELLVKLNREDLLRKQRTFDNGSIPHQIHLGELHAILRRQEDFYPFLKDNREKIEKILTFRIPYYVGPLARGNSRFAWMTRKSEETITPWNFEEVVDKGASAQSFIERMTNFDKNLPNEKVLPKHSLLYEYFTVYNELTKVKYVTEGMRKPAFLSGEQKKAIVDLLFKTNRKVTVKQLKEDYFKKIECFDSVEISGVEDRFNASLGTYHDLLKIIKDKDFLDNEENEDILEDIVLTLTLFEDREMIEERLKTYAHLFDDKVMKQLKRRRYTGWGRLSRKLINGIRDKQSGKTILDFLKSDGFANRNFMQLIHDDSLTFKEDIQKAQVSGQGDSLHEHIANLAGSPAIKKGILQTVKVVDELVKVMGRHKPENIVIEMARENQTTQKGQKNSRERMKRIEEGIKELGSQILKEHPVENTQLQNEKLYLYYLQNGRDMYVDQELDINRLSDYDVDHIVPQSFLKDDSIDNKVLTRSDKARGKSDNVPSEEVVKKMKNYWRQLLNAKLITQRKFDNLTKAERGGLSELDKAGFIKRQLVETRQITKHVAQILDSRMNTKYDENDKLIREVKVITLKSKLVSDFRKDFQFYKVREINNYHHAHDAYLNAVVGTALIKKYPKLESEFVYGDYKVYDVRKMIAKSEQEIGKATAKYFFYSNIMNFFKTEITLANGEIRKRPLIETNGETGEIVWDKGRDFATVRKVLSMPQVNIVKKTEVQTGGFSKESILPKRNSDKLIARKKDWDPKKYGGFDSPTVAYSVLVVAKVEKGKSKKLKSVKELLGITIMERSSFEKNPIDFLEAKGYKEVKKDLIIKLPKYSLFELENGRKRMLASAGELQKGNELALPSKYVNFLYLASHYEKLKGSPEDNEQKQLFVEQHKHYLDEIIEQISEFSKRVILADANLDKVLSAYNKHRDKPIREQAENIIHLFTLTNLGAPAAFKYFDTTIDRKRYTSTKEVLDATLIHQSITGLYETRIDLSQLGGDGGGSSGGSGGGGGTLNIEDEYRLHETSKGPDVPLGSTWLSDFPQAWAETGGMGLAFRQAPLIISLKATSTPVSIKQYPMSQEARLGIKPHIQRLLDQGILVPCQSPWNTPLLPVKKPGTNDYRPVQDLREVNKRVEDIHPTVPNPYNLLSGLPPSHQWYTVLDLKDAFFCLRLHPTSQSLFAFEWKDPEMGISGQLTWTRLPQGFKNSPTLFDEALHRDLADFRIQHPDLILLQYVDDLLLAATSELDCQQGTRALLQTLGDLGYRASAKKAQICQKQVKYLGYLLKEGQRWLTEARKETVMGQPTPKTPRQLREFLGTAGLCRLWIPGFAEMAAPLYPLTKTGTLFKWGPDQQKAYQEIKQALLTAPALGLPDLTKPFELFVDEKQGYAKGVLTQKLGPWRRPVAYLSKKLDPVAAGWPPCLRMVAAIAVLTKDVGKLTMGQPLVILAPHAVEALVKQPPDRWLSNARMTHYQALLLDTDRVQFGPIVALNPATLLPLPEEGLQHDCLDILAEAHGTRPDLTDQPLPDADHTWYTDGSSFLQEGQRRAGAAVTTETEVIWAKALPAGTSAQRAELIALTQALKMAAGKKLNVYTDSRYAFATAHIHGEIYRRRGLLTSEGKEIKNKDEILALLKALFLPKRLSIIHCPGHQKGNHAEARGNRMADQAAREVATRETPETSTLLAGKRTADGSEFEKRTADGSEFESPKKKAKVE

SEQ ID NO: 2420 - protein, 2096 aa, synthetic construct
MPAAKRVKLDGGDKKYSIGLDIGTNSVGWAVITDEYKVPSKKFKVLGNTDRHSIKKNLIGALLFDSGETAEATRLKRTARRRYTRRKNRICYLQEIFSNEMAKVDDSFFHRLEESFLVEEDKKHERHPIFGNIVDEVAYHEKYPTIYHLRKKLVDSTDKADLRLIYLALAHMIKFRGHFLIEGDLNPDNSDVDKLFIQLVQTYNQLFEENPINASGVDAKAILSARLSKSRRLENLIAQLPGEKKNGLFGNLIALSLGLTPNFKSNFDLAEDAKLQLSKDTYDDDLDNLLAQIGDQYADLFLAAKNLSDAILLSDILRVNTEITKAPLSASMIKRYDEHHQDLTLLKALVRQQLPEKYKEIFFDQSKNGYAGYIDGGASQEEFYKFIKPILEKMDGTEELLVKLNREDLLRKQRTFDNGSIPHQIHLGELHAILRRQEDFYPFLKDNREKIEKILTFRIPYYVGPLARGNSRFAWMTRKSEETITPWNFEEVVDKGASAQSFIERMTNFDKNLPNEKVLPKHSLLYEYFTVYNELTKVKYVTEGMRKPAFLSGEQKKAIVDLLFKTNRKVTVKQLKEDYFKKIECFDSVEISGVEDRFNASLGTYHDLLKIIKDKDFLDNEENEDILEDIVLTLTLFEDREMIEERLKTYAHLFDDKVMKQLKRRRYTGWGRLSRKLINGIRDKQSGKTILDFLKSDGFANRNFMQLIHDDSLTFKEDIQKAQVSGQGDSLHEHIANLAGSPAIKKGILQTVKVVDELVKVMGRHKPENIVIEMARENQTTQKGQKNSRERMKRIEEGIKELGSQILKEHPVENTQLQNEKLYLYYLQNGRDMYVDQELDINRLSDYDVDHIVPQSFLKDDSIDNKVLTRSDKARGKSDNVPSEEVVKKMKNYWRQLLNAKLITQRKFDNLTKAERGGLSELDKAGFIKRQLVETRQITKHVAQILDSRMNTKYDENDKLIREVKVITLKSKLVSDFRKDFQFYKVREINNYHHAHDAYLNAVVGTALIKKYPKLESEFVYGDYKVYDVRKMIAKSEQEIGKATAKYFFYSNIMNFFKTEITLANGEIRKRPLIETNGETGEIVWDKGRDFATVRKVLSMPQVNIVKKTEVQTGGFSKESILPKRNSDKLIARKKDWDPKKYGGFDSPTVAYSVLVVAKVEKGKSKKLKSVKELLGITIMERSSFEKNPIDFLEAKGYKEVKKDLIIKLPKYSLFELENGRKRMLASAGELQKGNELALPSKYVNFLYLASHYEKLKGSPEDNEQKQLFVEQHKHYLDEIIEQISEFSKRVILADANLDKVLSAYNKHRDKPIREQAENIIHLFTLTNLGAPAAFKYFDTTIDRKRYTSTKEVLDATLIHQSITGLYETRIDLSQLGGDGGPAPEAAAKGGGGGTLNIEDEYRLHETSKGPDVPLGSTWLSDFPQAWAETGGMGLAFRQAPLIISLKATSTPVSIKQYPMSQEARLGIKPHIQRLLDQGILVPCQSPWNTPLLPVKKPGTNDYRPVQDLREVNKRVEDIHPTVPNPYNLLSGLPPSHQWYTVLDLKDAFFCLRLHPTSQSLFAFEWKDPEMGISGQLTWTRLPQGFKNSPTLFDEALHRDLADFRIQHPDLILLQYVDDLLLAATSELDCQQGTRALLQTLGDLGYRASAKKAQICQKQVKYLGYLLKEGQRWLTEARKETVMGQPTPKTPRQLREFLGTAGLCRLWIPGFAEMAAPLYPLTKTGTLFKWGPDQQKAYQEIKQALLTAPALGLPDLTKPFELFVDEKQGYAKGVLTQKLGPWRRPVAYLSKKLDPVAAGWPPCLRMVAAIAVLTKDVGKLTMGQPLVILAPHAVEALVKQPPDRWLSNARMTHYQALLLDTDRVQFGPIVALNPATLLPLPEEGLQHDCLDILAEAHGTRPDLTDQPLPDADHTWYTDGSSFLQEGQRRAGAAVTTETEVIWAKALPAGTSAQRAELIALTQALKMAAGKKLNVYTDSRYAFATAHIHGEIYRRRGLLTSEGKEIKNKDEILALLKALFLPKRLSIIHCPGHQKGNHAEARGNRMADQAAREVATRETPETSTLLAGKRTADGSEFEKRTADGSEFESPKKKAKVE

SEQ ID NO: 2421 - protein, 2008 aa, synthetic construct
MPAAKRVKLDGGDKKYSIGLDIGTNSVGWAVITDEYKVPSKKFKVLGNTDRHSIKKNLIGALLFDSGETAEATRLKRTARRRYTRRKNRICYLQEIFSNEMAKVDDSFFHRLEESFLVEEDKKHERHPIFGNIVDEVAYHEKYPTIYHLRKKLVDSTDKADLRLIYLALAHMIKFRGHFLIEGDLNPDNSDVDKLFIQLVQTYNQLFEENPINASGVDAKAILSARLSKSRRLENLIAQLPGEKKNGLFGNLIALSLGLTPNFKSNFDLAEDAKLQLSKDTYDDDLDNLLAQIGDQYADLFLAAKNLSDAILLSDILRVNTEITKAPLSASMIKRYDEHHQDLTLLKALVRQQLPEKYKEIFFDQSKNGYAGYIDGGASQEEFYKFIKPILEKMDGTEELLVKLNREDLLRKQRTFDNGSIPHQIHLGELHAILRRQEDFYPFLKDNREKIEKILTFRIPYYVGPLARGNSRFAWMTRKSEETITPWNFEEVVDKGASAQSFIERMTNFDKNLPNEKVLPKHSLLYEYFTVYNELTKVKYVTEGMRKPAFLSGEQKKAIVDLLFKTNRKVTVKQLKEDYFKKIECFDSVEISGVEDRFNASLGTYHDLLKIIKDKDFLDNEENEDILEDIVLTLTLFEDREMIEERLKTYAHLFDDKVMKQLKRRRYTGWGRLSRKLINGIRDKQSGKTILDFLKSDGFANRNFMQLIHDDSLTFKEDIQKAQVSGQGDSLHEHIANLAGSPAIKKGILQTVKVVDELVKVMGRHKPENIVIEMARENQTTQKGQKNSRERMKRIEEGIKELGSQILKEHPVENTQLQNEKLYLYYLQNGRDMYVDQELDINRLSDYDVDHIVPQSFLKDDSIDNKVLTRSDKARGKSDNVPSEEVVKKMKNYWRQLLNAKLITQRKFDNLTKAERGGLSELDKAGFIKRQLVETRQITKHVAQILDSRMNTKYDENDKLIREVKVITLKSKLVSDFRKDFQFYKVREINNYHHAHDAYLNAVVGTALIKKYPKLESEFVYGDYKVYDVRKMIAKSEQEIGKATAKYFFYSNIMNFFKTEITLANGEIRKRPLIETNGETGEIVWDKGRDFATVRKVLSMPQVNIVKKTEVQTGGFSKESILPKRNSDKLIARKKDWDPKKYGGFDSPTVAYSVLVVAKVEKGKSKKLKSVKELLGITIMERSSFEKNPIDFLEAKGYKEVKKDLIIKLPKYSLFELENGRKRMLASAGELQKGNELALPSKYVNFLYLASHYEKLKGSPEDNEQKQLFVEQHKHYLDEIIEQISEFSKRVILADANLDKVLSAYNKHRDKPIREQAENIIHLFTLTNLGAPAAFKYFDTTIDRKRYTSTKEVLDATLIHQSITGLYETRIDLSQLGGDGGGGSGGSGGSGGSGGSGGSGGGVLDAPPSHIGLEHLPPPPEVPQFPLNLERLQALQDLVHRSLEAGYISPWDGPGNNPVFPVRKPNGAWRFVHDLRVTNALTKPIPALSPGPPDLTAIPTHLPHIICLDLKDAFFQIPVEDRFRSYFAFTLPTPGGLQPHRRFAWRVLPQGFINSPALFERALQEPLRQVSAAFSQSLLVSYMDDILYVSPTEEQRLQCYQTMAAHLRDLGFQVASEKTRQTPSPVPFLGQMVHERMVTYQSLPTLQISSPISLHQLQTVLGDLQWVSRGTPTTRRPLQLLYSSLKGIDDPRAIIHLSPEQQQGIAELRQALSHNARSRYNEQEPLLAYVHLTRAGSTLVLFQKGAQFPLAYFQTPLTDNQASPWGLLLLLGCQYLQAQALSSYAKTILKYYHNLPKTSLDNWIQSSEDPRVQELLQLWPQISSQGIQPPGPWKTLVTRAEVFLTPQFSPEPIPAALCLFSDGAARRGAYCLWKDHLLDFQAVPAPESAQKGELAGLLAGLAAAPPEPLNIWVDSKYLYSLLRTLVLGAWLQPDPVPSYALLYKSLLRHPAIFVGHVRSHSSASHPIASLNNYVDQLAGKRTADGSEFEKRTADGSEFESPKKKAKVE

SEQ ID NO: 2422 - protein, 2093 aa, synthetic construct
MPAAKRVKLDGGDKKYSIGLDIGTNSVGWAVITDEYKVPSKKFKVLGNTDRHSIKKNLIGALLFDSGETAEATRLKRTARRRYTRRKNRICYLQEIFSNEMAKVDDSFFHRLEESFLVEEDKKHERHPIFGNIVDEVAYHEKYPTIYHLRKKLVDSTDKADLRLIYLALAHMIKFRGHFLIEGDLNPDNSDVDKLFIQLVQTYNQLFEENPINASGVDAKAILSARLSKSRRLENLIAQLPGEKKNGLFGNLIALSLGLTPNFKSNFDLAEDAKLQLSKDTYDDDLDNLLAQIGDQYADLFLAAKNLSDAILLSDILRVNTEITKAPLSASMIKRYDEHHQDLTLLKALVRQQLPEKYKEIFFDQSKNGYAGYIDGGASQEEFYKFIKPILEKMDGTEELLVKLNREDLLRKQRTFDNGSIPHQIHLGELHAILRRQEDFYPFLKDNREKIEKILTFRIPYYVGPLARGNSRFAWMTRKSEETITPWNFEEVVDKGASAQSFIERMTNFDKNLPNEKVLPKHSLLYEYFTVYNELTKVKYVTEGMRKPAFLSGEQKKAIVDLLFKTNRKVTVKQLKEDYFKKIECFDSVEISGVEDRFNASLGTYHDLLKIIKDKDFLDNEENEDILEDIVLTLTLFEDREMIEERLKTYAHLFDDKVMKQLKRRRYTGWGRLSRKLINGIRDKQSGKTILDFLKSDGFANRNFMQLIHDDSLTFKEDIQKAQVSGQGDSLHEHIANLAGSPAIKKGILQTVKVVDELVKVMGRHKPENIVIEMARENQTTQKGQKNSRERMKRIEEGIKELGSQILKEHPVENTQLQNEKLYLYYLQNGRDMYVDQELDINRLSDYDVDHIVPQSFLKDDSIDNKVLTRSDKARGKSDNVPSEEVVKKMKNYWRQLLNAKLITQRKFDNLTKAERGGLSELDKAGFIKRQLVETRQITKHVAQILDSRMNTKYDENDKLIREVKVITLKSKLVSDFRKDFQFYKVREINNYHHAHDAYLNAVVGTALIKKYPKLESEFVYGDYKVYDVRKMIAKSEQEIGKATAKYFFYSNIMNFFKTEITLANGEIRKRPLIETNGETGEIVWDKGRDFATVRKVLSMPQVNIVKKTEVQTGGFSKESILPKRNSDKLIARKKDWDPKKYGGFDSPTVAYSVLVVAKVEKGKSKKLKSVKELLGITIMERSSFEKNPIDFLEAKGYKEVKKDLIIKLPKYSLFELENGRKRMLASAGELQKGNELALPSKYVNFLYLASHYEKLKGSPEDNEQKQLFVEQHKHYLDEIIEQISEFSKRVILADANLDKVLSAYNKHRDKPIREQAENIIHLFTLTNLGAPAAFKYFDTTIDRKRYTSTKEVLDATLIHQSITGLYETRIDLSQLGGDGGEAAAKPAPGGTLNIEDEYRLHETSKGPDVPLGSTWLSDFPQAWAETGGMGLAFRQAPLIISLKATSTPVSIKQYPMSQEARLGIKPHIQRLLDQGILVPCQSPWNTPLLPVKKPGTNDYRPVQDLREVNKRVEDIHPTVPNPYNLLSGLPPSHQWYTVLDLKDAFFCLRLHPTSQSLFAFEWKDPEMGISGQLTWTRLPQGFKNSPTLFNEALHRDLADFRIQHPDLILLQYVDDLLLAATSELDCQQGTRALLQTLGDLGYRASAKKAQICQKQVKYLGYLLKEGQRWLTEARKETVMGQPTPKTPRQLREFLGTAGLCRLWIPGFAEMAAPLYPLTKPGTLFKWGPDQQKAYQEIKQALLTAPALGLPDLTKPFELFVDEKQGYAKGVLTQKLGPWRRPVAYLSKKLDPVAAGWPPCLRMVAAIAVLTKDVGKLTMGQPLVILAPHAVEALVKQPPDRWLSNARMTHYQALLLDTDRVQFGPIVALNPATLLPLPEEGLQHDCLDILAEAHGTRPDLTDQPLPDADHTWYTDGSSFLQEGQRRAGAAVTTETEVIWAKALPAGTSAQRAELIALTQALKMAAGKKLNVYTDSRYAFATAHIHGEIYRRRGWLTSEGKEIKNKDEILALLKALFLPKRLSIIHCPGHQKGNHAEARGNRMADQAAREVATRETPETSTLLAGKRTADGSEFEKRTADGSEFESPKKKAKVE

SEQ ID NO: 2423 - protein, 2096 aa, synthetic construct
MPAAKRVKLDGGDKKYSIGLDIGTNSVGWAVITDEYKVPSKKFKVLGNTDRHSIKKNLIGALLFDSGETAEATRLKRTARRRYTRRKNRICYLQEIFSNEMAKVDDSFFHRLEESFLVEEDKKHERHPIFGNIVDEVAYHEKYPTIYHLRKKLVDSTDKADLRLIYLALAHMIKFRGHFLIEGDLNPDNSDVDKLFIQLVQTYNQLFEENPINASGVDAKAILSARLSKSRRLENLIAQLPGEKKNGLFGNLIALSLGLTPNFKSNFDLAEDAKLQLSKDTYDDDLDNLLAQIGDQYADLFLAAKNLSDAILLSDILRVNTEITKAPLSASMIKRYDEHHQDLTLLKALVRQQLPEKYKEIFFDQSKNGYAGYIDGGASQEEFYKFIKPILEKMDGTEELLVKLNREDLLRKQRTFDNGSIPHQIHLGELHAILRRQEDFYPFLKDNREKIEKILTFRIPYYVGPLARGNSRFAWMTRKSEETITPWNFEEVVDKGASAQSFIERMTNFDKNLPNEKVLPKHSLLYEYFTVYNELTKVKYVTEGMRKPAFLSGEQKKAIVDLLFKTNRKVTVKQLKEDYFKKIECFDSVEISGVEDRFNASLGTYHDLLKIIKDKDFLDNEENEDILEDIVLTLTLFEDREMIEERLKTYAHLFDDKVMKQLKRRRYTGWGRLSRKLINGIRDKQSGKTILDFLKSDGFANRNFMQLIHDDSLTFKEDIQKAQVSGQGDSLHEHIANLAGSPAIKKGILQTVKVVDELVKVMGRHKPENIVIEMARENQTTQKGQKNSRERMKRIEEGIKELGSQILKEHPVENTQLQNEKLYLYYLQNGRDMYVDQELDINRLSDYDVDHIVPQSFLKDDSIDNKVLTRSDKARGKSDNVPSEEVVKKMKNYWRQLLNAKLITQRKFDNLTKAERGGLSELDKAGFIKRQLVETRQITKHVAQILDSRMNTKYDENDKLIREVKVITLKSKLVSDFRKDFQFYKVREINNYHHAHDAYLNAVVGTALIKKYPKLESEFVYGDYKVYDVRKMIAKSEQEIGKATAKYFFYSNIMNFFKTEITLANGEIRKRPLIETNGETGEIVWDKGRDFATVRKVLSMPQVNIVKKTEVQTGGFSKESILPKRNSDKLIARKKDWDPKKYGGFDSPTVAYSVLVVAKVEKGKSKKLKSVKELLGITIMERSSFEKNPIDFLEAKGYKEVKKDLIIKLPKYSLFELENGRKRMLASAGELQKGNELALPSKYVNFLYLASHYEKLKGSPEDNEQKQLFVEQHKHYLDEIIEQISEFSKRVILADANLDKVLSAYNKHRDKPIREQAENIIHLFTLTNLGAPAAFKYFDTTIDRKRYTSTKEVLDATLIHQSITGLYETRIDLSQLGGDGGPAPAPAPAPAPGGTLNIEDEYRLHETSKGPDVPLGSTWLSDFPQAWAETGGMGLAFRQAPLIISLKATSTPVSIKQYPMSQEARLGIKPHIQRLLDQGILVPCQSPWNTPLLPVKKPGTNDYRPVQDLREVNKRVEDIHPTVPNPYNLLSGLPPSHQWYTVLDLKDAFFCLRLHPTSQSLFAFEWKDPEMGISGQLTWTRLPQGFKNSPTLFNEALHRDLADFRIQHPDLILLQYVDDLLLAATSELDCQQGTRALLQTLGDLGYRASAKKAQICQKQVKYLGYLLKEGQRWLTEARKETVMGQPTPKTPRQLREFLGTAGLCRLWIPGFAEMAAPLYPLTKPGTLFKWGPDQQKAYQEIKQALLTAPALGLPDLTKPFELFVDEKQGYAKGVLTQKLGPWRRPVAYLSKKLDPVAAGWPPCLRMVAAIAVLTKDVGKLTMGQPLVILAPHAVEALVKQPPDRWLSNARMTHYQALLLDTDRVQFGPIVALNPATLLPLPEEGLQHDCLDILAEAHGTRPDLTDQPLPDADHTWYTDGSSFLQEGQRRAGAAVTTETEVIWAKALPAGTSAQRAELIALTQALKMAAGKKLNVYTDSRYAFATAHIHGEIYRRRGWLTSEGKEIKNKDEILALLKALFLPKRLSIIHCPGHQKGNHAEARGNRMADQAAREVATRETPETSTLLAGKRTADGSEFEKRTADGSEFESPKKKAKVE

SEQ ID NO: 2424 - protein, 2089 aa, synthetic construct
MPAAKRVKLDGGDKKYSIGLDIGTNSVGWAVITDEYKVPSKKFKVLGNTDRHSIKKNLIGALLFDSGETAEATRLKRTARRRYTRRKNRICYLQEIFSNEMAKVDDSFFHRLEESFLVEEDKKHERHPIFGNIVDEVAYHEKYPTIYHLRKKLVDSTDKADLRLIYLALAHMIKFRGHFLIEGDLNPDNSDVDKLFIQLVQTYNQLFEENPINASGVDAKAILSARLSKSRRLENLIAQLPGEKKNGLFGNLIALSLGLTPNFKSNFDLAEDAKLQLSKDTYDDDLDNLLAQIGDQYADLFLAAKNLSDAILLSDILRVNTEITKAPLSASMIKRYDEHHQDLTLLKALVRQQLPEKYKEIFFDQSKNGYAGYIDGGASQEEFYKFIKPILEKMDGTEELLVKLNREDLLRKQRTFDNGSIPHQIHLGELHAILRRQEDFYPFLKDNREKIEKILTFRIPYYVGPLARGNSRFAWMTRKSEETITPWNFEEVVDKGASAQSFIERMTNFDKNLPNEKVLPKHSLLYEYFTVYNELTKVKYVTEGMRKPAFLSGEQKKAIVDLLFKTNRKVTVKQLKEDYFKKIECFDSVEISGVEDRFNASLGTYHDLLKIIKDKDFLDNEENEDILEDIVLTLTLFEDREMIEERLKTYAHLFDDKVMKQLKRRRYTGWGRLSRKLINGIRDKQSGKTILDFLKSDGFANRNFMQLIHDDSLTFKEDIQKAQVSGQGDSLHEHIANLAGSPAIKKGILQTVKVVDELVKVMGRHKPENIVIEMARENQTTQKGQKNSRERMKRIEEGIKELGSQILKEHPVENTQLQNEKLYLYYLQNGRDMYVDQELDINRLSDYDVDHIVPQSFLKDDSIDNKVLTRSDKARGKSDNVPSEEVVKKMKNYWRQLLNAKLITQRKFDNLTKAERGGLSELDKAGFIKRQLVETRQITKHVAQILDSRMNTKYDENDKLIREVKVITLKSKLVSDFRKDFQFYKVREINNYHHAHDAYLNAVVGTALIKKYPKLESEFVYGDYKVYDVRKMIAKSEQEIGKATAKYFFYSNIMNFFKTEITLANGEIRKRPLIETNGETGEIVWDKGRDFATVRKVLSMPQVNIVKKTEVQTGGFSKESILPKRNSDKLIARKKDWDPKKYGGFDSPTVAYSVLVVAKVEKGKSKKLKSVKELLGITIMERSSFEKNPIDFLEAKGYKEVKKDLIIKLPKYSLFELENGRKRMLASAGELQKGNELALPSKYVNFLYLASHYEKLKGSPEDNEQKQLFVEQHKHYLDEIIEQISEFSKRVILADANLDKVLSAYNKHRDKPIREQAENIIHLFTLTNLGAPAAFKYFDTTIDRKRYTSTKEVLDATLIHQSITGLYETRIDLSQLGGDGGGGGGGGTLNIEDEYRLHETSKGPDVPLGSTWLSDFPQAWAETGGMGLAFRQAPLIISLKATSTPVSIKQYPMSQEARLGIKPHIQRLLDQGILVPCQSPWNTPLLPVKKPGTNDYRPVQDLREVNKRVEDIHPTVPNPYNLLSGLPPSHQWYTVLDLKDAFFCLRLHPTSQSLFAFEWKDPEMGISGQLTWTRLPQGFKNSPTLFNEALHRDLADFRIQHPDLILLQYVDDLLLAATSELDCQQGTRALLQTLGDLGYRASAKKAQICQKQVKYLGYLLKEGQRWLTEARKETVMGQPTPKTPRQLREFLGTAGLCRLWIPGFAEMAAPLYPLTKPGTLFKWGPDQQKAYQEIKQALLTAPALGLPDLTKPFELFVDEKQGYAKGVLTQKLGPWRRPVAYLSKKLDPVAAGWPPCLRMVAAIAVLTKDVGKLTMGQPLVILAPHAVEALVKQPPDRWLSNARMTHYQALLLDTDRVQFGPIVALNPATLLPLPEEGLQHDCLDILAEAHGTRPDLTDQPLPDADHTWYTDGSSFLQEGQRRAGAAVTTETEVIWAKALPAGTSAQRAELIALTQALKMAAGKKLNVYTDSRYAFATAHIHGEIYRRRGWLTSEGKEIKNKDEILALLKALFLPKRLSIIHCPGHQKGNHAEARGNRMADQAAREVATRETPETSTLLAGKRTADGSEFEKRTADGSEFESPKKKAKVE

SEQ ID NO: 2425 - protein, 2094 aa, synthetic construct
MPAAKRVKLDGGDKKYSIGLDIGTNSVGWAVITDEYKVPSKKFKVLGNTDRHSIKKNLIGALLFDSGETAEATRLKRTARRRYTRRKNRICYLQEIFSNEMAKVDDSFFHRLEESFLVEEDKKHERHPIFGNIVDEVAYHEKYPTIYHLRKKLVDSTDKADLRLIYLALAHMIKFRGHFLIEGDLNPDNSDVDKLFIQLVQTYNQLFEENPINASGVDAKAILSARLSKSRRLENLIAQLPGEKKNGLFGNLIALSLGLTPNFKSNFDLAEDAKLQLSKDTYDDDLDNLLAQIGDQYADLFLAAKNLSDAILLSDILRVNTEITKAPLSASMIKRYDEHHQDLTLLKALVRQQLPEKYKEIFFDQSKNGYAGYIDGGASQEEFYKFIKPILEKMDGTEELLVKLNREDLLRKQRTFDNGSIPHQIHLGELHAILRRQEDFYPFLKDNREKIEKILTFRIPYYVGPLARGNSRFAWMTRKSEETITPWNFEEVVDKGASAQSFIERMTNFDKNLPNEKVLPKHSLLYEYFTVYNELTKVKYVTEGMRKPAFLSGEQKKAIVDLLFKTNRKVTVKQLKEDYFKKIECFDSVEISGVEDRFNASLGTYHDLLKIIKDKDFLDNEENEDILEDIVLTLTLFEDREMIEERLKTYAHLFDDKVMKQLKRRRYTGWGRLSRKLINGIRDKQSGKTILDFLKSDGFANRNFMQLIHDDSLTFKEDIQKAQVSGQGDSLHEHIANLAGSPAIKKGILQTVKVVDELVKVMGRHKPENIVIEMARENQTTQKGQKNSRERMKRIEEGIKELGSQILKEHPVENTQLQNEKLYLYYLQNGRDMYVDQELDINRLSDYDVDHIVPQSFLKDDSIDNKVLTRSDKARGKSDNVPSEEVVKKMKNYWRQLLNAKLITQRKFDNLTKAERGGLSELDKAGFIKRQLVETRQITKHVAQILDSRMNTKYDENDKLIREVKVITLKSKLVSDFRKDFQFYKVREINNYHHAHDAYLNAVVGTALIKKYPKLESEFVYGDYKVYDVRKMIAKSEQEIGKATAKYFFYSNIMNFFKTEITLANGEIRKRPLIETNGETGEIVWDKGRDFATVRKVLSMPQVNIVKKTEVQTGGFSKESILPKRNSDKLIARKKDWDPKKYGGFDSPTVAYSVLVVAKVEKGKSKKLKSVKELLGITIMERSSFEKNPIDFLEAKGYKEVKKDLIIKLPKYSLFELENGRKRMLASAGELQKGNELALPSKYVNFLYLASHYEKLKGSPEDNEQKQLFVEQHKHYLDEIIEQISEFSKRVILADANLDKVLSAYNKHRDKPIREQAENIIHLFTLTNLGAPAAFKYFDTTIDRKRYTSTKEVLDATLIHQSITGLYETRIDLSQLGGDGGGSSGGGGGSGGTLNIEDEYRLHETSKGPDVPLGSTWLSDFPQAWAETGGMGLAFRQAPLIISLKATSTPVSIKQYPMSQEARLGIKPHIQRLLDQGILVPCQSPWNTPLLPVKKPGTNDYRPVQDLREVNKRVEDIHPTVPNPYNLLSGLPPSHQWYTVLDLKDAFFCLRLHPTSQSLFAFEWKDPEMGISGQLTWTRLPQGFKNSPTLFNEALHRDLADFRIQHPDLILLQYVDDLLLAATSELDCQQGTRALLQTLGDLGYRASAKKAQICQKQVKYLGYLLKEGQRWLTEARKETVMGQPTPKTPRQLREFLGTAGLCRLWIPGFAEMAAPLYPLTKPGTLFKWGPDQQKAYQEIKQALLTAPALGLPDLTKPFELFVDEKQGYAKGVLTQKLGPWRRPVAYLSKKLDPVAAGWPPCLRMVAAIAVLTKDVGKLTMGQPLVILAPHAVEALVKQPPDRWLSNARMTHYQALLLDTDRVQFGPIVALNPATLLPLPEEGLQHDCLDILAEAHGTRPDLTDQPLPDADHTWYTDGSSFLQEGQRRAGAAVTTETEVIWAKALPAGTSAQRAELIALTQALKMAAGKKLNVYTDSRYAFATAHIHGEIYRRRGWLTSEGKEIKNKDEILALLKALFLPKRLSIIHCPGHQKGNHAEARGNRMADQAAREVATRETPETSTLLAGKRTADGSEFEKRTADGSEFESPKKKAKVE

SEQ ID NO: 2426 - protein, 2093 aa, synthetic construct
MPAAKRVKLDGGDKKYSIGLDIGTNSVGWAVITDEYKVPSKKFKVLGNTDRHSIKKNLIGALLFDSGETAEATRLKRTARRRYTRRKNRICYLQEIFSNEMAKVDDSFFHRLEESFLVEEDKKHERHPIFGNIVDEVAYHEKYPTIYHLRKKLVDSTDKADLRLIYLALAHMIKFRGHFLIEGDLNPDNSDVDKLFIQLVQTYNQLFEENPINASGVDAKAILSARLSKSRRLENLIAQLPGEKKNGLFGNLIALSLGLTPNFKSNFDLAEDAKLQLSKDTYDDDLDNLLAQIGDQYADLFLAAKNLSDAILLSDILRVNTEITKAPLSASMIKRYDEHHQDLTLLKALVRQQLPEKYKEIFFDQSKNGYAGYIDGGASQEEFYKFIKPILEKMDGTEELLVKLNREDLLRKQRTFDNGSIPHQIHLGELHAILRRQEDFYPFLKDNREKIEKILTFRIPYYVGPLARGNSRFAWMTRKSEETITPWNFEEVVDKGASAQSFIERMTNFDKNLPNEKVLPKHSLLYEYFTVYNELTKVKYVTEGMRKPAFLSGEQKKAIVDLLFKTNRKVTVKQLKEDYFKKIECFDSVEISGVEDRFNASLGTYHDLLKIIKDKDFLDNEENEDILEDIVLTLTLFEDREMIEERLKTYAHLFDDKVMKQLKRRRYTGWGRLSRKLINGIRDKQSGKTILDFLKSDGFANRNFMQLIHDDSLTFKEDIQKAQVSGQGDSLHEHIANLAGSPAIKKGILQTVKVVDELVKVMGRHKPENIVIEMARENQTTQKGQKNSRERMKRIEEGIKELGSQILKEHPVENTQLQNEKLYLYYLQNGRDMYVDQELDINRLSDYDVDHIVPQSFLKDDSIDNKVLTRSDKARGKSDNVPSEEVVKKMKNYWRQLLNAKLITQRKFDNLTKAERGGLSELDKAGFIKRQLVETRQITKHVAQILDSRMNTKYDENDKLIREVKVITLKSKLVSDFRKDFQFYKVREINNYHHAHDAYLNAVVGTALIKKYPKLESEFVYGDYKVYDVRKMIAKSEQEIGKATAKYFFYSNIMNFFKTEITLANGEIRKRPLIETNGETGEIVWDKGRDFATVRKVLSMPQVNIVKKTEVQTGGFSKESILPKRNSDKLIARKKDWDPKKYGGFDSPTVAYSVLVVAKVEKGKSKKLKSVKELLGITIMERSSFEKNPIDFLEAKGYKEVKKDLIIKLPKYSLFELENGRKRMLASAGELQKGNELALPSKYVNFLYLASHYEKLKGSPEDNEQKQLFVEQHKHYLDEIIEQISEFSKRVILADANLDKVLSAYNKHRDKPIREQAENIIHLFTLTNLGAPAAFKYFDTTIDRKRYTSTKEVLDATLIHQSITGLYETRIDLSQLGGDGGEAAAKGGSGGTLNIEDEYRLHETSKGPDVPLGSTWLSDFPQAWAETGGMGLAFRQAPLIISLKATSTPVSIKQYPMSQEARLGIKPHIQRLLDQGILVPCQSPWNTPLLPVKKPGTNDYRPVQDLREVNKRVEDIHPTVPNPYNLLSGLPPSHQWYTVLDLKDAFFCLRLHPTSQSLFAFEWKDPEMGISGQLTWTRLPQGFKNSPTLFNEALHRDLADFRIQHPDLILLQYVDDLLLAATSELDCQQGTRALLQTLGDLGYRASAKKAQICQKQVKYLGYLLKEGQRWLTEARKETVMGQPTPKTPRQLREFLGTAGLCRLWIPGFAEMAAPLYPLTKPGTLFKWGPDQQKAYQEIKQALLTAPALGLPDLTKPFELFVDEKQGYAKGVLTQKLGPWRRPVAYLSKKLDPVAAGWPPCLRMVAAIAVLTKDVGKLTMGQPLVILAPHAVEALVKQPPDRWLSNARMTHYQALLLDTDRVQFGPIVALNPATLLPLPEEGLQHDCLDILAEAHGTRPDLTDQPLPDADHTWYTDGSSFLQEGQRRAGAAVTTETEVIWAKALPAGTSAQRAELIALTQALKMAAGKKLNVYTDSRYAFATAHIHGEIYRRRGWLTSEGKEIKNKDEILALLKALFLPKRLSIIHCPGHQKGNHAEARGNRMADQAAREVATRETPETSTLLAGKRTADGSEFEKRTADGSEFESPKKKAKVE

SEQ ID NO: 2427 - protein, 2088 aa, synthetic construct
MPAAKRVKLDGGDKKYSIGLDIGTNSVGWAVITDEYKVPSKKFKVLGNTDRHSIKKNLIGALLFDSGETAEATRLKRTARRRYTRRKNRICYLQEIFSNEMAKVDDSFFHRLEESFLVEEDKKHERHPIFGNIVDEVAYHEKYPTIYHLRKKLVDSTDKADLRLIYLALAHMIKFRGHFLIEGDLNPDNSDVDKLFIQLVQTYNQLFEENPINASGVDAKAILSARLSKSRRLENLIAQLPGEKKNGLFGNLIALSLGLTPNFKSNFDLAEDAKLQLSKDTYDDDLDNLLAQIGDQYADLFLAAKNLSDAILLSDILRVNTEITKAPLSASMIKRYDEHHQDLTLLKALVRQQLPEKYKEIFFDQSKNGYAGYIDGGASQEEFYKFIKPILEKMDGTEELLVKLNREDLLRKQRTFDNGSIPHQIHLGELHAILRRQEDFYPFLKDNREKIEKILTFRIPYYVGPLARGNSRFAWMTRKSEETITPWNFEEVVDKGASAQSFIERMTNFDKNLPNEKVLPKHSLLYEYFTVYNELTKVKYVTEGMRKPAFLSGEQKKAIVDLLFKTNRKVTVKQLKEDYFKKIECFDSVEISGVEDRFNASLGTYHDLLKIIKDKDFLDNEENEDILEDIVLTLTLFEDREMIEERLKTYAHLFDDKVMKQLKRRRYTGWGRLSRKLINGIRDKQSGKTILDFLKSDGFANRNFMQLIHDDSLTFKEDIQKAQVSGQGDSLHEHIANLAGSPAIKKGILQTVKVVDELVKVMGRHKPENIVIEMARENQTTQKGQKNSRERMKRIEEGIKELGSQILKEHPVENTQLQNEKLYLYYLQNGRDMYVDQELDINRLSDYDVDHIVPQSFLKDDSIDNKVLTRSDKARGKSDNVPSEEVVKKMKNYWRQLLNAKLITQRKFDNLTKAERGGLSELDKAGFIKRQLVETRQITKHVAQILDSRMNTKYDENDKLIREVKVITLKSKLVSDFRKDFQFYKVREINNYHHAHDAYLNAVVGTALIKKYPKLESEFVYGDYKVYDVRKMIAKSEQEIGKATAKYFFYSNIMNFFKTEITLANGEIRKRPLIETNGETGEIVWDKGRDFATVRKVLSMPQVNIVKKTEVQTGGFSKESILPKRNSDKLIARKKDWDPKKYGGFDSPTVAYSVLVVAKVEKGKSKKLKSVKELLGITIMERSSFEKNPIDFLEAKGYKEVKKDLIIKLPKYSLFELENGRKRMLASAGELQKGNELALPSKYVNFLYLASHYEKLKGSPEDNEQKQLFVEQHKHYLDEIIEQISEFSKRVILADANLDKVLSAYNKHRDKPIREQAENIIHLFTLTNLGAPAAFKYFDTTIDRKRYTSTKEVLDATLIHQSITGLYETRIDLSQLGGDGGPAPGGTLNIEDEYRLHETSKGPDVPLGSTWLSDFPQAWAETGGMGLAFRQAPLIISLKATSTPVSIKQYPMSQEARLGIKPHIQRLLDQGILVPCQSPWNTPLLPVKKPGTNDYRPVQDLREVNKRVEDIHPTVPNPYNLLSGLPPSHQWYTVLDLKDAFFCLRLHPTSQSLFAFEWKDPEMGISGQLTWTRLPQGFKNSPTLFNEALHRDLADFRIQHPDLILLQYVDDLLLAATSELDCQQGTRALLQTLGDLGYRASAKKAQICQKQVKYLGYLLKEGQRWLTEARKETVMGQPTPKTPRQLREFLGTAGLCRLWIPGFAEMAAPLYPLTKPGTLFKWGPDQQKAYQEIKQALLTAPALGLPDLTKPFELFVDEKQGYAKGVLTQKLGPWRRPVAYLSKKLDPVAAGWPPCLRMVAAIAVLTKDVGKLTMGQPLVILAPHAVEALVKQPPDRWLSNARMTHYQALLLDTDRVQFGPIVALNPATLLPLPEEGLQHDCLDILAEAHGTRPDLTDQPLPDADHTWYTDGSSFLQEGQRRAGAAVTTETEVIWAKALPAGTSAQRAELIALTQALKMAAGKKLNVYTDSRYAFATAHIHGEIYRRRGWLTSEGKEIKNKDEILALLKALFLPKRLSIIHCPGHQKGNHAEARGNRMADQAAREVATRETPETSTLLAGKRTADGSEFEKRTADGSEFESPKKKAKVE

SEQ ID NO: 2428 - protein, 2096 aa, synthetic construct
MPAAKRVKLDGGDKKYSIGLDIGTNSVGWAVITDEYKVPSKKFKVLGNTDRHSIKKNLIGALLFDSGETAEATRLKRTARRRYTRRKNRICYLQEIFSNEMAKVDDSFFHRLEESFLVEEDKKHERHPIFGNIVDEVAYHEKYPTIYHLRKKLVDSTDKADLRLIYLALAHMIKFRGHFLIEGDLNPDNSDVDKLFIQLVQTYNQLFEENPINASGVDAKAILSARLSKSRRLENLIAQLPGEKKNGLFGNLIALSLGLTPNFKSNFDLAEDAKLQLSKDTYDDDLDNLLAQIGDQYADLFLAAKNLSDAILLSDILRVNTEITKAPLSASMIKRYDEHHQDLTLLKALVRQQLPEKYKEIFFDQSKNGYAGYIDGGASQEEFYKFIKPILEKMDGTEELLVKLNREDLLRKQRTFDNGSIPHQIHLGELHAILRRQEDFYPFLKDNREKIEKILTFRIPYYVGPLARGNSRFAWMTRKSEETITPWNFEEVVDKGASAQSFIERMTNFDKNLPNEKVLPKHSLLYEYFTVYNELTKVKYVTEGMRKPAFLSGEQKKAIVDLLFKTNRKVTVKQLKEDYFKKIECFDSVEISGVEDRFNASLGTYHDLLKIIKDKDFLDNEENEDILEDIVLTLTLFEDREMIEERLKTYAHLFDDKVMKQLKRRRYTGWGRLSRKLINGIRDKQSGKTILDFLKSDGFANRNFMQLIHDDSLTFKEDIQKAQVSGQGDSLHEHIANLAGSPAIKKGILQTVKVVDELVKVMGRHKPENIVIEMARENQTTQKGQKNSRERMKRIEEGIKELGSQILKEHPVENTQLQNEKLYLYYLQNGRDMYVDQELDINRLSDYDVDHIVPQSFLKDDSIDNKVLTRSDKARGKSDNVPSEEVVKKMKNYWRQLLNAKLITQRKFDNLTKAERGGLSELDKAGFIKRQLVETRQITKHVAQILDSRMNTKYDENDKLIREVKVITLKSKLVSDFRKDFQFYKVREINNYHHAHDAYLNAVVGTALIKKYPKLESEFVYGDYKVYDVRKMIAKSEQEIGKATAKYFFYSNIMNFFKTEITLANGEIRKRPLIETNGETGEIVWDKGRDFATVRKVLSMPQVNIVKKTEVQTGGFSKESILPKRNSDKLIARKKDWDPKKYGGFDSPTVAYSVLVVAKVEKGKSKKLKSVKELLGITIMERSSFEKNPIDFLEAKGYKEVKKDLIIKLPKYSLFELENGRKRMLASAGELQKGNELALPSKYVNFLYLASHYEKLKGSPEDNEQKQLFVEQHKHYLDEIIEQISEFSKRVILADANLDKVLSAYNKHRDKPIREQAENIIHLFTLTNLGAPAAFKYFDTTIDRKRYTSTKEVLDATLIHQSITGLYETRIDLSQLGGDGGPAPGSSEAAAKGGTLNIEDEYRLHETSKGPDVPLGSTWLSDFPQAWAETGGMGLAFRQAPLIISLKATSTPVSIKQYPMSQEARLGIKPHIQRLLDQGILVPCQSPWNTPLLPVKKPGTNDYRPVQDLREVNKRVEDIHPTVPNPYNLLSGLPPSHQWYTVLDLKDAFFCLRLHPTSQSLFAFEWKDPEMGISGQLTWTRLPQGFKNSPTLFNEALHRDLADFRIQHPDLILLQYVDDLLLAATSELDCQQGTRALLQTLGDLGYRASAKKAQICQKQVKYLGYLLKEGQRWLTEARKETVMGQPTPKTPRQLREFLGTAGLCRLWIPGFAEMAAPLYPLTKPGTLFKWGPDQQKAYQEIKQALLTAPALGLPDLTKPFELFVDEKQGYAKGVLTQKLGPWRRPVAYLSKKLDPVAAGWPPCLRMVAAIAVLTKDVGKLTMGQPLVILAPHAVEALVKQPPDRWLSNARMTHYQALLLDTDRVQFGPIVALNPATLLPLPEEGLQHDCLDILAEAHGTRPDLTDQPLPDADHTWYTDGSSFLQEGQRRAGAAVTTETEVIWAKALPAGTSAQRAELIALTQALKMAAGKKLNVYTDSRYAFATAHIHGEIYRRRGWLTSEGKEIKNKDEILALLKALFLPKRLSIIHCPGHQKGNHAEARGNRMADQAAREVATRETPETSTLLAGKRTADGSEFEKRTADGSEFESPKKKAKVE

SEQ ID NO: 2429 - protein, 2115 aa, synthetic construct
MPAAKRVKLDGGDKKYSIGLDIGTNSVGWAVITDEYKVPSKKFKVLGNTDRHSIKKNLIGALLFDSGETAEATRLKRTARRRYTRRKNRICYLQEIFSNEMAKVDDSFFHRLEESFLVEEDKKHERHPIFGNIVDEVAYHEKYPTIYHLRKKLVDSTDKADLRLIYLALAHMIKFRGHFLIEGDLNPDNSDVDKLFIQLVQTYNQLFEENPINASGVDAKAILSARLSKSRRLENLIAQLPGEKKNGLFGNLIALSLGLTPNFKSNFDLAEDAKLQLSKDTYDDDLDNLLAQIGDQYADLFLAAKNLSDAILLSDILRVNTEITKAPLSASMIKRYDEHHQDLTLLKALVRQQLPEKYKEIFFDQSKNGYAGYIDGGASQEEFYKFIKPILEKMDGTEELLVKLNREDLLRKQRTFDNGSIPHQIHLGELHAILRRQEDFYPFLKDNREKIEKILTFRIPYYVGPLARGNSRFAWMTRKSEETITPWNFEEVVDKGASAQSFIERMTNFDKNLPNEKVLPKHSLLYEYFTVYNELTKVKYVTEGMRKPAFLSGEQKKAIVDLLFKTNRKVTVKQLKEDYFKKIECFDSVEISGVEDRFNASLGTYHDLLKIIKDKDFLDNEENEDILEDIVLTLTLFEDREMIEERLKTYAHLFDDKVMKQLKRRRYTGWGRLSRKLINGIRDKQSGKTILDFLKSDGFANRNFMQLIHDDSLTFKEDIQKAQVSGQGDSLHEHIANLAGSPAIKKGILQTVKVVDELVKVMGRHKPENIVIEMARENQTTQKGQKNSRERMKRIEEGIKELGSQILKEHPVENTQLQNEKLYLYYLQNGRDMYVDQELDINRLSDYDVDHIVPQSFLKDDSIDNKVLTRSDKARGKSDNVPSEEVVKKMKNYWRQLLNAKLITQRKFDNLTKAERGGLSELDKAGFIKRQLVETRQITKHVAQILDSRMNTKYDENDKLIREVKVITLKSKLVSDFRKDFQFYKVREINNYHHAHDAYLNAVVGTALIKKYPKLESEFVYGDYKVYDVRKMIAKSEQEIGKATAKYFFYSNIMNFFKTEITLANGEIRKRPLIETNGETGEIVWDKGRDFATVRKVLSMPQVNIVKKTEVQTGGFSKESILPKRNSDKLIARKKDWDPKKYGGFDSPTVAYSVLVVAKVEKGKSKKLKSVKELLGITIMERSSFEKNPIDFLEAKGYKEVKKDLIIKLPKYSLFELENGRKRMLASAGELQKGNELALPSKYVNFLYLASHYEKLKGSPEDNEQKQLFVEQHKHYLDEIIEQISEFSKRVILADANLDKVLSAYNKHRDKPIREQAENIIHLFTLTNLGAPAAFKYFDTTIDRKRYTSTKEVLDATLIHQSITGLYETRIDLSQLGGDGGGGGGSGGGGSGGGGSGGGGSGGGGSGGGGSGGTLNIEDEYRLHETSKGPDVPLGSTWLSDFPQAWAETGGMGLAFRQAPLIISLKATSTPVSIKQYPMSQEARLGIKPHIQRLLDQGILVPCQSPWNTPLLPVKKPGTNDYRPVQDLREVNKRVEDIHPTVPNPYNLLSGLPPSHQWYTVLDLKDAFFCLRLHPTSQSLFAFEWKDPEMGISGQLTWTRLPQGFKNSPTLFNEALHRDLADFRIQHPDLILLQYVDDLLLAATSELDCQQGTRALLQTLGDLGYRASAKKAQICQKQVKYLGYLLKEGQRWLTEARKETVMGQPTPKTPRQLREFLGTAGLCRLWIPGFAEMAAPLYPLTKPGTLFKWGPDQQKAYQEIKQALLTAPALGLPDLTKPFELFVDEKQGYAKGVLTQKLGPWRRPVAYLSKKLDPVAAGWPPCLRMVAAIAVLTKDVGKLTMGQPLVILAPHAVEALVKQPPDRWLSNARMTHYQALLLDTDRVQFGPIVALNPATLLPLPEEGLQHDCLDILAEAHGTRPDLTDQPLPDADHTWYTDGSSFLQEGQRRAGAAVTTETEVIWAKALPAGTSAQRAELIALTQALKMAAGKKLNVYTDSRYAFATAHIHGEIYRRRGWLTSEGKEIKNKDEILALLKALFLPKRLSIIHCPGHQKGNHAEARGNRMADQAAREVATRETPETSTLLAGKRTADGSEFEKRTADGSEFESPKKKAKVE

SEQ ID NO: 2430 - protein, 2098 aa, synthetic construct
MPAAKRVKLDGGDKKYSIGLDIGTNSVGWAVITDEYKVPSKKFKVLGNTDRHSIKKNLIGALLFDSGETAEATRLKRTARRRYTRRKNRICYLQEIFSNEMAKVDDSFFHRLEESFLVEEDKKHERHPIFGNIVDEVAYHEKYPTIYHLRKKLVDSTDKADLRLIYLALAHMIKFRGHFLIEGDLNPDNSDVDKLFIQLVQTYNQLFEENPINASGVDAKAILSARLSKSRRLENLIAQLPGEKKNGLFGNLIALSLGLTPNFKSNFDLAEDAKLQLSKDTYDDDLDNLLAQIGDQYADLFLAAKNLSDAILLSDILRVNTEITKAPLSASMIKRYDEHHQDLTLLKALVRQQLPEKYKEIFFDQSKNGYAGYIDGGASQEEFYKFIKPILEKMDGTEELLVKLNREDLLRKQRTFDNGSIPHQIHLGELHAILRRQEDFYPFLKDNREKIEKILTFRIPYYVGPLARGNSRFAWMTRKSEETITPWNFEEVVDKGASAQSFIERMTNFDKNLPNEKVLPKHSLLYEYFTVYNELTKVKYVTEGMRKPAFLSGEQKKAIVDLLFKTNRKVTVKQLKEDYFKKIECFDSVEISGVEDRFNASLGTYHDLLKIIKDKDFLDNEENEDILEDIVLTLTLFEDREMIEERLKTYAHLFDDKVMKQLKRRRYTGWGRLSRKLINGIRDKQSGKTILDFLKSDGFANRNFMQLIHDDSLTFKEDIQKAQVSGQGDSLHEHIANLAGSPAIKKGILQTVKVVDELVKVMGRHKPENIVIEMARENQTTQKGQKNSRERMKRIEEGIKELGSQILKEHPVENTQLQNEKLYLYYLQNGRDMYVDQELDINRLSDYDVDHIVPQSFLKDDSIDNKVLTRSDKARGKSDNVPSEEVVKKMKNYWRQLLNAKLITQRKFDNLTKAERGGLSELDKAGFIKRQLVETRQITKHVAQILDSRMNTKYDENDKLIREVKVITLKSKLVSDFRKDFQFYKVREINNYHHAHDAYLNAVVGTALIKKYPKLESEFVYGDYKVYDVRKMIAKSEQEIGKATAKYFFYSNIMNFFKTEITLANGEIRKRPLIETNGETGEIVWDKGRDFATVRKVLSMPQVNIVKKTEVQTGGFSKESILPKRNSDKLIARKKDWDPKKYGGFDSPTVAYSVLVVAKVEKGKSKKLKSVKELLGITIMERSSFEKNPIDFLEAKGYKEVKKDLIIKLPKYSLFELENGRKRMLASAGELQKGNELALPSKYVNFLYLASHYEKLKGSPEDNEQKQLFVEQHKHYLDEIIEQISEFSKRVILADANLDKVLSAYNKHRDKPIREQAENIIHLFTLTNLGAPAAFKYFDTTIDRKRYTSTKEVLDATLIHQSITGLYETRIDLSQLGGDGGPAPAPAPAPAPAPGGTLNIEDEYRLHETSKGPDVPLGSTWLSDFPQAWAETGGMGLAFRQAPLIISLKATSTPVSIKQYPMSQEARLGIKPHIQRLLDQGILVPCQSPWNTPLLPVKKPGTNDYRPVQDLREVNKRVEDIHPTVPNPYNLLSGLPPSHQWYTVLDLKDAFFCLRLHPTSQSLFAFEWKDPEMGISGQLTWTRLPQGFKNSPTLFNEALHRDLADFRIQHPDLILLQYVDDLLLAATSELDCQQGTRALLQTLGDLGYRASAKKAQICQKQVKYLGYLLKEGQRWLTEARKETVMGQPTPKTPRQLREFLGKAGLCRLFIPGFAEMAAPLYPLTKPGTLFKWGPDQQKAYQEIKQALLTAPALGLPDLTKPFELFVDEKQGYAKGVLTQKLGPWRRPVAYLSKKLDPVAAGWPPCLRMVAAIAVLTKDVGKLTMGQPLVILAPHAVEALVKQPPDRWLSNARMTHYQALLLDTDRVQFGPIVALNPATLLPLPEEGLQHDCLDILAEAHGTRPDLTDQPLPDADHTWYTDGSSFLQEGQRRAGAAVTTETEVIWAKALPAGTSAQRAELIALTQALKMAAGKKLNVYTDSRYAFATAHIHGEIYRRRGWLTSEGKEIKNKDEILALLKALFLPKRLSIIHCPGHQKGNHAEARGNRMADQAAREVATRETPETSTLLAGKRTADGSEFEKRTADGSEFESPKKKAKVE

SEQ ID NO: 2431 - protein, 2096 aa, synthetic construct
MPAAKRVKLDGGDKKYSIGLDIGTNSVGWAVITDEYKVPSKKFKVLGNTDRHSIKKNLIGALLFDSGETAEATRLKRTARRRYTRRKNRICYLQEIFSNEMAKVDDSFFHRLEESFLVEEDKKHERHPIFGNIVDEVAYHEKYPTIYHLRKKLVDSTDKADLRLIYLALAHMIKFRGHFLIEGDLNPDNSDVDKLFIQLVQTYNQLFEENPINASGVDAKAILSARLSKSRRLENLIAQLPGEKKNGLFGNLIALSLGLTPNFKSNFDLAEDAKLQLSKDTYDDDLDNLLAQIGDQYADLFLAAKNLSDAILLSDILRVNTEITKAPLSASMIKRYDEHHQDLTLLKALVRQQLPEKYKEIFFDQSKNGYAGYIDGGASQEEFYKFIKPILEKMDGTEELLVKLNREDLLRKQRTFDNGSIPHQIHLGELHAILRRQEDFYPFLKDNREKIEKILTFRIPYYVGPLARGNSRFAWMTRKSEETITPWNFEEVVDKGASAQSFIERMTNFDKNLPNEKVLPKHSLLYEYFTVYNELTKVKYVTEGMRKPAFLSGEQKKAIVDLLFKTNRKVTVKQLKEDYFKKIECFDSVEISGVEDRFNASLGTYHDLLKIIKDKDFLDNEENEDILEDIVLTLTLFEDREMIEERLKTYAHLFDDKVMKQLKRRRYTGWGRLSRKLINGIRDKQSGKTILDFLKSDGFANRNFMQLIHDDSLTFKEDIQKAQVSGQGDSLHEHIANLAGSPAIKKGILQTVKVVDELVKVMGRHKPENIVIEMARENQTTQKGQKNSRERMKRIEEGIKELGSQILKEHPVENTQLQNEKLYLYYLQNGRDMYVDQELDINRLSDYDVDHIVPQSFLKDDSIDNKVLTRSDKARGKSDNVPSEEVVKKMKNYWRQLLNAKLITQRKFDNLTKAERGGLSELDKAGFIKRQLVETRQITKHVAQILDSRMNTKYDENDKLIREVKVITLKSKLVSDFRKDFQFYKVREINNYHHAHDAYLNAVVGTALIKKYPKLESEFVYGDYKVYDVRKMIAKSEQEIGKATAKYFFYSNIMNFFKTEITLANGEIRKRPLIETNGETGEIVWDKGRDFATVRKVLSMPQVNIVKKTEVQTGGFSKESILPKRNSDKLIARKKDWDPKKYGGFDSPTVAYSVLVVAKVEKGKSKKLKSVKELLGITIMERSSFEKNPIDFLEAKGYKEVKKDLIIKLPKYSLFELENGRKRMLASAGELQKGNELALPSKYVNFLYLASHYEKLKGSPEDNEQKQLFVEQHKHYLDEIIEQISEFSKRVILADANLDKVLSAYNKHRDKPIREQAENIIHLFTLTNLGAPAAFKYFDTTIDRKRYTSTKEVLDATLIHQSITGLYETRIDLSQLGGDGGEAAAKPAPGGSGGTLNIEDEYRLHETSKGPDVPLGSTWLSDFPQAWAETGGMGLAFRQAPLIISLKATSTPVSIKQYPMSQEARLGIKPHIQRLLDQGILVPCQSPWNTPLLPVKKPGTNDYRPVQDLREVNKRVEDIHPTVPNPYNLLSGLPPSHQWYTVLDLKDAFFCLRLHPTSQSLFAFEWKDPEMGISGQLTWTRLPQGFKNSPTLFNEALHRDLADFRIQHPDLILLQYVDDLLLAATSELDCQQGTRALLQTLGDLGYRASAKKAQICQKQVKYLGYLLKEGQRWLTEARKETVMGQPTPKTPRQLREFLGKAGLCRLFIPGFAEMAAPLYPLTKPGTLFKWGPDQQKAYQEIKQALLTAPALGLPDLTKPFELFVDEKQGYAKGVLTQKLGPWRRPVAYLSKKLDPVAAGWPPCLRMVAAIAVLTKDVGKLTMGQPLVILAPHAVEALVKQPPDRWLSNARMTHYQALLLDTDRVQFGPIVALNPATLLPLPEEGLQHDCLDILAEAHGTRPDLTDQPLPDADHTWYTDGSSFLQEGQRRAGAAVTTETEVIWAKALPAGTSAQRAELIALTQALKMAAGKKLNVYTDSRYAFATAHIHGEIYRRRGWLTSEGKEIKNKDEILALLKALFLPKRLSIIHCPGHQKGNHAEARGNRMADQAAREVATRETPETSTLLAGKRTADGSEFEKRTADGSEFESPKKKAKVE

SEQ ID NO: 2432 - protein, 2094 aa, synthetic construct
MPAAKRVKLDGGDKKYSIGLDIGTNSVGWAVITDEYKVPSKKFKVLGNTDRHSIKKNLIGALLFDSGETAEATRLKRTARRRYTRRKNRICYLQEIFSNEMAKVDDSFFHRLEESFLVEEDKKHERHPIFGNIVDEVAYHEKYPTIYHLRKKLVDSTDKADLRLIYLALAHMIKFRGHFLIEGDLNPDNSDVDKLFIQLVQTYNQLFEENPINASGVDAKAILSARLSKSRRLENLIAQLPGEKKNGLFGNLIALSLGLTPNFKSNFDLAEDAKLQLSKDTYDDDLDNLLAQIGDQYADLFLAAKNLSDAILLSDILRVNTEITKAPLSASMIKRYDEHHQDLTLLKALVRQQLPEKYKEIFFDQSKNGYAGYIDGGASQEEFYKFIKPILEKMDGTEELLVKLNREDLLRKQRTFDNGSIPHQIHLGELHAILRRQEDFYPFLKDNREKIEKILTFRIPYYVGPLARGNSRFAWMTRKSEETITPWNFEEVVDKGASAQSFIERMTNFDKNLPNEKVLPKHSLLYEYFTVYNELTKVKYVTEGMRKPAFLSGEQKKAIVDLLFKTNRKVTVKQLKEDYFKKIECFDSVEISGVEDRFNASLGTYHDLLKIIKDKDFLDNEENEDILEDIVLTLTLFEDREMIEERLKTYAHLFDDKVMKQLKRRRYTGWGRLSRKLINGIRDKQSGKTILDFLKSDGFANRNFMQLIHDDSLTFKEDIQKAQVSGQGDSLHEHIANLAGSPAIKKGILQTVKVVDELVKVMGRHKPENIVIEMARENQTTQKGQKNSRERMKRIEEGIKELGSQILKEHPVENTQLQNEKLYLYYLQNGRDMYVDQELDINRLSDYDVDHIVPQSFLKDDSIDNKVLTRSDKARGKSDNVPSEEVVKKMKNYWRQLLNAKLITQRKFDNLTKAERGGLSELDKAGFIKRQLVETRQITKHVAQILDSRMNTKYDENDKLIREVKVITLKSKLVSDFRKDFQFYKVREINNYHHAHDAYLNAVVGTALIKKYPKLESEFVYGDYKVYDVRKMIAKSEQEIGKATAKYFFYSNIMNFFKTEITLANGEIRKRPLIETNGETGEIVWDKGRDFATVRKVLSMPQVNIVKKTEVQTGGFSKESILPKRNSDKLIARKKDWDPKKYGGFDSPTVAYSVLVVAKVEKGKSKKLKSVKELLGITIMERSSFEKNPIDFLEAKGYKEVKKDLIIKLPKYSLFELENGRKRMLASAGELQKGNELALPSKYVNFLYLASHYEKLKGSPEDNEQKQLFVEQHKHYLDEIIEQISEFSKRVILADANLDKVLSAYNKHRDKPIREQAENIIHLFTLTNLGAPAAFKYFDTTIDRKRYTSTKEVLDATLIHQSITGLYETRIDLSQLGGDGGPAPGGSGGGGGTLNIEDEYRLHETSKGPDVPLGSTWLSDFPQAWAETGGMGLAFRQAPLIISLKATSTPVSIKQYPMSQEARLGIKPHIQRLLDQGILVPCQSPWNTPLLPVKKPGTNDYRPVQDLREVNKRVEDIHPTVPNPYNLLSGLPPSHQWYTVLDLKDAFFCLRLHPTSQSLFAFEWKDPEMGISGQLTWTRLPQGFKNSPTLFNEALHRDLADFRIQHPDLILLQYVDDLLLAATSELDCQQGTRALLQTLGDLGYRASAKKAQICQKQVKYLGYLLKEGQRWLTEARKETVMGQPTPKTPRQLREFLGKAGLCRLFIPGFAEMAAPLYPLTKPGTLFKWGPDQQKAYQEIKQALLTAPALGLPDLTKPFELFVDEKQGYAKGVLTQKLGPWRRPVAYLSKKLDPVAAGWPPCLRMVAAIAVLTKDVGKLTMGQPLVILAPHAVEALVKQPPDRWLSNARMTHYQALLLDTDRVQFGPIVALNPATLLPLPEEGLQHDCLDILAEAHGTRPDLTDQPLPDADHTWYTDGSSFLQEGQRRAGAAVTTETEVIWAKALPAGTSAQRAELIALTQALKMAAGKKLNVYTDSRYAFATAHIHGEIYRRRGWLTSEGKEIKNKDEILALLKALFLPKRLSIIHCPGHQKGNHAEARGNRMADQAAREVATRETPETSTLLAGKRTADGSEFEKRTADGSEFESPKKKAKVE

SEQ ID NO: 2433 - protein, 2100 aa, synthetic construct
MPAAKRVKLDGGDKKYSIGLDIGTNSVGWAVITDEYKVPSKKFKVLGNTDRHSIKKNLIGALLFDSGETAEATRLKRTARRRYTRRKNRICYLQEIFSNEMAKVDDSFFHRLEESFLVEEDKKHERHPIFGNIVDEVAYHEKYPTIYHLRKKLVDSTDKADLRLIYLALAHMIKFRGHFLIEGDLNPDNSDVDKLFIQLVQTYNQLFEENPINASGVDAKAILSARLSKSRRLENLIAQLPGEKKNGLFGNLIALSLGLTPNFKSNFDLAEDAKLQLSKDTYDDDLDNLLAQIGDQYADLFLAAKNLSDAILLSDILRVNTEITKAPLSASMIKRYDEHHQDLTLLKALVRQQLPEKYKEIFFDQSKNGYAGYIDGGASQEEFYKFIKPILEKMDGTEELLVKLNREDLLRKQRTFDNGSIPHQIHLGELHAILRRQEDFYPFLKDNREKIEKILTFRIPYYVGPLARGNSRFAWMTRKSEETITPWNFEEVVDKGASAQSFIERMTNFDKNLPNEKVLPKHSLLYEYFTVYNELTKVKYVTEGMRKPAFLSGEQKKAIVDLLFKTNRKVTVKQLKEDYFKKIECFDSVEISGVEDRFNASLGTYHDLLKIIKDKDFLDNEENEDILEDIVLTLTLFEDREMIEERLKTYAHLFDDKVMKQLKRRRYTGWGRLSRKLINGIRDKQSGKTILDFLKSDGFANRNFMQLIHDDSLTFKEDIQKAQVSGQGDSLHEHIANLAGSPAIKKGILQTVKVVDELVKVMGRHKPENIVIEMARENQTTQKGQKNSRERMKRIEEGIKELGSQILKEHPVENTQLQNEKLYLYYLQNGRDMYVDQELDINRLSDYDVDHIVPQSFLKDDSIDNKVLTRSDKARGKSDNVPSEEVVKKMKNYWRQLLNAKLITQRKFDNLTKAERGGLSELDKAGFIKRQLVETRQITKHVAQILDSRMNTKYDENDKLIREVKVITLKSKLVSDFRKDFQFYKVREINNYHHAHDAYLNAVVGTALIKKYPKLESEFVYGDYKVYDVRKMIAKSEQEIGKATAKYFFYSNIMNFFKTEITLANGEIRKRPLIETNGETGEIVWDKGRDFATVRKVLSMPQVNIVKKTEVQTGGFSKESILPKRNSDKLIARKKDWDPKKYGGFDSPTVAYSVLVVAKVEKGKSKKLKSVKELLGITIMERSSFEKNPIDFLEAKGYKEVKKDLIIKLPKYSLFELENGRKRMLASAGELQKGNELALPSKYVNFLYLASHYEKLKGSPEDNEQKQLFVEQHKHYLDEIIEQISEFSKRVILADANLDKVLSAYNKHRDKPIREQAENIIHLFTLTNLGAPAAFKYFDTTIDRKRYTSTKEVLDATLIHQSITGLYETRIDLSQLGGDGGEAAAKGGGGSEAAAKGGTLNIEDEYRLHETSKGPDVPLGSTWLSDFPQAWAETGGMGLAFRQAPLIISLKATSTPVSIKQYPMSQEARLGIKPHIQRLLDQGILVPCQSPWNTPLLPVKKPGTNDYRPVQDLREVNKRVEDIHPTVPNPYNLLSGLPPSHQWYTVLDLKDAFFCLRLHPTSQSLFAFEWKDPEMGISGQLTWTRLPQGFKNSPTLFNEALHRDLADFRIQHPDLILLQYVDDLLLAATSELDCQQGTRALLQTLGDLGYRASAKKAQICQKQVKYLGYLLKEGQRWLTEARKETVMGQPTPKTPRQLREFLGKAGLCRLFIPGFAEMAAPLYPLTKPGTLFKWGPDQQKAYQEIKQALLTAPALGLPDLTKPFELFVDEKQGYAKGVLTQKLGPWRRPVAYLSKKLDPVAAGWPPCLRMVAAIAVLTKDVGKLTMGQPLVILAPHAVEALVKQPPDRWLSNARMTHYQALLLDTDRVQFGPIVALNPATLLPLPEEGLQHDCLDILAEAHGTRPDLTDQPLPDADHTWYTDGSSFLQEGQRRAGAAVTTETEVIWAKALPAGTSAQRAELIALTQALKMAAGKKLNVYTDSRYAFATAHIHGEIYRRRGWLTSEGKEIKNKDEILALLKALFLPKRLSIIHCPGHQKGNHAEARGNRMADQAAREVATRETPETSTLLAGKRTADGSEFEKRTADGSEFESPKKKAKVE

SEQ ID NO: 2434 - protein, 2096 aa, synthetic construct
MPAAKRVKLDGGDKKYSIGLDIGTNSVGWAVITDEYKVPSKKFKVLGNTDRHSIKKNLIGALLFDSGETAEATRLKRTARRRYTRRKNRICYLQEIFSNEMAKVDDSFFHRLEESFLVEEDKKHERHPIFGNIVDEVAYHEKYPTIYHLRKKLVDSTDKADLRLIYLALAHMIKFRGHFLIEGDLNPDNSDVDKLFIQLVQTYNQLFEENPINASGVDAKAILSARLSKSRRLENLIAQLPGEKKNGLFGNLIALSLGLTPNFKSNFDLAEDAKLQLSKDTYDDDLDNLLAQIGDQYADLFLAAKNLSDAILLSDILRVNTEITKAPLSASMIKRYDEHHQDLTLLKALVRQQLPEKYKEIFFDQSKNGYAGYIDGGASQEEFYKFIKPILEKMDGTEELLVKLNREDLLRKQRTFDNGSIPHQIHLGELHAILRRQEDFYPFLKDNREKIEKILTFRIPYYVGPLARGNSRFAWMTRKSEETITPWNFEEVVDKGASAQSFIERMTNFDKNLPNEKVLPKHSLLYEYFTVYNELTKVKYVTEGMRKPAFLSGEQKKAIVDLLFKTNRKVTVKQLKEDYFKKIECFDSVEISGVEDRFNASLGTYHDLLKIIKDKDFLDNEENEDILEDIVLTLTLFEDREMIEERLKTYAHLFDDKVMKQLKRRRYTGWGRLSRKLINGIRDKQSGKTILDFLKSDGFANRNFMQLIHDDSLTFKEDIQKAQVSGQGDSLHEHIANLAGSPAIKKGILQTVKVVDELVKVMGRHKPENIVIEMARENQTTQKGQKNSRERMKRIEEGIKELGSQILKEHPVENTQLQNEKLYLYYLQNGRDMYVDQELDINRLSDYDVDHIVPQSFLKDDSIDNKVLTRSDKARGKSDNVPSEEVVKKMKNYWRQLLNAKLITQRKFDNLTKAERGGLSELDKAGFIKRQLVETRQITKHVAQILDSRMNTKYDENDKLIREVKVITLKSKLVSDFRKDFQFYKVREINNYHHAHDAYLNAVVGTALIKKYPKLESEFVYGDYKVYDVRKMIAKSEQEIGKATAKYFFYSNIMNFFKTEITLANGEIRKRPLIETNGETGEIVWDKGRDFATVRKVLSMPQVNIVKKTEVQTGGFSKESILPKRNSDKLIARKKDWDPKKYGGFDSPTVAYSVLVVAKVEKGKSKKLKSVKELLGITIMERSSFEKNPIDFLEAKGYKEVKKDLIIKLPKYSLFELENGRKRMLASAGELQKGNELALPSKYVNFLYLASHYEKLKGSPEDNEQKQLFVEQHKHYLDEIIEQISEFSKRVILADANLDKVLSAYNKHRDKPIREQAENIIHLFTLTNLGAPAAFKYFDTTIDRKRYTSTKEVLDATLIHQSITGLYETRIDLSQLGGDGGGGGGSSEAAAKGGTLNIEDEYRLHETSKGPDVPLGSTWLSDFPQAWAETGGMGLAFRQAPLIISLKATSTPVSIKQYPMSQEARLGIKPHIQRLLDQGILVPCQSPWNTPLLPVKKPGTNDYRPVQDLREVNKRVEDIHPTVPNPYNLLSGLPPSHQWYTVLDLKDAFFCLRLHPTSQSLFAFEWKDPEMGISGQLTWTRLPQGFKNSPTLFNEALHRDLADFRIQHPDLILLQYVDDLLLAATSELDCQQGTRALLQTLGDLGYRASAKKAQICQKQVKYLGYLLKEGQRWLTEARKETVMGQPTPKTPRQLREFLGKAGLCRLFIPGFAEMAAPLYPLTKPGTLFKWGPDQQKAYQEIKQALLTAPALGLPDLTKPFELFVDEKQGYAKGVLTQKLGPWRRPVAYLSKKLDPVAAGWPPCLRMVAAIAVLTKDVGKLTMGQPLVILAPHAVEALVKQPPDRWLSNARMTHYQALLLDTDRVQFGPIVALNPATLLPLPEEGLQHDCLDILAEAHGTRPDLTDQPLPDADHTWYTDGSSFLQEGQRRAGAAVTTETEVIWAKALPAGTSAQRAELIALTQALKMAAGKKLNVYTDSRYAFATAHIHGEIYRRRGWLTSEGKEIKNKDEILALLKALFLPKRLSIIHCPGHQKGNHAEARGNRMADQAAREVATRETPETSTLLAGKRTADGSEFEKRTADGSEFESPKKKAKVE

SEQ ID NO: 2435 - protein, 2093 aa, synthetic construct
MPAAKRVKLDGGDKKYSIGLDIGTNSVGWAVITDEYKVPSKKFKVLGNTDRHSIKKNLIGALLFDSGETAEATRLKRTARRRYTRRKNRICYLQEIFSNEMAKVDDSFFHRLEESFLVEEDKKHERHPIFGNIVDEVAYHEKYPTIYHLRKKLVDSTDKADLRLIYLALAHMIKFRGHFLIEGDLNPDNSDVDKLFIQLVQTYNQLFEENPINASGVDAKAILSARLSKSRRLENLIAQLPGEKKNGLFGNLIALSLGLTPNFKSNFDLAEDAKLQLSKDTYDDDLDNLLAQIGDQYADLFLAAKNLSDAILLSDILRVNTEITKAPLSASMIKRYDEHHQDLTLLKALVRQQLPEKYKEIFFDQSKNGYAGYIDGGASQEEFYKFIKPILEKMDGTEELLVKLNREDLLRKQRTFDNGSIPHQIHLGELHAILRRQEDFYPFLKDNREKIEKILTFRIPYYVGPLARGNSRFAWMTRKSEETITPWNFEEVVDKGASAQSFIERMTNFDKNLPNEKVLPKHSLLYEYFTVYNELTKVKYVTEGMRKPAFLSGEQKKAIVDLLFKTNRKVTVKQLKEDYFKKIECFDSVEISGVEDRFNASLGTYHDLLKIIKDKDFLDNEENEDILEDIVLTLTLFEDREMIEERLKTYAHLFDDKVMKQLKRRRYTGWGRLSRKLINGIRDKQSGKTILDFLKSDGFANRNFMQLIHDDSLTFKEDIQKAQVSGQGDSLHEHIANLAGSPAIKKGILQTVKVVDELVKVMGRHKPENIVIEMARENQTTQKGQKNSRERMKRIEEGIKELGSQILKEHPVENTQLQNEKLYLYYLQNGRDMYVDQELDINRLSDYDVDHIVPQSFLKDDSIDNKVLTRSDKARGKSDNVPSEEVVKKMKNYWRQLLNAKLITQRKFDNLTKAERGGLSELDKAGFIKRQLVETRQITKHVAQILDSRMNTKYDENDKLIREVKVITLKSKLVSDFRKDFQFYKVREINNYHHAHDAYLNAVVGTALIKKYPKLESEFVYGDYKVYDVRKMIAKSEQEIGKATAKYFFYSNIMNFFKTEITLANGEIRKRPLIETNGETGEIVWDKGRDFATVRKVLSMPQVNIVKKTEVQTGGFSKESILPKRNSDKLIARKKDWDPKKYGGFDSPTVAYSVLVVAKVEKGKSKKLKSVKELLGITIMERSSFEKNPIDFLEAKGYKEVKKDLIIKLPKYSLFELENGRKRMLASAGELQKGNELALPSKYVNFLYLASHYEKLKGSPEDNEQKQLFVEQHKHYLDEIIEQISEFSKRVILADANLDKVLSAYNKHRDKPIREQAENIIHLFTLTNLGAPAAFKYFDTTIDRKRYTSTKEVLDATLIHQSITGLYETRIDLSQLGGDGGEAAAKGGSGGTLNIEDEYRLHETSKGPDVPLGSTWLSDFPQAWAETGGMGLAFRQAPLIISLKATSTPVSIKQYPMSQEARLGIKPHIQRLLDQGILVPCQSPWNTPLLPVKKPGTNDYRPVQDLREVNKRVEDIHPTVPNPYNLLSGLPPSHQWYTVLDLKDAFFCLRLHPTSQSLFAFEWKDPEMGISGQLTWTRLPQGFKNSPTLFNEALHRDLADFRIQHPDLILLQYVDDLLLAATSELDCQQGTRALLQTLGDLGYRASAKKAQICQKQVKYLGYLLKEGQRWLTEARKETVMGQPTPKTPRQLREFLGKAGLCRLFIPGFAEMAAPLYPLTKPGTLFKWGPDQQKAYQEIKQALLTAPALGLPDLTKPFELFVDEKQGYAKGVLTQKLGPWRRPVAYLSKKLDPVAAGWPPCLRMVAAIAVLTKDVGKLTMGQPLVILAPHAVEALVKQPPDRWLSNARMTHYQALLLDTDRVQFGPIVALNPATLLPLPEEGLQHDCLDILAEAHGTRPDLTDQPLPDADHTWYTDGSSFLQEGQRRAGAAVTTETEVIWAKALPAGTSAQRAELIALTQALKMAAGKKLNVYTDSRYAFATAHIHGEIYRRRGWLTSEGKEIKNKDEILALLKALFLPKRLSIIHCPGHQKGNHAEARGNRMADQAAREVATRETPETSTLLAGKRTADGSEFEKRTADGSEFESPKKKAKVE

SEQ ID NO: 2436 - protein, 2091 aa, synthetic construct
MPAAKRVKLDGGDKKYSIGLDIGTNSVGWAVITDEYKVPSKKFKVLGNTDRHSIKKNLIGALLFDSGETAEATRLKRTARRRYTRRKNRICYLQEIFSNEMAKVDDSFFHRLEESFLVEEDKKHERHPIFGNIVDEVAYHEKYPTIYHLRKKLVDSTDKADLRLIYLALAHMIKFRGHFLIEGDLNPDNSDVDKLFIQLVQTYNQLFEENPINASGVDAKAILSARLSKSRRLENLIAQLPGEKKNGLFGNLIALSLGLTPNFKSNFDLAEDAKLQLSKDTYDDDLDNLLAQIGDQYADLFLAAKNLSDAILLSDILRVNTEITKAPLSASMIKRYDEHHQDLTLLKALVRQQLPEKYKEIFFDQSKNGYAGYIDGGASQEEFYKFIKPILEKMDGTEELLVKLNREDLLRKQRTFDNGSIPHQIHLGELHAILRRQEDFYPFLKDNREKIEKILTFRIPYYVGPLARGNSRFAWMTRKSEETITPWNFEEVVDKGASAQSFIERMTNFDKNLPNEKVLPKHSLLYEYFTVYNELTKVKYVTEGMRKPAFLSGEQKKAIVDLLFKTNRKVTVKQLKEDYFKKIECFDSVEISGVEDRFNASLGTYHDLLKIIKDKDFLDNEENEDILEDIVLTLTLFEDREMIEERLKTYAHLFDDKVMKQLKRRRYTGWGRLSRKLINGIRDKQSGKTILDFLKSDGFANRNFMQLIHDDSLTFKEDIQKAQVSGQGDSLHEHIANLAGSPAIKKGILQTVKVVDELVKVMGRHKPENIVIEMARENQTTQKGQKNSRERMKRIEEGIKELGSQILKEHPVENTQLQNEKLYLYYLQNGRDMYVDQELDINRLSDYDVDHIVPQSFLKDDSIDNKVLTRSDKARGKSDNVPSEEVVKKMKNYWRQLLNAKLITQRKFDNLTKAERGGLSELDKAGFIKRQLVETRQITKHVAQILDSRMNTKYDENDKLIREVKVITLKSKLVSDFRKDFQFYKVREINNYHHAHDAYLNAVVGTALIKKYPKLESEFVYGDYKVYDVRKMIAKSEQEIGKATAKYFFYSNIMNFFKTEITLANGEIRKRPLIETNGETGEIVWDKGRDFATVRKVLSMPQVNIVKKTEVQTGGFSKESILPKRNSDKLIARKKDWDPKKYGGFDSPTVAYSVLVVAKVEKGKSKKLKSVKELLGITIMERSSFEKNPIDFLEAKGYKEVKKDLIIKLPKYSLFELENGRKRMLASAGELQKGNELALPSKYVNFLYLASHYEKLKGSPEDNEQKQLFVEQHKHYLDEIIEQISEFSKRVILADANLDKVLSAYNKHRDKPIREQAENIIHLFTLTNLGAPAAFKYFDTTIDRKRYTSTKEVLDATLIHQSITGLYETRIDLSQLGGDGGGGGGGSGGTLNIEDEYRLHETSKGPDVPLGSTWLSDFPQAWAETGGMGLAFRQAPLIISLKATSTPVSIKQYPMSQEARLGIKPHIQRLLDQGILVPCQSPWNTPLLPVKKPGTNDYRPVQDLREVNKRVEDIHPTVPNPYNLLSGLPPSHQWYTVLDLKDAFFCLRLHPTSQSLFAFEWKDPEMGISGQLTWTRLPQGFKNSPTLFNEALHRDLADFRIQHPDLILLQYVDDLLLAATSELDCQQGTRALLQTLGDLGYRASAKKAQICQKQVKYLGYLLKEGQRWLTEARKETVMGQPTPKTPRQLREFLGKAGLCRLFIPGFAEMAAPLYPLTKPGTLFKWGPDQQKAYQEIKQALLTAPALGLPDLTKPFELFVDEKQGYAKGVLTQKLGPWRRPVAYLSKKLDPVAAGWPPCLRMVAAIAVLTKDVGKLTMGQPLVILAPHAVEALVKQPPDRWLSNARMTHYQALLLDTDRVQFGPIVALNPATLLPLPEEGLQHDCLDILAEAHGTRPDLTDQPLPDADHTWYTDGSSFLQEGQRRAGAAVTTETEVIWAKALPAGTSAQRAELIALTQALKMAAGKKLNVYTDSRYAFATAHIHGEIYRRRGWLTSEGKEIKNKDEILALLKALFLPKRLSIIHCPGHQKGNHAEARGNRMADQAAREVATRETPETSTLLAGKRTADGSEFEKRTADGSEFESPKKKAKVE

SEQ ID NO: 2437 - protein, 2096 aa, synthetic construct
MPAAKRVKLDGGDKKYSIGLDIGTNSVGWAVITDEYKVPSKKFKVLGNTDRHSIKKNLIGALLFDSGETAEATRLKRTARRRYTRRKNRICYLQEIFSNEMAKVDDSFFHRLEESFLVEEDKKHERHPIFGNIVDEVAYHEKYPTIYHLRKKLVDSTDKADLRLIYLALAHMIKFRGHFLIEGDLNPDNSDVDKLFIQLVQTYNQLFEENPINASGVDAKAILSARLSKSRRLENLIAQLPGEKKNGLFGNLIALSLGLTPNFKSNFDLAEDAKLQLSKDTYDDDLDNLLAQIGDQYADLFLAAKNLSDAILLSDILRVNTEITKAPLSASMIKRYDEHHQDLTLLKALVRQQLPEKYKEIFFDQSKNGYAGYIDGGASQEEFYKFIKPILEKMDGTEELLVKLNREDLLRKQRTFDNGSIPHQIHLGELHAILRRQEDFYPFLKDNREKIEKILTFRIPYYVGPLARGNSRFAWMTRKSEETITPWNFEEVVDKGASAQSFIERMTNFDKNLPNEKVLPKHSLLYEYFTVYNELTKVKYVTEGMRKPAFLSGEQKKAIVDLLFKTNRKVTVKQLKEDYFKKIECFDSVEISGVEDRFNASLGTYHDLLKIIKDKDFLDNEENEDILEDIVLTLTLFEDREMIEERLKTYAHLFDDKVMKQLKRRRYTGWGRLSRKLINGIRDKQSGKTILDFLKSDGFANRNFMQLIHDDSLTFKEDIQKAQVSGQGDSLHEHIANLAGSPAIKKGILQTVKVVDELVKVMGRHKPENIVIEMARENQTTQKGQKNSRERMKRIEEGIKELGSQILKEHPVENTQLQNEKLYLYYLQNGRDMYVDQELDINRLSDYDVDHIVPQSFLKDDSIDNKVLTRSDKARGKSDNVPSEEVVKKMKNYWRQLLNAKLITQRKFDNLTKAERGGLSELDKAGFIKRQLVETRQITKHVAQILDSRMNTKYDENDKLIREVKVITLKSKLVSDFRKDFQFYKVREINNYHHAHDAYLNAVVGTALIKKYPKLESEFVYGDYKVYDVRKMIAKSEQEIGKATAKYFFYSNIMNFFKTEITLANGEIRKRPLIETNGETGEIVWDKGRDFATVRKVLSMPQVNIVKKTEVQTGGFSKESILPKRNSDKLIARKKDWDPKKYGGFDSPTVAYSVLVVAKVEKGKSKKLKSVKELLGITIMERSSFEKNPIDFLEAKGYKEVKKDLIIKLPKYSLFELENGRKRMLASAGELQKGNELALPSKYVNFLYLASHYEKLKGSPEDNEQKQLFVEQHKHYLDEIIEQISEFSKRVILADANLDKVLSAYNKHRDKPIREQAENIIHLFTLTNLGAPAAFKYFDTTIDRKRYTSTKEVLDATLIHQSITGLYETRIDLSQLGGDGGGSSGGSEAAAKGGTLNIEDEYRLHETSKGPDVPLGSTWLSDFPQAWAETGGMGLAFRQAPLIISLKATSTPVSIKQYPMSQEARLGIKPHIQRLLDQGILVPCQSPWNTPLLPVKKPGTNDYRPVQDLREVNKRVEDIHPTVPNPYNLLSGLPPSHQWYTVLDLKDAFFCLRLHPTSQSLFAFEWKDPEMGISGQLTWTRLPQGFKNSPTLFNEALHRDLADFRIQHPDLILLQYVDDLLLAATSELDCQQGTRALLQTLGDLGYRASAKKAQICQKQVKYLGYLLKEGQRWLTEARKETVMGQPTPKTPRQLREFLGKAGLCRLFIPGFAEMAAPLYPLTKPGTLFKWGPDQQKAYQEIKQALLTAPALGLPDLTKPFELFVDEKQGYAKGVLTQKLGPWRRPVAYLSKKLDPVAAGWPPCLRMVAAIAVLTKDVGKLTMGQPLVILAPHAVEALVKQPPDRWLSNARMTHYQALLLDTDRVQFGPIVALNPATLLPLPEEGLQHDCLDILAEAHGTRPDLTDQPLPDADHTWYTDGSSFLQEGQRRAGAAVTTETEVIWAKALPAGTSAQRAELIALTQALKMAAGKKLNVYTDSRYAFATAHIHGEIYRRRGWLTSEGKEIKNKDEILALLKALFLPKRLSIIHCPGHQKGNHAEARGNRMADQAAREVATRETPETSTLLAGKRTADGSEFEKRTADGSEFESPKKKAKVE

SEQ ID NO: 2438 - protein, 2094 aa, synthetic construct
MPAAKRVKLDGGDKKYSIGLDIGTNSVGWAVITDEYKVPSKKFKVLGNTDRHSIKKNLIGALLFDSGETAEATRLKRTARRRYTRRKNRICYLQEIFSNEMAKVDDSFFHRLEESFLVEEDKKHERHPIFGNIVDEVAYHEKYPTIYHLRKKLVDSTDKADLRLIYLALAHMIKFRGHFLIEGDLNPDNSDVDKLFIQLVQTYNQLFEENPINASGVDAKAILSARLSKSRRLENLIAQLPGEKKNGLFGNLIALSLGLTPNFKSNFDLAEDAKLQLSKDTYDDDLDNLLAQIGDQYADLFLAAKNLSDAILLSDILRVNTEITKAPLSASMIKRYDEHHQDLTLLKALVRQQLPEKYKEIFFDQSKNGYAGYIDGGASQEEFYKFIKPILEKMDGTEELLVKLNREDLLRKQRTFDNGSIPHQIHLGELHAILRRQEDFYPFLKDNREKIEKILTFRIPYYVGPLARGNSRFAWMTRKSEETITPWNFEEVVDKGASAQSFIERMTNFDKNLPNEKVLPKHSLLYEYFTVYNELTKVKYVTEGMRKPAFLSGEQKKAIVDLLFKTNRKVTVKQLKEDYFKKIECFDSVEISGVEDRFNASLGTYHDLLKIIKDKDFLDNEENEDILEDIVLTLTLFEDREMIEERLKTYAHLFDDKVMKQLKRRRYTGWGRLSRKLINGIRDKQSGKTILDFLKSDGFANRNFMQLIHDDSLTFKEDIQKAQVSGQGDSLHEHIANLAGSPAIKKGILQTVKVVDELVKVMGRHKPENIVIEMARENQTTQKGQKNSRERMKRIEEGIKELGSQILKEHPVENTQLQNEKLYLYYLQNGRDMYVDQELDINRLSDYDVDHIVPQSFLKDDSIDNKVLTRSDKARGKSDNVPSEEVVKKMKNYWRQLLNAKLITQRKFDNLTKAERGGLSELDKAGFIKRQLVETRQITKHVAQILDSRMNTKYDENDKLIREVKVITLKSKLVSDFRKDFQFYKVREINNYHHAHDAYLNAVVGTALIKKYPKLESEFVYGDYKVYDVRKMIAKSEQEIGKATAKYFFYSNIMNFFKTEITLANGEIRKRPLIETNGETGEIVWDKGRDFATVRKVLSMPQVNIVKKTEVQTGGFSKESILPKRNSDKLIARKKDWDPKKYGGFDSPTVAYSVLVVAKVEKGKSKKLKSVKELLGITIMERSSFEKNPIDFLEAKGYKEVKKDLIIKLPKYSLFELENGRKRMLASAGELQKGNELALPSKYVNFLYLASHYEKLKGSPEDNEQKQLFVEQHKHYLDEIIEQISEFSKRVILADANLDKVLSAYNKHRDKPIREQAENIIHLFTLTNLGAPAAFKYFDTTIDRKRYTSTKEVLDATLIHQSITGLYETRIDLSQLGGDGGGSSGGGGGSGGTLNIEDEYRLHETSKGPDVPLGSTWLSDFPQAWAETGGMGLAFRQAPLIISLKATSTPVSIKQYPMSQEARLGIKPHIQRLLDQGILVPCQSPWNTPLLPVKKPGTNDYRPVQDLREVNKRVEDIHPTVPNPYNLLSGLPPSHQWYTVLDLKDAFFCLRLHPTSQSLFAFEWKDPEMGISGQLTWTRLPQGFKNSPTLFNEALHRDLADFRIQHPDLILLQYVDDLLLAATSELDCQQGTRALLQTLGDLGYRASAKKAQICQKQVKYLGYLLKEGQRWLTEARKETVMGQPTPKTPRQLREFLGKAGLCRLFIPGFAEMAAPLYPLTKPGTLFKWGPDQQKAYQEIKQALLTAPALGLPDLTKPFELFVDEKQGYAKGVLTQKLGPWRRPVAYLSKKLDPVAAGWPPCLRMVAAIAVLTKDVGKLTMGQPLVILAPHAVEALVKQPPDRWLSNARMTHYQALLLDTDRVQFGPIVALNPATLLPLPEEGLQHDCLDILAEAHGTRPDLTDQPLPDADHTWYTDGSSFLQEGQRRAGAAVTTETEVIWAKALPAGTSAQRAELIALTQALKMAAGKKLNVYTDSRYAFATAHIHGEIYRRRGWLTSEGKEIKNKDEILALLKALFLPKRLSIIHCPGHQKGNHAEARGNRMADQAAREVATRETPETSTLLAGKRTADGSEFEKRTADGSEFESPKKKAKVE

SEQ ID NO: 2439 - protein, 2091 aa, synthetic construct
MPAAKRVKLDGGDKKYSIGLDIGTNSVGWAVITDEYKVPSKKFKVLGNTDRHSIKKNLIGALLFDSGETAEATRLKRTARRRYTRRKNRICYLQEIFSNEMAKVDDSFFHRLEESFLVEEDKKHERHPIFGNIVDEVAYHEKYPTIYHLRKKLVDSTDKADLRLIYLALAHMIKFRGHFLIEGDLNPDNSDVDKLFIQLVQTYNQLFEENPINASGVDAKAILSARLSKSRRLENLIAQLPGEKKNGLFGNLIALSLGLTPNFKSNFDLAEDAKLQLSKDTYDDDLDNLLAQIGDQYADLFLAAKNLSDAILLSDILRVNTEITKAPLSASMIKRYDEHHQDLTLLKALVRQQLPEKYKEIFFDQSKNGYAGYIDGGASQEEFYKFIKPILEKMDGTEELLVKLNREDLLRKQRTFDNGSIPHQIHLGELHAILRRQEDFYPFLKDNREKIEKILTFRIPYYVGPLARGNSRFAWMTRKSEETITPWNFEEVVDKGASAQSFIERMTNFDKNLPNEKVLPKHSLLYEYFTVYNELTKVKYVTEGMRKPAFLSGEQKKAIVDLLFKTNRKVTVKQLKEDYFKKIECFDSVEISGVEDRFNASLGTYHDLLKIIKDKDFLDNEENEDILEDIVLTLTLFEDREMIEERLKTYAHLFDDKVMKQLKRRRYTGWGRLSRKLINGIRDKQSGKTILDFLKSDGFANRNFMQLIHDDSLTFKEDIQKAQVSGQGDSLHEHIANLAGSPAIKKGILQTVKVVDELVKVMGRHKPENIVIEMARENQTTQKGQKNSRERMKRIEEGIKELGSQILKEHPVENTQLQNEKLYLYYLQNGRDMYVDQELDINRLSDYDVDHIVPQSFLKDDSIDNKVLTRSDKARGKSDNVPSEEVVKKMKNYWRQLLNAKLITQRKFDNLTKAERGGLSELDKAGFIKRQLVETRQITKHVAQILDSRMNTKYDENDKLIREVKVITLKSKLVSDFRKDFQFYKVREINNYHHAHDAYLNAVVGTALIKKYPKLESEFVYGDYKVYDVRKMIAKSEQEIGKATAKYFFYSNIMNFFKTEITLANGEIRKRPLIETNGETGEIVWDKGRDFATVRKVLSMPQVNIVKKTEVQTGGFSKESILPKRNSDKLIARKKDWDPKKYGGFDSPTVAYSVLVVAKVEKGKSKKLKSVKELLGITIMERSSFEKNPIDFLEAKGYKEVKKDLIIKLPKYSLFELENGRKRMLASAGELQKGNELALPSKYVNFLYLASHYEKLKGSPEDNEQKQLFVEQHKHYLDEIIEQISEFSKRVILADANLDKVLSAYNKHRDKPIREQAENIIHLFTLTNLGAPAAFKYFDTTIDRKRYTSTKEVLDATLIHQSITGLYETRIDLSQLGGDGGGGSGSSGGTLNIEDEYRLHETSKGPDVPLGSTWLSDFPQAWAETGGMGLAFRQAPLIISLKATSTPVSIKQYPMSQEARLGIKPHIQRLLDQGILVPCQSPWNTPLLPVKKPGTNDYRPVQDLREVNKRVEDIHPTVPNPYNLLSGLPPSHQWYTVLDLKDAFFCLRLHPTSQSLFAFEWKDPEMGISGQLTWTRLPQGFKNSPTLFNEALHRDLADFRIQHPDLILLQYVDDLLLAATSELDCQQGTRALLQTLGDLGYRASAKKAQICQKQVKYLGYLLKEGQRWLTEARKETVMGQPTPKTPRQLREFLGKAGLCRLFIPGFAEMAAPLYPLTKPGTLFKWGPDQQKAYQEIKQALLTAPALGLPDLTKPFELFVDEKQGYAKGVLTQKLGPWRRPVAYLSKKLDPVAAGWPPCLRMVAAIAVLTKDVGKLTMGQPLVILAPHAVEALVKQPPDRWLSNARMTHYQALLLDTDRVQFGPIVALNPATLLPLPEEGLQHDCLDILAEAHGTRPDLTDQPLPDADHTWYTDGSSFLQEGQRRAGAAVTTETEVIWAKALPAGTSAQRAELIALTQALKMAAGKKLNVYTDSRYAFATAHIHGEIYRRRGWLTSEGKEIKNKDEILALLKALFLPKRLSIIHCPGHQKGNHAEARGNRMADQAAREVATRETPETSTLLAGKRTADGSEFEKRTADGSEFESPKKKAKVE

SEQ ID NO: 2440 - protein, 2096 aa, synthetic construct
MPAAKRVKLDGGDKKYSIGLDIGTNSVGWAVITDEYKVPSKKFKVLGNTDRHSIKKNLIGALLFDSGETAEATRLKRTARRRYTRRKNRICYLQEIFSNEMAKVDDSFFHRLEESFLVEEDKKHERHPIFGNIVDEVAYHEKYPTIYHLRKKLVDSTDKADLRLIYLALAHMIKFRGHFLIEGDLNPDNSDVDKLFIQLVQTYNQLFEENPINASGVDAKAILSARLSKSRRLENLIAQLPGEKKNGLFGNLIALSLGLTPNFKSNFDLAEDAKLQLSKDTYDDDLDNLLAQIGDQYADLFLAAKNLSDAILLSDILRVNTEITKAPLSASMIKRYDEHHQDLTLLKALVRQQLPEKYKEIFFDQSKNGYAGYIDGGASQEEFYKFIKPILEKMDGTEELLVKLNREDLLRKQRTFDNGSIPHQIHLGELHAILRRQEDFYPFLKDNREKIEKILTFRIPYYVGPLARGNSRFAWMTRKSEETITPWNFEEVVDKGASAQSFIERMTNFDKNLPNEKVLPKHSLLYEYFTVYNELTKVKYVTEGMRKPAFLSGEQKKAIVDLLFKTNRKVTVKQLKEDYFKKIECFDSVEISGVEDRFNASLGTYHDLLKIIKDKDFLDNEENEDILEDIVLTLTLFEDREMIEERLKTYAHLFDDKVMKQLKRRRYTGWGRLSRKLINGIRDKQSGKTILDFLKSDGFANRNFMQLIHDDSLTFKEDIQKAQVSGQGDSLHEHIANLAGSPAIKKGILQTVKVVDELVKVMGRHKPENIVIEMARENQTTQKGQKNSRERMKRIEEGIKELGSQILKEHPVENTQLQNEKLYLYYLQNGRDMYVDQELDINRLSDYDVDHIVPQSFLKDDSIDNKVLTRSDKARGKSDNVPSEEVVKKMKNYWRQLLNAKLITQRKFDNLTKAERGGLSELDKAGFIKRQLVETRQITKHVAQILDSRMNTKYDENDKLIREVKVITLKSKLVSDFRKDFQFYKVREINNYHHAHDAYLNAVVGTALIKKYPKLESEFVYGDYKVYDVRKMIAKSEQEIGKATAKYFFYSNIMNFFKTEITLANGEIRKRPLIETNGETGEIVWDKGRDFATVRKVLSMPQVNIVKKTEVQTGGFSKESILPKRNSDKLIARKKDWDPKKYGGFDSPTVAYSVLVVAKVEKGKSKKLKSVKELLGITIMERSSFEKNPIDFLEAKGYKEVKKDLIIKLPKYSLFELENGRKRMLASAGELQKGNELALPSKYVNFLYLASHYEKLKGSPEDNEQKQLFVEQHKHYLDEIIEQISEFSKRVILADANLDKVLSAYNKHRDKPIREQAENIIHLFTLTNLGAPAAFKYFDTTIDRKRYTSTKEVLDATLIHQSITGLYETRIDLSQLGGDGGPAPGGGEAAAKGGTLNIEDEYRLHETSKGPDVPLGSTWLSDFPQAWAETGGMGLAVRQAPLIIPLKATSTPVSIKQYPMSQEARLGIKPHIQRLLDQGILVPCQSPWNTPLLPVKKPGTNDYRPVQDLREVNKRVEDIHPTVPNPYNLLSGLPPSHQWYTVLDLKDAFFCLRLHPTSQSLFAFEWRDPEMGISGQLTWTRLPQGFKNSPTLFNEALHRDLADFRIQHPDLILLQYVDDLLLAATSELDCQQGTRALLQTLGDLGYRASAKKAQICQKQVKYLGYLLKEGQRWLTEARKETVMGQPTPKTPRQLREFLGTAGFCRLWIPGFAEMAAPLYPLTKPGTLFEWGPDQQKAYQEIKQALLTAPALGLPDLTKPFELFVDEKQGYAKGVLTQKLGPWRRPVAYLSKKLDPVAAGWPPCLRMVAAIAVLTKDAGKLTMGQPLVILAPHAVEALVKQPPDRWLSNARMTHYQALLLDTDRVQFGPIVALNPATLLPLPEEGLQHDCLDILAEAHGTRPDLTDQPLPDADHTWYTDGSSFLQEGQRKAGAAVTTETEVVWAKALPAGTSAQRAELIALTQALKMAEGKKLNVYTDSRYAFATAHIHGEIYRRRGWLTSEGKEIKNKDEILALLKALFLPKRLSIIHCPGHQKGNRAEARGNRMADQAAREVATRETPETSTLLAGKRTADGSEFEKRTADGSEFESPKKKAKVE

SEQ ID NO: 2441 - protein, 2110 aa, synthetic construct
MPAAKRVKLDGGDKKYSIGLDIGTNSVGWAVITDEYKVPSKKFKVLGNTDRHSIKKNLIGALLFDSGETAEATRLKRTARRRYTRRKNRICYLQEIFSNEMAKVDDSFFHRLEESFLVEEDKKHERHPIFGNIVDEVAYHEKYPTIYHLRKKLVDSTDKADLRLIYLALAHMIKFRGHFLIEGDLNPDNSDVDKLFIQLVQTYNQLFEENPINASGVDAKAILSARLSKSRRLENLIAQLPGEKKNGLFGNLIALSLGLTPNFKSNFDLAEDAKLQLSKDTYDDDLDNLLAQIGDQYADLFLAAKNLSDAILLSDILRVNTEITKAPLSASMIKRYDEHHQDLTLLKALVRQQLPEKYKEIFFDQSKNGYAGYIDGGASQEEFYKFIKPILEKMDGTEELLVKLNREDLLRKQRTFDNGSIPHQIHLGELHAILRRQEDFYPFLKDNREKIEKILTFRIPYYVGPLARGNSRFAWMTRKSEETITPWNFEEVVDKGASAQSFIERMTNFDKNLPNEKVLPKHSLLYEYFTVYNELTKVKYVTEGMRKPAFLSGEQKKAIVDLLFKTNRKVTVKQLKEDYFKKIECFDSVEISGVEDRFNASLGTYHDLLKIIKDKDFLDNEENEDILEDIVLTLTLFEDREMIEERLKTYAHLFDDKVMKQLKRRRYTGWGRLSRKLINGIRDKQSGKTILDFLKSDGFANRNFMQLIHDDSLTFKEDIQKAQVSGQGDSLHEHIANLAGSPAIKKGILQTVKVVDELVKVMGRHKPENIVIEMARENQTTQKGQKNSRERMKRIEEGIKELGSQILKEHPVENTQLQNEKLYLYYLQNGRDMYVDQELDINRLSDYDVDHIVPQSFLKDDSIDNKVLTRSDKARGKSDNVPSEEVVKKMKNYWRQLLNAKLITQRKFDNLTKAERGGLSELDKAGFIKRQLVETRQITKHVAQILDSRMNTKYDENDKLIREVKVITLKSKLVSDFRKDFQFYKVREINNYHHAHDAYLNAVVGTALIKKYPKLESEFVYGDYKVYDVRKMIAKSEQEIGKATAKYFFYSNIMNFFKTEITLANGEIRKRPLIETNGETGEIVWDKGRDFATVRKVLSMPQVNIVKKTEVQTGGFSKESILPKRNSDKLIARKKDWDPKKYGGFDSPTVAYSVLVVAKVEKGKSKKLKSVKELLGITIMERSSFEKNPIDFLEAKGYKEVKKDLIIKLPKYSLFELENGRKRMLASAGELQKGNELALPSKYVNFLYLASHYEKLKGSPEDNEQKQLFVEQHKHYLDEIIEQISEFSKRVILADANLDKVLSAYNKHRDKPIREQAENIIHLFTLTNLGAPAAFKYFDTTIDRKRYTSTKEVLDATLIHQSITGLYETRIDLSQLGGDGGGGGGSGGGGSGGGGSGGGGSGGGGSGGTLNIEDEYRLHETSKGPDVPLGSTWLSDFPQAWAETGGMGLAVRQAPLIIPLKATSTPVSIKQYPMSQEARLGIKPHIQRLLDQGILVPCQSPWNTPLLPVKKPGTNDYRPVQDLREVNKRVEDIHPTVPNPYNLLSGLPPSHQWYTVLDLKDAFFCLRLHPTSQSLFAFEWRDPEMGISGQLTWTRLPQGFKNSPTLFNEALHRDLADFRIQHPDLILLQYVDDLLLAATSELDCQQGTRALLQTLGDLGYRASAKKAQICQKQVKYLGYLLKEGQRWLTEARKETVMGQPTPKTPRQLREFLGTAGFCRLWIPGFAEMAAPLYPLTKPGTLFEWGPDQQKAYQEIKQALLTAPALGLPDLTKPFELFVDEKQGYAKGVLTQKLGPWRRPVAYLSKKLDPVAAGWPPCLRMVAAIAVLTKDAGKLTMGQPLVILAPHAVEALVKQPPDRWLSNARMTHYQALLLDTDRVQFGPIVALNPATLLPLPEEGLQHDCLDILAEAHGTRPDLTDQPLPDADHTWYTDGSSFLQEGQRKAGAAVTTETEVVWAKALPAGTSAQRAELIALTQALKMAEGKKLNVYTDSRYAFATAHIHGEIYRRRGWLTSEGKEIKNKDEILALLKALFLPKRLSIIHCPGHQKGNRAEARGNRMADQAAREVATRETPETSTLLAGKRTADGSEFEKRTADGSEFESPKKKAKVE

SEQ ID NO: 2442 - protein, 2088 aa, synthetic construct
MPAAKRVKLDGGDKKYSIGLDIGTNSVGWAVITDEYKVPSKKFKVLGNTDRHSIKKNLIGALLFDSGETAEATRLKRTARRRYTRRKNRICYLQEIFSNEMAKVDDSFFHRLEESFLVEEDKKHERHPIFGNIVDEVAYHEKYPTIYHLRKKLVDSTDKADLRLIYLALAHMIKFRGHFLIEGDLNPDNSDVDKLFIQLVQTYNQLFEENPINASGVDAKAILSARLSKSRRLENLIAQLPGEKKNGLFGNLIALSLGLTPNFKSNFDLAEDAKLQLSKDTYDDDLDNLLAQIGDQYADLFLAAKNLSDAILLSDILRVNTEITKAPLSASMIKRYDEHHQDLTLLKALVRQQLPEKYKEIFFDQSKNGYAGYIDGGASQEEFYKFIKPILEKMDGTEELLVKLNREDLLRKQRTFDNGSIPHQIHLGELHAILRRQEDFYPFLKDNREKIEKILTFRIPYYVGPLARGNSRFAWMTRKSEETITPWNFEEVVDKGASAQSFIERMTNFDKNLPNEKVLPKHSLLYEYFTVYNELTKVKYVTEGMRKPAFLSGEQKKAIVDLLFKTNRKVTVKQLKEDYFKKIECFDSVEISGVEDRFNASLGTYHDLLKIIKDKDFLDNEENEDILEDIVLTLTLFEDREMIEERLKTYAHLFDDKVMKQLKRRRYTGWGRLSRKLINGIRDKQSGKTILDFLKSDGFANRNFMQLIHDDSLTFKEDIQKAQVSGQGDSLHEHIANLAGSPAIKKGILQTVKVVDELVKVMGRHKPENIVIEMARENQTTQKGQKNSRERMKRIEEGIKELGSQILKEHPVENTQLQNEKLYLYYLQNGRDMYVDQELDINRLSDYDVDHIVPQSFLKDDSIDNKVLTRSDKARGKSDNVPSEEVVKKMKNYWRQLLNAKLITQRKFDNLTKAERGGLSELDKAGFIKRQLVETRQITKHVAQILDSRMNTKYDENDKLIREVKVITLKSKLVSDFRKDFQFYKVREINNYHHAHDAYLNAVVGTALIKKYPKLESEFVYGDYKVYDVRKMIAKSEQEIGKATAKYFFYSNIMNFFKTEITLANGEIRKRPLIETNGETGEIVWDKGRDFATVRKVLSMPQVNIVKKTEVQTGGFSKESILPKRNSDKLIARKKDWDPKKYGGFDSPTVAYSVLVVAKVEKGKSKKLKSVKELLGITIMERSSFEKNPIDFLEAKGYKEVKKDLIIKLPKYSLFELENGRKRMLASAGELQKGNELALPSKYVNFLYLASHYEKLKGSPEDNEQKQLFVEQHKHYLDEIIEQISEFSKRVILADANLDKVLSAYNKHRDKPIREQAENIIHLFTLTNLGAPAAFKYFDTTIDRKRYTSTKEVLDATLIHQSITGLYETRIDLSQLGGDGGPAPGGTLNIEDEYRLHETSKGPDVPLGSTWLSDFPQAWAETGGMGLAVRQAPLIIPLKATSTPVSIKQYPMSQEARLGIKPHIQRLLDQGILVPCQSPWNTPLLPVKKPGTNDYRPVQDLREVNKRVEDIHPTVPNPYNLLSGLPPSHQWYTVLDLKDAFFCLRLHPTSQSLFAFEWRDPEMGISGQLTWTRLPQGFKNSPTLFNEALHRDLADFRIQHPDLILLQYVDDLLLAATSELDCQQGTRALLQTLGDLGYRASAKKAQICQKQVKYLGYLLKEGQRWLTEARKETVMGQPTPKTPRQLREFLGTAGFCRLWIPGFAEMAAPLYPLTKPGTLFEWGPDQQKAYQEIKQALLTAPALGLPDLTKPFELFVDEKQGYAKGVLTQKLGPWRRPVAYLSKKLDPVAAGWPPCLRMVAAIAVLTKDAGKLTMGQPLVILAPHAVEALVKQPPDRWLSNARMTHYQALLLDTDRVQFGPIVALNPATLLPLPEEGLQHDCLDILAEAHGTRPDLTDQPLPDADHTWYTDGSSFLQEGQRKAGAAVTTETEVVWAKALPAGTSAQRAELIALTQALKMAEGKKLNVYTDSRYAFATAHIHGEIYRRRGWLTSEGKEIKNKDEILALLKALFLPKRLSIIHCPGHQKGNRAEARGNRMADQAAREVATRETPETSTLLAGKRTADGSEFEKRTADGSEFESPKKKAKVE

SEQ ID NO: 2443 - protein, 2100 aa, synthetic construct
MPAAKRVKLDGGDKKYSIGLDIGTNSVGWAVITDEYKVPSKKFKVLGNTDRHSIKKNLIGALLFDSGETAEATRLKRTARRRYTRRKNRICYLQEIFSNEMAKVDDSFFHRLEESFLVEEDKKHERHPIFGNIVDEVAYHEKYPTIYHLRKKLVDSTDKADLRLIYLALAHMIKFRGHFLIEGDLNPDNSDVDKLFIQLVQTYNQLFEENPINASGVDAKAILSARLSKSRRLENLIAQLPGEKKNGLFGNLIALSLGLTPNFKSNFDLAEDAKLQLSKDTYDDDLDNLLAQIGDQYADLFLAAKNLSDAILLSDILRVNTEITKAPLSASMIKRYDEHHQDLTLLKALVRQQLPEKYKEIFFDQSKNGYAGYIDGGASQEEFYKFIKPILEKMDGTEELLVKLNREDLLRKQRTFDNGSIPHQIHLGELHAILRRQEDFYPFLKDNREKIEKILTFRIPYYVGPLARGNSRFAWMTRKSEETITPWNFEEVVDKGASAQSFIERMTNFDKNLPNEKVLPKHSLLYEYFTVYNELTKVKYVTEGMRKPAFLSGEQKKAIVDLLFKTNRKVTVKQLKEDYFKKIECFDSVEISGVEDRFNASLGTYHDLLKIIKDKDFLDNEENEDILEDIVLTLTLFEDREMIEERLKTYAHLFDDKVMKQLKRRRYTGWGRLSRKLINGIRDKQSGKTILDFLKSDGFANRNFMQLIHDDSLTFKEDIQKAQVSGQGDSLHEHIANLAGSPAIKKGILQTVKVVDELVKVMGRHKPENIVIEMARENQTTQKGQKNSRERMKRIEEGIKELGSQILKEHPVENTQLQNEKLYLYYLQNGRDMYVDQELDINRLSDYDVDHIVPQSFLKDDSIDNKVLTRSDKARGKSDNVPSEEVVKKMKNYWRQLLNAKLITQRKFDNLTKAERGGLSELDKAGFIKRQLVETRQITKHVAQILDSRMNTKYDENDKLIREVKVITLKSKLVSDFRKDFQFYKVREINNYHHAHDAYLNAVVGTALIKKYPKLESEFVYGDYKVYDVRKMIAKSEQEIGKATAKYFFYSNIMNFFKTEITLANGEIRKRPLIETNGETGEIVWDKGRDFATVRKVLSMPQVNIVKKTEVQTGGFSKESILPKRNSDKLIARKKDWDPKKYGGFDSPTVAYSVLVVAKVEKGKSKKLKSVKELLGITIMERSSFEKNPIDFLEAKGYKEVKKDLIIKLPKYSLFELENGRKRMLASAGELQKGNELALPSKYVNFLYLASHYEKLKGSPEDNEQKQLFVEQHKHYLDEIIEQISEFSKRVILADANLDKVLSAYNKHRDKPIREQAENIIHLFTLTNLGAPAAFKYFDTTIDRKRYTSTKEVLDATLIHQSITGLYETRIDLSQLGGDGGGSSGSSGSSGSSGSSGGTLNIEDEYRLHETSKGPDVPLGSTWLSDFPQAWAETGGMGLAVRQAPLIIPLKATSTPVSIKQYPMSQEARLGIKPHIQRLLDQGILVPCQSPWNTPLLPVKKPGTNDYRPVQDLREVNKRVEDIHPTVPNPYNLLSGLPPSHQWYTVLDLKDAFFCLRLHPTSQSLFAFEWRDPEMGISGQLTWTRLPQGFKNSPTLFNEALHRDLADFRIQHPDLILLQYVDDLLLAATSELDCQQGTRALLQTLGDLGYRASAKKAQICQKQVKYLGYLLKEGQRWLTEARKETVMGQPTPKTPRQLREFLGTAGFCRLWIPGFAEMAAPLYPLTKPGTLFEWGPDQQKAYQEIKQALLTAPALGLPDLTKPFELFVDEKQGYAKGVLTQKLGPWRRPVAYLSKKLDPVAAGWPPCLRMVAAIAVLTKDAGKLTMGQPLVILAPHAVEALVKQPPDRWLSNARMTHYQALLLDTDRVQFGPIVALNPATLLPLPEEGLQHDCLDILAEAHGTRPDLTDQPLPDADHTWYTDGSSFLQEGQRKAGAAVTTETEVVWAKALPAGTSAQRAELIALTQALKMAEGKKLNVYTDSRYAFATAHIHGEIYRRRGWLTSEGKEIKNKDEILALLKALFLPKRLSIIHCPGHQKGNRAEARGNRMADQAAREVATRETPETSTLLAGKRTADGSEFEKRTADGSEFESPKKKAKVE

SEQ ID NO: 2444 - protein, 2096 aa, synthetic construct
MPAAKRVKLDGGDKKYSIGLDIGTNSVGWAVITDEYKVPSKKFKVLGNTDRHSIKKNLIGALLFDSGETAEATRLKRTARRRYTRRKNRICYLQEIFSNEMAKVDDSFFHRLEESFLVEEDKKHERHPIFGNIVDEVAYHEKYPTIYHLRKKLVDSTDKADLRLIYLALAHMIKFRGHFLIEGDLNPDNSDVDKLFIQLVQTYNQLFEENPINASGVDAKAILSARLSKSRRLENLIAQLPGEKKNGLFGNLIALSLGLTPNFKSNFDLAEDAKLQLSKDTYDDDLDNLLAQIGDQYADLFLAAKNLSDAILLSDILRVNTEITKAPLSASMIKRYDEHHQDLTLLKALVRQQLPEKYKEIFFDQSKNGYAGYIDGGASQEEFYKFIKPILEKMDGTEELLVKLNREDLLRKQRTFDNGSIPHQIHLGELHAILRRQEDFYPFLKDNREKIEKILTFRIPYYVGPLARGNSRFAWMTRKSEETITPWNFEEVVDKGASAQSFIERMTNFDKNLPNEKVLPKHSLLYEYFTVYNELTKVKYVTEGMRKPAFLSGEQKKAIVDLLFKTNRKVTVKQLKEDYFKKIECFDSVEISGVEDRFNASLGTYHDLLKIIKDKDFLDNEENEDILEDIVLTLTLFEDREMIEERLKTYAHLFDDKVMKQLKRRRYTGWGRLSRKLINGIRDKQSGKTILDFLKSDGFANRNFMQLIHDDSLTFKEDIQKAQVSGQGDSLHEHIANLAGSPAIKKGILQTVKVVDELVKVMGRHKPENIVIEMARENQTTQKGQKNSRERMKRIEEGIKELGSQILKEHPVENTQLQNEKLYLYYLQNGRDMYVDQELDINRLSDYDVDHIVPQSFLKDDSIDNKVLTRSDKARGKSDNVPSEEVVKKMKNYWRQLLNAKLITQRKFDNLTKAERGGLSELDKAGFIKRQLVETRQITKHVAQILDSRMNTKYDENDKLIREVKVITLKSKLVSDFRKDFQFYKVREINNYHHAHDAYLNAVVGTALIKKYPKLESEFVYGDYKVYDVRKMIAKSEQEIGKATAKYFFYSNIMNFFKTEITLANGEIRKRPLIETNGETGEIVWDKGRDFATVRKVLSMPQVNIVKKTEVQTGGFSKESILPKRNSDKLIARKKDWDPKKYGGFDSPTVAYSVLVVAKVEKGKSKKLKSVKELLGITIMERSSFEKNPIDFLEAKGYKEVKKDLIIKLPKYSLFELENGRKRMLASAGELQKGNELALPSKYVNFLYLASHYEKLKGSPEDNEQKQLFVEQHKHYLDEIIEQISEFSKRVILADANLDKVLSAYNKHRDKPIREQAENIIHLFTLTNLGAPAAFKYFDTTIDRKRYTSTKEVLDATLIHQSITGLYETRIDLSQLGGDGGEAAAKGSSGGSGGTLNIEDEYRLHETSKGPDVPLGSTWLSDFPQAWAETGGMGLAVRQAPLIIPLKATSTPVSIKQYPMSQEARLGIKPHIQRLLDQGILVPCQSPWNTPLLPVKKPGTNDYRPVQDLREVNKRVEDIHPTVPNPYNLLSGLPPSHQWYTVLDLKDAFFCLRLHPTSQSLFAFEWRDPEMGISGQLTWTRLPQGFKNSPTLFNEALHRDLADFRIQHPDLILLQYVDDLLLAATSELDCQQGTRALLQTLGDLGYRASAKKAQICQKQVKYLGYLLKEGQRWLTEARKETVMGQPTPKTPRQLREFLGTAGFCRLWIPGFAEMAAPLYPLTKPGTLFEWGPDQQKAYQEIKQALLTAPALGLPDLTKPFELFVDEKQGYAKGVLTQKLGPWRRPVAYLSKKLDPVAAGWPPCLRMVAAIAVLTKDAGKLTMGQPLVILAPHAVEALVKQPPDRWLSNARMTHYQALLLDTDRVQFGPIVALNPATLLPLPEEGLQHDCLDILAEAHGTRPDLTDQPLPDADHTWYTDGSSFLQEGQRKAGAAVTTETEVVWAKALPAGTSAQRAELIALTQALKMAEGKKLNVYTDSRYAFATAHIHGEIYRRRGWLTSEGKEIKNKDEILALLKALFLPKRLSIIHCPGHQKGNRAEARGNRMADQAAREVATRETPETSTLLAGKRTADGSEFEKRTADGSEFESPKKKAKVE

SEQ ID NO: 2445 - protein, 2091 aa, synthetic construct
MPAAKRVKLDGGDKKYSIGLDIGTNSVGWAVITDEYKVPSKKFKVLGNTDRHSIKKNLIGALLFDSGETAEATRLKRTARRRYTRRKNRICYLQEIFSNEMAKVDDSFFHRLEESFLVEEDKKHERHPIFGNIVDEVAYHEKYPTIYHLRKKLVDSTDKADLRLIYLALAHMIKFRGHFLIEGDLNPDNSDVDKLFIQLVQTYNQLFEENPINASGVDAKAILSARLSKSRRLENLIAQLPGEKKNGLFGNLIALSLGLTPNFKSNFDLAEDAKLQLSKDTYDDDLDNLLAQIGDQYADLFLAAKNLSDAILLSDILRVNTEITKAPLSASMIKRYDEHHQDLTLLKALVRQQLPEKYKEIFFDQSKNGYAGYIDGGASQEEFYKFIKPILEKMDGTEELLVKLNREDLLRKQRTFDNGSIPHQIHLGELHAILRRQEDFYPFLKDNREKIEKILTFRIPYYVGPLARGNSRFAWMTRKSEETITPWNFEEVVDKGASAQSFIERMTNFDKNLPNEKVLPKHSLLYEYFTVYNELTKVKYVTEGMRKPAFLSGEQKKAIVDLLFKTNRKVTVKQLKEDYFKKIECFDSVEISGVEDRFNASLGTYHDLLKIIKDKDFLDNEENEDILEDIVLTLTLFEDREMIEERLKTYAHLFDDKVMKQLKRRRYTGWGRLSRKLINGIRDKQSGKTILDFLKSDGFANRNFMQLIHDDSLTFKEDIQKAQVSGQGDSLHEHIANLAGSPAIKKGILQTVKVVDELVKVMGRHKPENIVIEMARENQTTQKGQKNSRERMKRIEEGIKELGSQILKEHPVENTQLQNEKLYLYYLQNGRDMYVDQELDINRLSDYDVDHIVPQSFLKDDSIDNKVLTRSDKARGKSDNVPSEEVVKKMKNYWRQLLNAKLITQRKFDNLTKAERGGLSELDKAGFIKRQLVETRQITKHVAQILDSRMNTKYDENDKLIREVKVITLKSKLVSDFRKDFQFYKVREINNYHHAHDAYLNAVVGTALIKKYPKLESEFVYGDYKVYDVRKMIAKSEQEIGKATAKYFFYSNIMNFFKTEITLANGEIRKRPLIETNGETGEIVWDKGRDFATVRKVLSMPQVNIVKKTEVQTGGFSKESILPKRNSDKLIARKKDWDPKKYGGFDSPTVAYSVLVVAKVEKGKSKKLKSVKELLGITIMERSSFEKNPIDFLEAKGYKEVKKDLIIKLPKYSLFELENGRKRMLASAGELQKGNELALPSKYVNFLYLASHYEKLKGSPEDNEQKQLFVEQHKHYLDEIIEQISEFSKRVILADANLDKVLSAYNKHRDKPIREQAENIIHLFTLTNLGAPAAFKYFDTTIDRKRYTSTKEVLDATLIHQSITGLYETRIDLSQLGGDGGGGGPAPGGTLNIEDEYRLHETSKGPDVPLGSTWLSDFPQAWAETGGMGLAVRQAPLIIPLKATSTPVSIKQYPMSQEARLGIKPHIQRLLDQGILVPCQSPWNTPLLPVKKPGTNDYRPVQDLREVNKRVEDIHPTVPNPYNLLSGLPPSHQWYTVLDLKDAFFCLRLHPTSQSLFAFEWRDPEMGISGQLTWTRLPQGFKNSPTLFNEALHRDLADFRIQHPDLILLQYVDDLLLAATSELDCQQGTRALLQTLGDLGYRASAKKAQICQKQVKYLGYLLKEGQRWLTEARKETVMGQPTPKTPRQLREFLGTAGFCRLWIPGFAEMAAPLYPLTKPGTLFEWGPDQQKAYQEIKQALLTAPALGLPDLTKPFELFVDEKQGYAKGVLTQKLGPWRRPVAYLSKKLDPVAAGWPPCLRMVAAIAVLTKDAGKLTMGQPLVILAPHAVEALVKQPPDRWLSNARMTHYQALLLDTDRVQFGPIVALNPATLLPLPEEGLQHDCLDILAEAHGTRPDLTDQPLPDADHTWYTDGSSFLQEGQRKAGAAVTTETEVVWAKALPAGTSAQRAELIALTQALKMAEGKKLNVYTDSRYAFATAHIHGEIYRRRGWLTSEGKEIKNKDEILALLKALFLPKRLSIIHCPGHQKGNRAEARGNRMADQAAREVATRETPETSTLLAGKRTADGSEFEKRTADGSEFESPKKKAKVE

SEQ ID NO: 2446 - protein, 2105 aa, synthetic construct
MPAAKRVKLDGGDKKYSIGLDIGTNSVGWAVITDEYKVPSKKFKVLGNTDRHSIKKNLIGALLFDSGETAEATRLKRTARRRYTRRKNRICYLQEIFSNEMAKVDDSFFHRLEESFLVEEDKKHERHPIFGNIVDEVAYHEKYPTIYHLRKKLVDSTDKADLRLIYLALAHMIKFRGHFLIEGDLNPDNSDVDKLFIQLVQTYNQLFEENPINASGVDAKAILSARLSKSRRLENLIAQLPGEKKNGLFGNLIALSLGLTPNFKSNFDLAEDAKLQLSKDTYDDDLDNLLAQIGDQYADLFLAAKNLSDAILLSDILRVNTEITKAPLSASMIKRYDEHHQDLTLLKALVRQQLPEKYKEIFFDQSKNGYAGYIDGGASQEEFYKFIKPILEKMDGTEELLVKLNREDLLRKQRTFDNGSIPHQIHLGELHAILRRQEDFYPFLKDNREKIEKILTFRIPYYVGPLARGNSRFAWMTRKSEETITPWNFEEVVDKGASAQSFIERMTNFDKNLPNEKVLPKHSLLYEYFTVYNELTKVKYVTEGMRKPAFLSGEQKKAIVDLLFKTNRKVTVKQLKEDYFKKIECFDSVEISGVEDRFNASLGTYHDLLKIIKDKDFLDNEENEDILEDIVLTLTLFEDREMIEERLKTYAHLFDDKVMKQLKRRRYTGWGRLSRKLINGIRDKQSGKTILDFLKSDGFANRNFMQLIHDDSLTFKEDIQKAQVSGQGDSLHEHIANLAGSPAIKKGILQTVKVVDELVKVMGRHKPENIVIEMARENQTTQKGQKNSRERMKRIEEGIKELGSQILKEHPVENTQLQNEKLYLYYLQNGRDMYVDQELDINRLSDYDVDHIVPQSFLKDDSIDNKVLTRSDKARGKSDNVPSEEVVKKMKNYWRQLLNAKLITQRKFDNLTKAERGGLSELDKAGFIKRQLVETRQITKHVAQILDSRMNTKYDENDKLIREVKVITLKSKLVSDFRKDFQFYKVREINNYHHAHDAYLNAVVGTALIKKYPKLESEFVYGDYKVYDVRKMIAKSEQEIGKATAKYFFYSNIMNFFKTEITLANGEIRKRPLIETNGETGEIVWDKGRDFATVRKVLSMPQVNIVKKTEVQTGGFSKESILPKRNSDKLIARKKDWDPKKYGGFDSPTVAYSVLVVAKVEKGKSKKLKSVKELLGITIMERSSFEKNPIDFLEAKGYKEVKKDLIIKLPKYSLFELENGRKRMLASAGELQKGNELALPSKYVNFLYLASHYEKLKGSPEDNEQKQLFVEQHKHYLDEIIEQISEFSKRVILADANLDKVLSAYNKHRDKPIREQAENIIHLFTLTNLGAPAAFKYFDTTIDRKRYTSTKEVLDATLIHQSITGLYETRIDLSQLGGDGGEAAAKEAAAKEAAAKEAAAKGGTLNIEDEYRLHETSKGPDVPLGSTWLSDFPQAWAETGGMGLAVRQAPLIIPLKATSTPVSIKQYPMSQEARLGIKPHIQRLLDQGILVPCQSPWNTPLLPVKKPGTNDYRPVQDLREVNKRVEDIHPTVPNPYNLLSGLPPSHQWYTVLDLKDAFFCLRLHPTSQSLFAFEWRDPEMGISGQLTWTRLPQGFKNSPTLFNEALHRDLADFRIQHPDLILLQYVDDLLLAATSELDCQQGTRALLQTLGDLGYRASAKKAQICQKQVKYLGYLLKEGQRWLTEARKETVMGQPTPKTPRQLREFLGTAGFCRLWIPGFAEMAAPLYPLTKPGTLFEWGPDQQKAYQEIKQALLTAPALGLPDLTKPFELFVDEKQGYAKGVLTQKLGPWRRPVAYLSKKLDPVAAGWPPCLRMVAAIAVLTKDAGKLTMGQPLVILAPHAVEALVKQPPDRWLSNARMTHYQALLLDTDRVQFGPIVALNPATLLPLPEEGLQHDCLDILAEAHGTRPDLTDQPLPDADHTWYTDGSSFLQEGQRKAGAAVTTETEVVWAKALPAGTSAQRAELIALTQALKMAEGKKLNVYTDSRYAFATAHIHGEIYRRRGWLTSEGKEIKNKDEILALLKALFLPKRLSIIHCPGHQKGNRAEARGNRMADQAAREVATRETPETSTLLAGKRTADGSEFEKRTADGSEFESPKKKAKVE

SEQ ID NO: 2447 - protein, 2096 aa, synthetic construct
MPAAKRVKLDGGDKKYSIGLDIGTNSVGWAVITDEYKVPSKKFKVLGNTDRHSIKKNLIGALLFDSGETAEATRLKRTARRRYTRRKNRICYLQEIFSNEMAKVDDSFFHRLEESFLVEEDKKHERHPIFGNIVDEVAYHEKYPTIYHLRKKLVDSTDKADLRLIYLALAHMIKFRGHFLIEGDLNPDNSDVDKLFIQLVQTYNQLFEENPINASGVDAKAILSARLSKSRRLENLIAQLPGEKKNGLFGNLIALSLGLTPNFKSNFDLAEDAKLQLSKDTYDDDLDNLLAQIGDQYADLFLAAKNLSDAILLSDILRVNTEITKAPLSASMIKRYDEHHQDLTLLKALVRQQLPEKYKEIFFDQSKNGYAGYIDGGASQEEFYKFIKPILEKMDGTEELLVKLNREDLLRKQRTFDNGSIPHQIHLGELHAILRRQEDFYPFLKDNREKIEKILTFRIPYYVGPLARGNSRFAWMTRKSEETITPWNFEEVVDKGASAQSFIERMTNFDKNLPNEKVLPKHSLLYEYFTVYNELTKVKYVTEGMRKPAFLSGEQKKAIVDLLFKTNRKVTVKQLKEDYFKKIECFDSVEISGVEDRFNASLGTYHDLLKIIKDKDFLDNEENEDILEDIVLTLTLFEDREMIEERLKTYAHLFDDKVMKQLKRRRYTGWGRLSRKLINGIRDKQSGKTILDFLKSDGFANRNFMQLIHDDSLTFKEDIQKAQVSGQGDSLHEHIANLAGSPAIKKGILQTVKVVDELVKVMGRHKPENIVIEMARENQTTQKGQKNSRERMKRIEEGIKELGSQILKEHPVENTQLQNEKLYLYYLQNGRDMYVDQELDINRLSDYDVDHIVPQSFLKDDSIDNKVLTRSDKARGKSDNVPSEEVVKKMKNYWRQLLNAKLITQRKFDNLTKAERGGLSELDKAGFIKRQLVETRQITKHVAQILDSRMNTKYDENDKLIREVKVITLKSKLVSDFRKDFQFYKVREINNYHHAHDAYLNAVVGTALIKKYPKLESEFVYGDYKVYDVRKMIAKSEQEIGKATAKYFFYSNIMNFFKTEITLANGEIRKRPLIETNGETGEIVWDKGRDFATVRKVLSMPQVNIVKKTEVQTGGFSKESILPKRNSDKLIARKKDWDPKKYGGFDSPTVAYSVLVVAKVEKGKSKKLKSVKELLGITIMERSSFEKNPIDFLEAKGYKEVKKDLIIKLPKYSLFELENGRKRMLASAGELQKGNELALPSKYVNFLYLASHYEKLKGSPEDNEQKQLFVEQHKHYLDEIIEQISEFSKRVILADANLDKVLSAYNKHRDKPIREQAENIIHLFTLTNLGAPAAFKYFDTTIDRKRYTSTKEVLDATLIHQSITGLYETRIDLSQLGGDGGGGSPAPEAAAKGGTLNIEDEYRLHETSKGPDVPLGSTWLSDFPQAWAETGGMGLAVRQAPLIIPLKATSTPVSIKQYPMSQEARLGIKPHIQRLLDQGILVPCQSPWNTPLLPVKKPGTNDYRPVQDLREVNKRVEDIHPTVPNPYNLLSGLPPSHQWYTVLDLKDAFFCLRLHPTSQSLFAFEWRDPEMGISGQLTWTRLPQGFKNSPTLFNEALHRDLADFRIQHPDLILLQYVDDLLLAATSELDCQQGTRALLQTLGDLGYRASAKKAQICQKQVKYLGYLLKEGQRWLTEARKETVMGQPTPKTPRQLREFLGTAGFCRLWIPGFAEMAAPLYPLTKPGTLFEWGPDQQKAYQEIKQALLTAPALGLPDLTKPFELFVDEKQGYAKGVLTQKLGPWRRPVAYLSKKLDPVAAGWPPCLRMVAAIAVLTKDAGKLTMGQPLVILAPHAVEALVKQPPDRWLSNARMTHYQALLLDTDRVQFGPIVALNPATLLPLPEEGLQHDCLDILAEAHGTRPDLTDQPLPDADHTWYTDGSSFLQEGQRKAGAAVTTETEVVWAKALPAGTSAQRAELIALTQALKMAEGKKLNVYTDSRYAFATAHIHGEIYRRRGWLTSEGKEIKNKDEILALLKALFLPKRLSIIHCPGHQKGNRAEARGNRMADQAAREVATRETPETSTLLAGKRTADGSEFEKRTADGSEFESPKKKAKVE

SEQ ID NO: 2448 - protein, 2090 aa, synthetic construct
MPAAKRVKLDGGDKKYSIGLDIGTNSVGWAVITDEYKVPSKKFKVLGNTDRHSIKKNLIGALLFDSGETAEATRLKRTARRRYTRRKNRICYLQEIFSNEMAKVDDSFFHRLEESFLVEEDKKHERHPIFGNIVDEVAYHEKYPTIYHLRKKLVDSTDKADLRLIYLALAHMIKFRGHFLIEGDLNPDNSDVDKLFIQLVQTYNQLFEENPINASGVDAKAILSARLSKSRRLENLIAQLPGEKKNGLFGNLIALSLGLTPNFKSNFDLAEDAKLQLSKDTYDDDLDNLLAQIGDQYADLFLAAKNLSDAILLSDILRVNTEITKAPLSASMIKRYDEHHQDLTLLKALVRQQLPEKYKEIFFDQSKNGYAGYIDGGASQEEFYKFIKPILEKMDGTEELLVKLNREDLLRKQRTFDNGSIPHQIHLGELHAILRRQEDFYPFLKDNREKIEKILTFRIPYYVGPLARGNSRFAWMTRKSEETITPWNFEEVVDKGASAQSFIERMTNFDKNLPNEKVLPKHSLLYEYFTVYNELTKVKYVTEGMRKPAFLSGEQKKAIVDLLFKTNRKVTVKQLKEDYFKKIECFDSVEISGVEDRFNASLGTYHDLLKIIKDKDFLDNEENEDILEDIVLTLTLFEDREMIEERLKTYAHLFDDKVMKQLKRRRYTGWGRLSRKLINGIRDKQSGKTILDFLKSDGFANRNFMQLIHDDSLTFKEDIQKAQVSGQGDSLHEHIANLAGSPAIKKGILQTVKVVDELVKVMGRHKPENIVIEMARENQTTQKGQKNSRERMKRIEEGIKELGSQILKEHPVENTQLQNEKLYLYYLQNGRDMYVDQELDINRLSDYDVDHIVPQSFLKDDSIDNKVLTRSDKARGKSDNVPSEEVVKKMKNYWRQLLNAKLITQRKFDNLTKAERGGLSELDKAGFIKRQLVETRQITKHVAQILDSRMNTKYDENDKLIREVKVITLKSKLVSDFRKDFQFYKVREINNYHHAHDAYLNAVVGTALIKKYPKLESEFVYGDYKVYDVRKMIAKSEQEIGKATAKYFFYSNIMNFFKTEITLANGEIRKRPLIETNGETGEIVWDKGRDFATVRKVLSMPQVNIVKKTEVQTGGFSKESILPKRNSDKLIARKKDWDPKKYGGFDSPTVAYSVLVVAKVEKGKSKKLKSVKELLGITIMERSSFEKNPIDFLEAKGYKEVKKDLIIKLPKYSLFELENGRKRMLASAGELQKGNELALPSKYVNFLYLASHYEKLKGSPEDNEQKQLFVEQHKHYLDEIIEQISEFSKRVILADANLDKVLSAYNKHRDKPIREQAENIIHLFTLTNLGAPAAFKYFDTTIDRKRYTSTKEVLDATLIHQSITGLYETRIDLSQLGGDGGPAPAPGGTLNIEDEYRLHETSKGPDVPLGSTWLSDFPQAWAETGGMGLAVRQAPLIIPLKATSTPVSIKQYPMSQEARLGIKPHIQRLLDQGILVPCQSPWNTPLLPVKKPGTNDYRPVQDLREVNKRVEDIHPTVPNPYNLLSGLPPSHQWYTVLDLKDAFFCLRLHPTSQSLFAFEWRDPEMGISGQLTWTRLPQGFKNSPTLFNEALHRDLADFRIQHPDLILLQYVDDLLLAATSELDCQQGTRALLQTLGDLGYRASAKKAQICQKQVKYLGYLLKEGQRWLTEARKETVMGQPTPKTPRQLREFLGTAGFCRLWIPGFAEMAAPLYPLTKPGTLFEWGPDQQKAYQEIKQALLTAPALGLPDLTKPFELFVDEKQGYAKGVLTQKLGPWRRPVAYLSKKLDPVAAGWPPCLRMVAAIAVLTKDAGKLTMGQPLVILAPHAVEALVKQPPDRWLSNARMTHYQALLLDTDRVQFGPIVALNPATLLPLPEEGLQHDCLDILAEAHGTRPDLTDQPLPDADHTWYTDGSSFLQEGQRKAGAAVTTETEVVWAKALPAGTSAQRAELIALTQALKMAEGKKLNVYTDSRYAFATAHIHGEIYRRRGWLTSEGKEIKNKDEILALLKALFLPKRLSIIHCPGHQKGNRAEARGNRMADQAAREVATRETPETSTLLAGKRTADGSEFEKRTADGSEFESPKKKAKVE

SEQ ID NO: 2449 - protein, 2098 aa, synthetic construct
MPAAKRVKLDGGDKKYSIGLDIGTNSVGWAVITDEYKVPSKKFKVLGNTDRHSIKKNLIGALLFDSGETAEATRLKRTARRRYTRRKNRICYLQEIFSNEMAKVDDSFFHRLEESFLVEEDKKHERHPIFGNIVDEVAYHEKYPTIYHLRKKLVDSTDKADLRLIYLALAHMIKFRGHFLIEGDLNPDNSDVDKLFIQLVQTYNQLFEENPINASGVDAKAILSARLSKSRRLENLIAQLPGEKKNGLFGNLIALSLGLTPNFKSNFDLAEDAKLQLSKDTYDDDLDNLLAQIGDQYADLFLAAKNLSDAILLSDILRVNTEITKAPLSASMIKRYDEHHQDLTLLKALVRQQLPEKYKEIFFDQSKNGYAGYIDGGASQEEFYKFIKPILEKMDGTEELLVKLNREDLLRKQRTFDNGSIPHQIHLGELHAILRRQEDFYPFLKDNREKIEKILTFRIPYYVGPLARGNSRFAWMTRKSEETITPWNFEEVVDKGASAQSFIERMTNFDKNLPNEKVLPKHSLLYEYFTVYNELTKVKYVTEGMRKPAFLSGEQKKAIVDLLFKTNRKVTVKQLKEDYFKKIECFDSVEISGVEDRFNASLGTYHDLLKIIKDKDFLDNEENEDILEDIVLTLTLFEDREMIEERLKTYAHLFDDKVMKQLKRRRYTGWGRLSRKLINGIRDKQSGKTILDFLKSDGFANRNFMQLIHDDSLTFKEDIQKAQVSGQGDSLHEHIANLAGSPAIKKGILQTVKVVDELVKVMGRHKPENIVIEMARENQTTQKGQKNSRERMKRIEEGIKELGSQILKEHPVENTQLQNEKLYLYYLQNGRDMYVDQELDINRLSDYDVDHIVPQSFLKDDSIDNKVLTRSDKARGKSDNVPSEEVVKKMKNYWRQLLNAKLITQRKFDNLTKAERGGLSELDKAGFIKRQLVETRQITKHVAQILDSRMNTKYDENDKLIREVKVITLKSKLVSDFRKDFQFYKVREINNYHHAHDAYLNAVVGTALIKKYPKLESEFVYGDYKVYDVRKMIAKSEQEIGKATAKYFFYSNIMNFFKTEITLANGEIRKRPLIETNGETGEIVWDKGRDFATVRKVLSMPQVNIVKKTEVQTGGFSKESILPKRNSDKLIARKKDWDPKKYGGFDSPTVAYSVLVVAKVEKGKSKKLKSVKELLGITIMERSSFEKNPIDFLEAKGYKEVKKDLIIKLPKYSLFELENGRKRMLASAGELQKGNELALPSKYVNFLYLASHYEKLKGSPEDNEQKQLFVEQHKHYLDEIIEQISEFSKRVILADANLDKVLSAYNKHRDKPIREQAENIIHLFTLTNLGAPAAFKYFDTTIDRKRYTSTKEVLDATLIHQSITGLYETRIDLSQLGGDGGPAPAPAPAPAPAPGGTLNIEDEYRLHETSKGPDVPLGSTWLSDFPQAWAETGGMGLAVRQAPLIIPLKATSTPVSIKQYPMSQEARLGIKPHIQRLLDQGILVPCQSPWNTPLLPVKKPGTNDYRPVQDLREVNKRVEDIHPTVPNPYNLLSGLPPSHQWYTVLDLKDAFFCLRLHPTSQSLFAFEWRDPEMGISGQLTWTRLPQGFKNSPTLFNEALHRDLADFRIQHPDLILLQYVDDLLLAATSELDCQQGTRALLQTLGDLGYRASAKKAQICQKQVKYLGYLLKEGQRWLTEARKETVMGQPTPKTPRQLREFLGTAGFCRLWIPGFAEMAAPLYPLTKPGTLFEWGPDQQKAYQEIKQALLTAPALGLPDLTKPFELFVDEKQGYAKGVLTQKLGPWRRPVAYLSKKLDPVAAGWPPCLRMVAAIAVLTKDAGKLTMGQPLVILAPHAVEALVKQPPDRWLSNARMTHYQALLLDTDRVQFGPIVALNPATLLPLPEEGLQHDCLDILAEAHGTRPDLTDQPLPDADHTWYTDGSSFLQEGQRKAGAAVTTETEVVWAKALPAGTSAQRAELIALTQALKMAEGKKLNVYTDSRYAFATAHIHGEIYRRRGWLTSEGKEIKNKDEILALLKALFLPKRLSIIHCPGHQKGNRAEARGNRMADQAAREVATRETPETSTLLAGKRTADGSEFEKRTADGSEFESPKKKAKVE

SEQ ID NO: 2450 - protein, 2092 aa, synthetic construct
MPAAKRVKLDGGDKKYSIGLDIGTNSVGWAVITDEYKVPSKKFKVLGNTDRHSIKKNLIGALLFDSGETAEATRLKRTARRRYTRRKNRICYLQEIFSNEMAKVDDSFFHRLEESFLVEEDKKHERHPIFGNIVDEVAYHEKYPTIYHLRKKLVDSTDKADLRLIYLALAHMIKFRGHFLIEGDLNPDNSDVDKLFIQLVQTYNQLFEENPINASGVDAKAILSARLSKSRRLENLIAQLPGEKKNGLFGNLIALSLGLTPNFKSNFDLAEDAKLQLSKDTYDDDLDNLLAQIGDQYADLFLAAKNLSDAILLSDILRVNTEITKAPLSASMIKRYDEHHQDLTLLKALVRQQLPEKYKEIFFDQSKNGYAGYIDGGASQEEFYKFIKPILEKMDGTEELLVKLNREDLLRKQRTFDNGSIPHQIHLGELHAILRRQEDFYPFLKDNREKIEKILTFRIPYYVGPLARGNSRFAWMTRKSEETITPWNFEEVVDKGASAQSFIERMTNFDKNLPNEKVLPKHSLLYEYFTVYNELTKVKYVTEGMRKPAFLSGEQKKAIVDLLFKTNRKVTVKQLKEDYFKKIECFDSVEISGVEDRFNASLGTYHDLLKIIKDKDFLDNEENEDILEDIVLTLTLFEDREMIEERLKTYAHLFDDKVMKQLKRRRYTGWGRLSRKLINGIRDKQSGKTILDFLKSDGFANRNFMQLIHDDSLTFKEDIQKAQVSGQGDSLHEHIANLAGSPAIKKGILQTVKVVDELVKVMGRHKPENIVIEMARENQTTQKGQKNSRERMKRIEEGIKELGSQILKEHPVENTQLQNEKLYLYYLQNGRDMYVDQELDINRLSDYDVDHIVPQSFLKDDSIDNKVLTRSDKARGKSDNVPSEEVVKKMKNYWRQLLNAKLITQRKFDNLTKAERGGLSELDKAGFIKRQLVETRQITKHVAQILDSRMNTKYDENDKLIREVKVITLKSKLVSDFRKDFQFYKVREINNYHHAHDAYLNAVVGTALIKKYPKLESEFVYGDYKVYDVRKMIAKSEQEIGKATAKYFFYSNIMNFFKTEITLANGEIRKRPLIETNGETGEIVWDKGRDFATVRKVLSMPQVNIVKKTEVQTGGFSKESILPKRNSDKLIARKKDWDPKKYGGFDSPTVAYSVLVVAKVEKGKSKKLKSVKELLGITIMERSSFEKNPIDFLEAKGYKEVKKDLIIKLPKYSLFELENGRKRMLASAGELQKGNELALPSKYVNFLYLASHYEKLKGSPEDNEQKQLFVEQHKHYLDEIIEQISEFSKRVILADANLDKVLSAYNKHRDKPIREQAENIIHLFTLTNLGAPAAFKYFDTTIDRKRYTSTKEVLDATLIHQSITGLYETRIDLSQLGGDGGGGGGGGGGGTLNIEDEYRLHETSKGPDVPLGSTWLSDFPQAWAETGGMGLAVRQAPLIIPLKATSTPVSIKQYPMSQEARLGIKPHIQRLLDQGILVPCQSPWNTPLLPVKKPGTNDYRPVQDLREVNKRVEDIHPTVPNPYNLLSGLPPSHQWYTVLDLKDAFFCLRLHPTSQSLFAFEWRDPEMGISGQLTWTRLPQGFKNSPTLFNEALHRDLADFRIQHPDLILLQYVDDLLLAATSELDCQQGTRALLQTLGDLGYRASAKKAQICQKQVKYLGYLLKEGQRWLTEARKETVMGQPTPKTPRQLREFLGTAGFCRLWIPGFAEMAAPLYPLTKPGTLFEWGPDQQKAYQEIKQALLTAPALGLPDLTKPFELFVDEKQGYAKGVLTQKLGPWRRPVAYLSKKLDPVAAGWPPCLRMVAAIAVLTKDAGKLTMGQPLVILAPHAVEALVKQPPDRWLSNARMTHYQALLLDTDRVQFGPIVALNPATLLPLPEEGLQHDCLDILAEAHGTRPDLTDQPLPDADHTWYTDGSSFLQEGQRKAGAAVTTETEVVWAKALPAGTSAQRAELIALTQALKMAEGKKLNVYTDSRYAFATAHIHGEIYRRRGWLTSEGKEIKNKDEILALLKALFLPKRLSIIHCPGHQKGNRAEARGNRMADQAAREVATRETPETSTLLAGKRTADGSEFEKRTADGSEFESPKKKAKVE

SEQ ID NO: 2451 - protein, 2093 aa, synthetic construct
MPAAKRVKLDGGDKKYSIGLDIGTNSVGWAVITDEYKVPSKKFKVLGNTDRHSIKKNLIGALLFDSGETAEATRLKRTARRRYTRRKNRICYLQEIFSNEMAKVDDSFFHRLEESFLVEEDKKHERHPIFGNIVDEVAYHEKYPTIYHLRKKLVDSTDKADLRLIYLALAHMIKFRGHFLIEGDLNPDNSDVDKLFIQLVQTYNQLFEENPINASGVDAKAILSARLSKSRRLENLIAQLPGEKKNGLFGNLIALSLGLTPNFKSNFDLAEDAKLQLSKDTYDDDLDNLLAQIGDQYADLFLAAKNLSDAILLSDILRVNTEITKAPLSASMIKRYDEHHQDLTLLKALVRQQLPEKYKEIFFDQSKNGYAGYIDGGASQEEFYKFIKPILEKMDGTEELLVKLNREDLLRKQRTFDNGSIPHQIHLGELHAILRRQEDFYPFLKDNREKIEKILTFRIPYYVGPLARGNSRFAWMTRKSEETITPWNFEEVVDKGASAQSFIERMTNFDKNLPNEKVLPKHSLLYEYFTVYNELTKVKYVTEGMRKPAFLSGEQKKAIVDLLFKTNRKVTVKQLKEDYFKKIECFDSVEISGVEDRFNASLGTYHDLLKIIKDKDFLDNEENEDILEDIVLTLTLFEDREMIEERLKTYAHLFDDKVMKQLKRRRYTGWGRLSRKLINGIRDKQSGKTILDFLKSDGFANRNFMQLIHDDSLTFKEDIQKAQVSGQGDSLHEHIANLAGSPAIKKGILQTVKVVDELVKVMGRHKPENIVIEMARENQTTQKGQKNSRERMKRIEEGIKELGSQILKEHPVENTQLQNEKLYLYYLQNGRDMYVDQELDINRLSDYDVDHIVPQSFLKDDSIDNKVLTRSDKARGKSDNVPSEEVVKKMKNYWRQLLNAKLITQRKFDNLTKAERGGLSELDKAGFIKRQLVETRQITKHVAQILDSRMNTKYDENDKLIREVKVITLKSKLVSDFRKDFQFYKVREINNYHHAHDAYLNAVVGTALIKKYPKLESEFVYGDYKVYDVRKMIAKSEQEIGKATAKYFFYSNIMNFFKTEITLANGEIRKRPLIETNGETGEIVWDKGRDFATVRKVLSMPQVNIVKKTEVQTGGFSKESILPKRNSDKLIARKKDWDPKKYGGFDSPTVAYSVLVVAKVEKGKSKKLKSVKELLGITIMERSSFEKNPIDFLEAKGYKEVKKDLIIKLPKYSLFELENGRKRMLASAGELQKGNELALPSKYVNFLYLASHYEKLKGSPEDNEQKQLFVEQHKHYLDEIIEQISEFSKRVILADANLDKVLSAYNKHRDKPIREQAENIIHLFTLTNLGAPAAFKYFDTTIDRKRYTSTKEVLDATLIHQSITGLYETRIDLSQLGGDGGEAAAKGSSGGTLNIEDEYRLHETSKGPDVPLGSTWLSDFPQAWAETGGMGLAVRQAPLIIPLKATSTPVSIKQYPMSQEARLGIKPHIQRLLDQGILVPCQSPWNTPLLPVKKPGTNDYRPVQDLREVNKRVEDIHPTVPNPYNLLSGLPPSHQWYTVLDLKDAFFCLRLHPTSQSLFAFEWRDPEMGISGQLTWTRLPQGFKNSPTLFNEALHRDLADFRIQHPDLILLQYVDDLLLAATSELDCQQGTRALLQTLGDLGYRASAKKAQICQKQVKYLGYLLKEGQRWLTEARKETVMGQPTPKTPRQLREFLGTAGFCRLWIPGFAEMAAPLYPLTKPGTLFEWGPDQQKAYQEIKQALLTAPALGLPDLTKPFELFVDEKQGYAKGVLTQKLGPWRRPVAYLSKKLDPVAAGWPPCLRMVAAIAVLTKDAGKLTMGQPLVILAPHAVEALVKQPPDRWLSNARMTHYQALLLDTDRVQFGPIVALNPATLLPLPEEGLQHDCLDILAEAHGTRPDLTDQPLPDADHTWYTDGSSFLQEGQRKAGAAVTTETEVVWAKALPAGTSAQRAELIALTQALKMAEGKKLNVYTDSRYAFATAHIHGEIYRRRGWLTSEGKEIKNKDEILALLKALFLPKRLSIIHCPGHQKGNRAEARGNRMADQAAREVATRETPETSTLLAGKRTADGSEFEKRTADGSEFESPKKKAKVE

SEQ ID NO: 2452 - protein, 2096 aa, synthetic construct
MPAAKRVKLDGGDKKYSIGLDIGTNSVGWAVITDEYKVPSKKFKVLGNTDRHSIKKNLIGALLFDSGETAEATRLKRTARRRYTRRKNRICYLQEIFSNEMAKVDDSFFHRLEESFLVEEDKKHERHPIFGNIVDEVAYHEKYPTIYHLRKKLVDSTDKADLRLIYLALAHMIKFRGHFLIEGDLNPDNSDVDKLFIQLVQTYNQLFEENPINASGVDAKAILSARLSKSRRLENLIAQLPGEKKNGLFGNLIALSLGLTPNFKSNFDLAEDAKLQLSKDTYDDDLDNLLAQIGDQYADLFLAAKNLSDAILLSDILRVNTEITKAPLSASMIKRYDEHHQDLTLLKALVRQQLPEKYKEIFFDQSKNGYAGYIDGGASQEEFYKFIKPILEKMDGTEELLVKLNREDLLRKQRTFDNGSIPHQIHLGELHAILRRQEDFYPFLKDNREKIEKILTFRIPYYVGPLARGNSRFAWMTRKSEETITPWNFEEVVDKGASAQSFIERMTNFDKNLPNEKVLPKHSLLYEYFTVYNELTKVKYVTEGMRKPAFLSGEQKKAIVDLLFKTNRKVTVKQLKEDYFKKIECFDSVEISGVEDRFNASLGTYHDLLKIIKDKDFLDNEENEDILEDIVLTLTLFEDREMIEERLKTYAHLFDDKVMKQLKRRRYTGWGRLSRKLINGIRDKQSGKTILDFLKSDGFANRNFMQLIHDDSLTFKEDIQKAQVSGQGDSLHEHIANLAGSPAIKKGILQTVKVVDELVKVMGRHKPENIVIEMARENQTTQKGQKNSRERMKRIEEGIKELGSQILKEHPVENTQLQNEKLYLYYLQNGRDMYVDQELDINRLSDYDVDHIVPQSFLKDDSIDNKVLTRSDKARGKSDNVPSEEVVKKMKNYWRQLLNAKLITQRKFDNLTKAERGGLSELDKAGFIKRQLVETRQITKHVAQILDSRMNTKYDENDKLIREVKVITLKSKLVSDFRKDFQFYKVREINNYHHAHDAYLNAVVGTALIKKYPKLESEFVYGDYKVYDVRKMIAKSEQEIGKATAKYFFYSNIMNFFKTEITLANGEIRKRPLIETNGETGEIVWDKGRDFATVRKVLSMPQVNIVKKTEVQTGGFSKESILPKRNSDKLIARKKDWDPKKYGGFDSPTVAYSVLVVAKVEKGKSKKLKSVKELLGITIMERSSFEKNPIDFLEAKGYKEVKKDLIIKLPKYSLFELENGRKRMLASAGELQKGNELALPSKYVNFLYLASHYEKLKGSPEDNEQKQLFVEQHKHYLDEIIEQISEFSKRVILADANLDKVLSAYNKHRDKPIREQAENIIHLFTLTNLGAPAAFKYFDTTIDRKRYTSTKEVLDATLIHQSITGLYETRIDLSQLGGDGGEAAAKGSSGGGGGTLNIEDEYRLHETSKGPDVPLGSTWLSDFPQAWAETGGMGLAVRQAPLIIPLKATSTPVSIKQYPMSQEARLGIKPHIQRLLDQGILVPCQSPWNTPLLPVKKPGTNDYRPVQDLREVNKRVEDIHPTVPNPYNLLSGLPPSHQWYTVLDLKDAFFCLRLHPTSQSLFAFEWRDPEMGISGQLTWTRLPQGFKNSPTLFNEALHRDLADFRIQHPDLILLQYVDDLLLAATSELDCQQGTRALLQTLGDLGYRASAKKAQICQKQVKYLGYLLKEGQRWLTEARKETVMGQPTPKTPRQLREFLGTAGFCRLWIPGFAEMAAPLYPLTKPGTLFEWGPDQQKAYQEIKQALLTAPALGLPDLTKPFELFVDEKQGYAKGVLTQKLGPWRRPVAYLSKKLDPVAAGWPPCLRMVAAIAVLTKDAGKLTMGQPLVILAPHAVEALVKQPPDRWLSNARMTHYQALLLDTDRVQFGPIVALNPATLLPLPEEGLQHDCLDILAEAHGTRPDLTDQPLPDADHTWYTDGSSFLQEGQRKAGAAVTTETEVVWAKALPAGTSAQRAELIALTQALKMAEGKKLNVYTDSRYAFATAHIHGEIYRRRGWLTSEGKEIKNKDEILALLKALFLPKRLSIIHCPGHQKGNRAEARGNRMADQAAREVATRETPETSTLLAGKRTADGSEFEKRTADGSEFESPKKKAKVE

SEQ ID NO: 2453 - protein, 2096 aa, synthetic construct
MPAAKRVKLDGGDKKYSIGLDIGTNSVGWAVITDEYKVPSKKFKVLGNTDRHSIKKNLIGALLFDSGETAEATRLKRTARRRYTRRKNRICYLQEIFSNEMAKVDDSFFHRLEESFLVEEDKKHERHPIFGNIVDEVAYHEKYPTIYHLRKKLVDSTDKADLRLIYLALAHMIKFRGHFLIEGDLNPDNSDVDKLFIQLVQTYNQLFEENPINASGVDAKAILSARLSKSRRLENLIAQLPGEKKNGLFGNLIALSLGLTPNFKSNFDLAEDAKLQLSKDTYDDDLDNLLAQIGDQYADLFLAAKNLSDAILLSDILRVNTEITKAPLSASMIKRYDEHHQDLTLLKALVRQQLPEKYKEIFFDQSKNGYAGYIDGGASQEEFYKFIKPILEKMDGTEELLVKLNREDLLRKQRTFDNGSIPHQIHLGELHAILRRQEDFYPFLKDNREKIEKILTFRIPYYVGPLARGNSRFAWMTRKSEETITPWNFEEVVDKGASAQSFIERMTNFDKNLPNEKVLPKHSLLYEYFTVYNELTKVKYVTEGMRKPAFLSGEQKKAIVDLLFKTNRKVTVKQLKEDYFKKIECFDSVEISGVEDRFNASLGTYHDLLKIIKDKDFLDNEENEDILEDIVLTLTLFEDREMIEERLKTYAHLFDDKVMKQLKRRRYTGWGRLSRKLINGIRDKQSGKTILDFLKSDGFANRNFMQLIHDDSLTFKEDIQKAQVSGQGDSLHEHIANLAGSPAIKKGILQTVKVVDELVKVMGRHKPENIVIEMARENQTTQKGQKNSRERMKRIEEGIKELGSQILKEHPVENTQLQNEKLYLYYLQNGRDMYVDQELDINRLSDYDVDHIVPQSFLKDDSIDNKVLTRSDKARGKSDNVPSEEVVKKMKNYWRQLLNAKLITQRKFDNLTKAERGGLSELDKAGFIKRQLVETRQITKHVAQILDSRMNTKYDENDKLIREVKVITLKSKLVSDFRKDFQFYKVREINNYHHAHDAYLNAVVGTALIKKYPKLESEFVYGDYKVYDVRKMIAKSEQEIGKATAKYFFYSNIMNFFKTEITLANGEIRKRPLIETNGETGEIVWDKGRDFATVRKVLSMPQVNIVKKTEVQTGGFSKESILPKRNSDKLIARKKDWDPKKYGGFDSPTVAYSVLVVAKVEKGKSKKLKSVKELLGITIMERSSFEKNPIDFLEAKGYKEVKKDLIIKLPKYSLFELENGRKRMLASAGELQKGNELALPSKYVNFLYLASHYEKLKGSPEDNEQKQLFVEQHKHYLDEIIEQISEFSKRVILADANLDKVLSAYNKHRDKPIREQAENIIHLFTLTNLGAPAAFKYFDTTIDRKRYTSTKEVLDATLIHQSITGLYETRIDLSQLGGDGGPAPGSSEAAAKGGTLNIEDEYRLHETSKGPDVPLGSTWLSDFPQAWAETGGMGLAVRQAPLIIPLKATSTPVSIKQYPMSQEARLGIKPHIQRLLDQGILVPCQSPWNTPLLPVKKPGTNDYRPVQDLREVNKRVEDIHPTVPNPYNLLSGLPPSHQWYTVLDLKDAFFCLRLHPTSQSLFAFEWRDPEMGISGQLTWTRLPQGFKNSPTLFNEALHRDLADFRIQHPDLILLQYVDDLLLAATSELDCQQGTRALLQTLGDLGYRASAKKAQICQKQVKYLGYLLKEGQRWLTEARKETVMGQPTPKTPRQLREFLGTAGFCRLWIPGFAEMAAPLYPLTKPGTLFEWGPDQQKAYQEIKQALLTAPALGLPDLTKPFELFVDEKQGYAKGVLTQKLGPWRRPVAYLSKKLDPVAAGWPPCLRMVAAIAVLTKDAGKLTMGQPLVILAPHAVEALVKQPPDRWLSNARMTHYQALLLDTDRVQFGPIVALNPATLLPLPEEGLQHDCLDILAEAHGTRPDLTDQPLPDADHTWYTDGSSFLQEGQRKAGAAVTTETEVVWAKALPAGTSAQRAELIALTQALKMAEGKKLNVYTDSRYAFATAHIHGEIYRRRGWLTSEGKEIKNKDEILALLKALFLPKRLSIIHCPGHQKGNRAEARGNRMADQAAREVATRETPETSTLLAGKRTADGSEFEKRTADGSEFESPKKKAKVE

SEQ ID NO: 2454 - protein, 2110 aa, synthetic construct
MPAAKRVKLDGGDKKYSIGLDIGTNSVGWAVITDEYKVPSKKFKVLGNTDRHSIKKNLIGALLFDSGETAEATRLKRTARRRYTRRKNRICYLQEIFSNEMAKVDDSFFHRLEESFLVEEDKKHERHPIFGNIVDEVAYHEKYPTIYHLRKKLVDSTDKADLRLIYLALAHMIKFRGHFLIEGDLNPDNSDVDKLFIQLVQTYNQLFEENPINASGVDAKAILSARLSKSRRLENLIAQLPGEKKNGLFGNLIALSLGLTPNFKSNFDLAEDAKLQLSKDTYDDDLDNLLAQIGDQYADLFLAAKNLSDAILLSDILRVNTEITKAPLSASMIKRYDEHHQDLTLLKALVRQQLPEKYKEIFFDQSKNGYAGYIDGGASQEEFYKFIKPILEKMDGTEELLVKLNREDLLRKQRTFDNGSIPHQIHLGELHAILRRQEDFYPFLKDNREKIEKILTFRIPYYVGPLARGNSRFAWMTRKSEETITPWNFEEVVDKGASAQSFIERMTNFDKNLPNEKVLPKHSLLYEYFTVYNELTKVKYVTEGMRKPAFLSGEQKKAIVDLLFKTNRKVTVKQLKEDYFKKIECFDSVEISGVEDRFNASLGTYHDLLKIIKDKDFLDNEENEDILEDIVLTLTLFEDREMIEERLKTYAHLFDDKVMKQLKRRRYTGWGRLSRKLINGIRDKQSGKTILDFLKSDGFANRNFMQLIHDDSLTFKEDIQKAQVSGQGDSLHEHIANLAGSPAIKKGILQTVKVVDELVKVMGRHKPENIVIEMARENQTTQKGQKNSRERMKRIEEGIKELGSQILKEHPVENTQLQNEKLYLYYLQNGRDMYVDQELDINRLSDYDVDHIVPQSFLKDDSIDNKVLTRSDKARGKSDNVPSEEVVKKMKNYWRQLLNAKLITQRKFDNLTKAERGGLSELDKAGFIKRQLVETRQITKHVAQILDSRMNTKYDENDKLIREVKVITLKSKLVSDFRKDFQFYKVREINNYHHAHDAYLNAVVGTALIKKYPKLESEFVYGDYKVYDVRKMIAKSEQEIGKATAKYFFYSNIMNFFKTEITLANGEIRKRPLIETNGETGEIVWDKGRDFATVRKVLSMPQVNIVKKTEVQTGGFSKESILPKRNSDKLIARKKDWDPKKYGGFDSPTVAYSVLVVAKVEKGKSKKLKSVKELLGITIMERSSFEKNPIDFLEAKGYKEVKKDLIIKLPKYSLFELENGRKRMLASAGELQKGNELALPSKYVNFLYLASHYEKLKGSPEDNEQKQLFVEQHKHYLDEIIEQISEFSKRVILADANLDKVLSAYNKHRDKPIREQAENIIHLFTLTNLGAPAAFKYFDTTIDRKRYTSTKEVLDATLIHQSITGLYETRIDLSQLGGDGGEAAAKEAAAKEAAAKEAAAKEAAAKGGTLNIEDEYRLHETSKGPDVPLGSTWLSDFPQAWAETGGMGLAVRQAPLIIPLKATSTPVSIKQYPMSQEARLGIKPHIQRLLDQGILVPCQSPWNTPLLPVKKPGTNDYRPVQDLREVNKRVEDIHPTVPNPYNLLSGLPPSHQWYTVLDLKDAFFCLRLHPTSQSLFAFEWRDPEMGISGQLTWTRLPQGFKNSPTLFNEALHRDLADFRIQHPDLILLQYVDDLLLAATSELDCQQGTRALLQTLGDLGYRASAKKAQICQKQVKYLGYLLKEGQRWLTEARKETVMGQPTPKTPRQLREFLGTAGFCRLWIPGFAEMAAPLYPLTKPGTLFEWGPDQQKAYQEIKQALLTAPALGLPDLTKPFELFVDEKQGYAKGVLTQKLGPWRRPVAYLSKKLDPVAAGWPPCLRMVAAIAVLTKDAGKLTMGQPLVILAPHAVEALVKQPPDRWLSNARMTHYQALLLDTDRVQFGPIVALNPATLLPLPEEGLQHDCLDILAEAHGTRPDLTDQPLPDADHTWYTDGSSFLQEGQRKAGAAVTTETEVVWAKALPAGTSAQRAELIALTQALKMAEGKKLNVYTDSRYAFATAHIHGEIYRRRGWLTSEGKEIKNKDEILALLKALFLPKRLSIIHCPGHQKGNRAEARGNRMADQAAREVATRETPETSTLLAGKRTADGSEFEKRTADGSEFESPKKKAKVE

SEQ ID NO: 2455 - protein, 2115 aa, synthetic construct
MPAAKRVKLDGGDKKYSIGLDIGTNSVGWAVITDEYKVPSKKFKVLGNTDRHSIKKNLIGALLFDSGETAEATRLKRTARRRYTRRKNRICYLQEIFSNEMAKVDDSFFHRLEESFLVEEDKKHERHPIFGNIVDEVAYHEKYPTIYHLRKKLVDSTDKADLRLIYLALAHMIKFRGHFLIEGDLNPDNSDVDKLFIQLVQTYNQLFEENPINASGVDAKAILSARLSKSRRLENLIAQLPGEKKNGLFGNLIALSLGLTPNFKSNFDLAEDAKLQLSKDTYDDDLDNLLAQIGDQYADLFLAAKNLSDAILLSDILRVNTEITKAPLSASMIKRYDEHHQDLTLLKALVRQQLPEKYKEIFFDQSKNGYAGYIDGGASQEEFYKFIKPILEKMDGTEELLVKLNREDLLRKQRTFDNGSIPHQIHLGELHAILRRQEDFYPFLKDNREKIEKILTFRIPYYVGPLARGNSRFAWMTRKSEETITPWNFEEVVDKGASAQSFIERMTNFDKNLPNEKVLPKHSLLYEYFTVYNELTKVKYVTEGMRKPAFLSGEQKKAIVDLLFKTNRKVTVKQLKEDYFKKIECFDSVEISGVEDRFNASLGTYHDLLKIIKDKDFLDNEENEDILEDIVLTLTLFEDREMIEERLKTYAHLFDDKVMKQLKRRRYTGWGRLSRKLINGIRDKQSGKTILDFLKSDGFANRNFMQLIHDDSLTFKEDIQKAQVSGQGDSLHEHIANLAGSPAIKKGILQTVKVVDELVKVMGRHKPENIVIEMARENQTTQKGQKNSRERMKRIEEGIKELGSQILKEHPVENTQLQNEKLYLYYLQNGRDMYVDQELDINRLSDYDVDHIVPQSFLKDDSIDNKVLTRSDKARGKSDNVPSEEVVKKMKNYWRQLLNAKLITQRKFDNLTKAERGGLSELDKAGFIKRQLVETRQITKHVAQILDSRMNTKYDENDKLIREVKVITLKSKLVSDFRKDFQFYKVREINNYHHAHDAYLNAVVGTALIKKYPKLESEFVYGDYKVYDVRKMIAKSEQEIGKATAKYFFYSNIMNFFKTEITLANGEIRKRPLIETNGETGEIVWDKGRDFATVRKVLSMPQVNIVKKTEVQTGGFSKESILPKRNSDKLIARKKDWDPKKYGGFDSPTVAYSVLVVAKVEKGKSKKLKSVKELLGITIMERSSFEKNPIDFLEAKGYKEVKKDLIIKLPKYSLFELENGRKRMLASAGELQKGNELALPSKYVNFLYLASHYEKLKGSPEDNEQKQLFVEQHKHYLDEIIEQISEFSKRVILADANLDKVLSAYNKHRDKPIREQAENIIHLFTLTNLGAPAAFKYFDTTIDRKRYTSTKEVLDATLIHQSITGLYETRIDLSQLGGDGGEAAAKEAAAKEAAAKEAAAKEAAAKEAAAKGGTLNIEDEYRLHETSKGPDVPLGSTWLSDFPQAWAETGGMGLAVRQAPLIIPLKATSTPVSIKQYPMSQEARLGIKPHIQRLLDQGILVPCQSPWNTPLLPVKKPGTNDYRPVQDLREVNKRVEDIHPTVPNPYNLLSGLPPSHQWYTVLDLKDAFFCLRLHPTSQSLFAFEWRDPEMGISGQLTWTRLPQGFKNSPTLFNEALHRDLADFRIQHPDLILLQYVDDLLLAATSELDCQQGTRALLQTLGDLGYRASAKKAQICQKQVKYLGYLLKEGQRWLTEARKETVMGQPTPKTPRQLREFLGTAGFCRLWIPGFAEMAAPLYPLTKPGTLFEWGPDQQKAYQEIKQALLTAPALGLPDLTKPFELFVDEKQGYAKGVLTQKLGPWRRPVAYLSKKLDPVAAGWPPCLRMVAAIAVLTKDAGKLTMGQPLVILAPHAVEALVKQPPDRWLSNARMTHYQALLLDTDRVQFGPIVALNPATLLPLPEEGLQHDCLDILAEAHGTRPDLTDQPLPDADHTWYTDGSSFLQEGQRKAGAAVTTETEVVWAKALPAGTSAQRAELIALTQALKMAEGKKLNVYTDSRYAFATAHIHGEIYRRRGWLTSEGKEIKNKDEILALLKALFLPKRLSIIHCPGHQKGNRAEARGNRMADQAAREVATRETPETSTLLAGKRTADGSEFEKRTADGSEFESPKKKAKVE

SEQ ID NO: 2456 - protein, 2093 aa, synthetic construct
MPAAKRVKLDGGDKKYSIGLDIGTNSVGWAVITDEYKVPSKKFKVLGNTDRHSIKKNLIGALLFDSGETAEATRLKRTARRRYTRRKNRICYLQEIFSNEMAKVDDSFFHRLEESFLVEEDKKHERHPIFGNIVDEVAYHEKYPTIYHLRKKLVDSTDKADLRLIYLALAHMIKFRGHFLIEGDLNPDNSDVDKLFIQLVQTYNQLFEENPINASGVDAKAILSARLSKSRRLENLIAQLPGEKKNGLFGNLIALSLGLTPNFKSNFDLAEDAKLQLSKDTYDDDLDNLLAQIGDQYADLFLAAKNLSDAILLSDILRVNTEITKAPLSASMIKRYDEHHQDLTLLKALVRQQLPEKYKEIFFDQSKNGYAGYIDGGASQEEFYKFIKPILEKMDGTEELLVKLNREDLLRKQRTFDNGSIPHQIHLGELHAILRRQEDFYPFLKDNREKIEKILTFRIPYYVGPLARGNSRFAWMTRKSEETITPWNFEEVVDKGASAQSFIERMTNFDKNLPNEKVLPKHSLLYEYFTVYNELTKVKYVTEGMRKPAFLSGEQKKAIVDLLFKTNRKVTVKQLKEDYFKKIECFDSVEISGVEDRFNASLGTYHDLLKIIKDKDFLDNEENEDILEDIVLTLTLFEDREMIEERLKTYAHLFDDKVMKQLKRRRYTGWGRLSRKLINGIRDKQSGKTILDFLKSDGFANRNFMQLIHDDSLTFKEDIQKAQVSGQGDSLHEHIANLAGSPAIKKGILQTVKVVDELVKVMGRHKPENIVIEMARENQTTQKGQKNSRERMKRIEEGIKELGSQILKEHPVENTQLQNEKLYLYYLQNGRDMYVDQELDINRLSDYDVDHIVPQSFLKDDSIDNKVLTRSDKARGKSDNVPSEEVVKKMKNYWRQLLNAKLITQRKFDNLTKAERGGLSELDKAGFIKRQLVETRQITKHVAQILDSRMNTKYDENDKLIREVKVITLKSKLVSDFRKDFQFYKVREINNYHHAHDAYLNAVVGTALIKKYPKLESEFVYGDYKVYDVRKMIAKSEQEIGKATAKYFFYSNIMNFFKTEITLANGEIRKRPLIETNGETGEIVWDKGRDFATVRKVLSMPQVNIVKKTEVQTGGFSKESILPKRNSDKLIARKKDWDPKKYGGFDSPTVAYSVLVVAKVEKGKSKKLKSVKELLGITIMERSSFEKNPIDFLEAKGYKEVKKDLIIKLPKYSLFELENGRKRMLASAGELQKGNELALPSKYVNFLYLASHYEKLKGSPEDNEQKQLFVEQHKHYLDEIIEQISEFSKRVILADANLDKVLSAYNKHRDKPIREQAENIIHLFTLTNLGAPAAFKYFDTTIDRKRYTSTKEVLDATLIHQSITGLYETRIDLSQLGGDGGEAAAKGGSGGTLNIEDEYRLHETSKGPDVPLGSTWLSDFPQAWAETGGMGLAVRQAPLIIPLKATSTPVSIKQYPMSQEARLGIKPHIQRLLDQGILVPCQSPWNTPLLPVKKPGTNDYRPVQDLREVNKRVEDIHPTVPNPYNLLSGLPPSHQWYTVLDLKDAFFCLRLHPTSQSLFAFEWRDPEMGISGQLTWTRLPQGFKNSPTLFNEALHRDLADFRIQHPDLILLQYVDDLLLAATSELDCQQGTRALLQTLGDLGYRASAKKAQICQKQVKYLGYLLKEGQRWLTEARKETVMGQPTPKTPRQLREFLGTAGFCRLWIPGFAEMAAPLYPLTKPGTLFEWGPDQQKAYQEIKQALLTAPALGLPDLTKPFELFVDEKQGYAKGVLTQKLGPWRRPVAYLSKKLDPVAAGWPPCLRMVAAIAVLTKDAGKLTMGQPLVILAPHAVEALVKQPPDRWLSNARMTHYQALLLDTDRVQFGPIVALNPATLLPLPEEGLQHDCLDILAEAHGTRPDLTDQPLPDADHTWYTDGSSFLQEGQRKAGAAVTTETEVVWAKALPAGTSAQRAELIALTQALKMAEGKKLNVYTDSRYAFATAHIHGEIYRRRGWLTSEGKEIKNKDEILALLKALFLPKRLSIIHCPGHQKGNRAEARGNRMADQAAREVATRETPETSTLLAGKRTADGSEFEKRTADGSEFESPKKKAKVE

SEQ ID NO: 2457 - protein, 2096 aa, synthetic construct
MPAAKRVKLDGGDKKYSIGLDIGTNSVGWAVITDEYKVPSKKFKVLGNTDRHSIKKNLIGALLFDSGETAEATRLKRTARRRYTRRKNRICYLQEIFSNEMAKVDDSFFHRLEESFLVEEDKKHERHPIFGNIVDEVAYHEKYPTIYHLRKKLVDSTDKADLRLIYLALAHMIKFRGHFLIEGDLNPDNSDVDKLFIQLVQTYNQLFEENPINASGVDAKAILSARLSKSRRLENLIAQLPGEKKNGLFGNLIALSLGLTPNFKSNFDLAEDAKLQLSKDTYDDDLDNLLAQIGDQYADLFLAAKNLSDAILLSDILRVNTEITKAPLSASMIKRYDEHHQDLTLLKALVRQQLPEKYKEIFFDQSKNGYAGYIDGGASQEEFYKFIKPILEKMDGTEELLVKLNREDLLRKQRTFDNGSIPHQIHLGELHAILRRQEDFYPFLKDNREKIEKILTFRIPYYVGPLARGNSRFAWMTRKSEETITPWNFEEVVDKGASAQSFIERMTNFDKNLPNEKVLPKHSLLYEYFTVYNELTKVKYVTEGMRKPAFLSGEQKKAIVDLLFKTNRKVTVKQLKEDYFKKIECFDSVEISGVEDRFNASLGTYHDLLKIIKDKDFLDNEENEDILEDIVLTLTLFEDREMIEERLKTYAHLFDDKVMKQLKRRRYTGWGRLSRKLINGIRDKQSGKTILDFLKSDGFANRNFMQLIHDDSLTFKEDIQKAQVSGQGDSLHEHIANLAGSPAIKKGILQTVKVVDELVKVMGRHKPENIVIEMARENQTTQKGQKNSRERMKRIEEGIKELGSQILKEHPVENTQLQNEKLYLYYLQNGRDMYVDQELDINRLSDYDVDHIVPQSFLKDDSIDNKVLTRSDKARGKSDNVPSEEVVKKMKNYWRQLLNAKLITQRKFDNLTKAERGGLSELDKAGFIKRQLVETRQITKHVAQILDSRMNTKYDENDKLIREVKVITLKSKLVSDFRKDFQFYKVREINNYHHAHDAYLNAVVGTALIKKYPKLESEFVYGDYKVYDVRKMIAKSEQEIGKATAKYFFYSNIMNFFKTEITLANGEIRKRPLIETNGETGEIVWDKGRDFATVRKVLSMPQVNIVKKTEVQTGGFSKESILPKRNSDKLIARKKDWDPKKYGGFDSPTVAYSVLVVAKVEKGKSKKLKSVKELLGITIMERSSFEKNPIDFLEAKGYKEVKKDLIIKLPKYSLFELENGRKRMLASAGELQKGNELALPSKYVNFLYLASHYEKLKGSPEDNEQKQLFVEQHKHYLDEIIEQISEFSKRVILADANLDKVLSAYNKHRDKPIREQAENIIHLFTLTNLGAPAAFKYFDTTIDRKRYTSTKEVLDATLIHQSITGLYETRIDLSQLGGDGGEAAAKGGGPAPGGTLNIEDEYRLHETSKGPDVPLGSTWLSDFPQAWAETGGMGLAVRQAPLIIPLKATSTPVSIKQYPMSQEARLGIKPHIQRLLDQGILVPCQSPWNTPLLPVKKPGTNDYRPVQDLREVNKRVEDIHPTVPNPYNLLSGLPPSHQWYTVLDLKDAFFCLRLHPTSQSLFAFEWRDPEMGISGQLTWTRLPQGFKNSPTLFNEALHRDLADFRIQHPDLILLQYVDDLLLAATSELDCQQGTRALLQTLGDLGYRASAKKAQICQKQVKYLGYLLKEGQRWLTEARKETVMGQPTPKTPRQLREFLGTAGFCRLWIPGFAEMAAPLYPLTKPGTLFEWGPDQQKAYQEIKQALLTAPALGLPDLTKPFELFVDEKQGYAKGVLTQKLGPWRRPVAYLSKKLDPVAAGWPPCLRMVAAIAVLTKDAGKLTMGQPLVILAPHAVEALVKQPPDRWLSNARMTHYQALLLDTDRVQFGPIVALNPATLLPLPEEGLQHDCLDILAEAHGTRPDLTDQPLPDADHTWYTDGSSFLQEGQRKAGAAVTTETEVVWAKALPAGTSAQRAELIALTQALKMAEGKKLNVYTDSRYAFATAHIHGEIYRRRGWLTSEGKEIKNKDEILALLKALFLPKRLSIIHCPGHQKGNRAEARGNRMADQAAREVATRETPETSTLLAGKRTADGSEFEKRTADGSEFESPKKKAKVE

SEQ ID NO: 2458 - protein, 2096 aa, synthetic construct
MPAAKRVKLDGGDKKYSIGLDIGTNSVGWAVITDEYKVPSKKFKVLGNTDRHSIKKNLIGALLFDSGETAEATRLKRTARRRYTRRKNRICYLQEIFSNEMAKVDDSFFHRLEESFLVEEDKKHERHPIFGNIVDEVAYHEKYPTIYHLRKKLVDSTDKADLRLIYLALAHMIKFRGHFLIEGDLNPDNSDVDKLFIQLVQTYNQLFEENPINASGVDAKAILSARLSKSRRLENLIAQLPGEKKNGLFGNLIALSLGLTPNFKSNFDLAEDAKLQLSKDTYDDDLDNLLAQIGDQYADLFLAAKNLSDAILLSDILRVNTEITKAPLSASMIKRYDEHHQDLTLLKALVRQQLPEKYKEIFFDQSKNGYAGYIDGGASQEEFYKFIKPILEKMDGTEELLVKLNREDLLRKQRTFDNGSIPHQIHLGELHAILRRQEDFYPFLKDNREKIEKILTFRIPYYVGPLARGNSRFAWMTRKSEETITPWNFEEVVDKGASAQSFIERMTNFDKNLPNEKVLPKHSLLYEYFTVYNELTKVKYVTEGMRKPAFLSGEQKKAIVDLLFKTNRKVTVKQLKEDYFKKIECFDSVEISGVEDRFNASLGTYHDLLKIIKDKDFLDNEENEDILEDIVLTLTLFEDREMIEERLKTYAHLFDDKVMKQLKRRRYTGWGRLSRKLINGIRDKQSGKTILDFLKSDGFANRNFMQLIHDDSLTFKEDIQKAQVSGQGDSLHEHIANLAGSPAIKKGILQTVKVVDELVKVMGRHKPENIVIEMARENQTTQKGQKNSRERMKRIEEGIKELGSQILKEHPVENTQLQNEKLYLYYLQNGRDMYVDQELDINRLSDYDVDHIVPQSFLKDDSIDNKVLTRSDKARGKSDNVPSEEVVKKMKNYWRQLLNAKLITQRKFDNLTKAERGGLSELDKAGFIKRQLVETRQITKHVAQILDSRMNTKYDENDKLIREVKVITLKSKLVSDFRKDFQFYKVREINNYHHAHDAYLNAVVGTALIKKYPKLESEFVYGDYKVYDVRKMIAKSEQEIGKATAKYFFYSNIMNFFKTEITLANGEIRKRPLIETNGETGEIVWDKGRDFATVRKVLSMPQVNIVKKTEVQTGGFSKESILPKRNSDKLIARKKDWDPKKYGGFDSPTVAYSVLVVAKVEKGKSKKLKSVKELLGITIMERSSFEKNPIDFLEAKGYKEVKKDLIIKLPKYSLFELENGRKRMLASAGELQKGNELALPSKYVNFLYLASHYEKLKGSPEDNEQKQLFVEQHKHYLDEIIEQISEFSKRVILADANLDKVLSAYNKHRDKPIREQAENIIHLFTLTNLGAPAAFKYFDTTIDRKRYTSTKEVLDATLIHQSITGLYETRIDLSQLGGDGGGSSEAAAKGGGGGTLNIEDEYRLHETSKGPDVPLGSTWLSDFPQAWAETGGMGLAVRQAPLIIPLKATSTPVSIKQYPMSQEARLGIKPHIQRLLDQGILVPCQSPWNTPLLPVKKPGTNDYRPVQDLREVNKRVEDIHPTVPNPYNLLSGLPPSHQWYTVLDLKDAFFCLRLHPTSQSLFAFEWRDPEMGISGQLTWTRLPQGFKNSPTLFNEALHRDLADFRIQHPDLILLQYVDDLLLAATSELDCQQGTRALLQTLGDLGYRASAKKAQICQKQVKYLGYLLKEGQRWLTEARKETVMGQPTPKTPRQLREFLGTAGFCRLWIPGFAEMAAPLYPLTKPGTLFEWGPDQQKAYQEIKQALLTAPALGLPDLTKPFELFVDEKQGYAKGVLTQKLGPWRRPVAYLSKKLDPVAAGWPPCLRMVAAIAVLTKDAGKLTMGQPLVILAPHAVEALVKQPPDRWLSNARMTHYQALLLDTDRVQFGPIVALNPATLLPLPEEGLQHDCLDILAEAHGTRPDLTDQPLPDADHTWYTDGSSFLQEGQRKAGAAVTTETEVVWAKALPAGTSAQRAELIALTQALKMAEGKKLNVYTDSRYAFATAHIHGEIYRRRGWLTSEGKEIKNKDEILALLKALFLPKRLSIIHCPGHQKGNRAEARGNRMADQAAREVATRETPETSTLLAGKRTADGSEFEKRTADGSEFESPKKKAKVE

SEQ ID NO: 2459 - protein, 2096 aa, synthetic construct
MPAAKRVKLDGGDKKYSIGLDIGTNSVGWAVITDEYKVPSKKFKVLGNTDRHSIKKNLIGALLFDSGETAEATRLKRTARRRYTRRKNRICYLQEIFSNEMAKVDDSFFHRLEESFLVEEDKKHERHPIFGNIVDEVAYHEKYPTIYHLRKKLVDSTDKADLRLIYLALAHMIKFRGHFLIEGDLNPDNSDVDKLFIQLVQTYNQLFEENPINASGVDAKAILSARLSKSRRLENLIAQLPGEKKNGLFGNLIALSLGLTPNFKSNFDLAEDAKLQLSKDTYDDDLDNLLAQIGDQYADLFLAAKNLSDAILLSDILRVNTEITKAPLSASMIKRYDEHHQDLTLLKALVRQQLPEKYKEIFFDQSKNGYAGYIDGGASQEEFYKFIKPILEKMDGTEELLVKLNREDLLRKQRTFDNGSIPHQIHLGELHAILRRQEDFYPFLKDNREKIEKILTFRIPYYVGPLARGNSRFAWMTRKSEETITPWNFEEVVDKGASAQSFIERMTNFDKNLPNEKVLPKHSLLYEYFTVYNELTKVKYVTEGMRKPAFLSGEQKKAIVDLLFKTNRKVTVKQLKEDYFKKIECFDSVEISGVEDRFNASLGTYHDLLKIIKDKDFLDNEENEDILEDIVLTLTLFEDREMIEERLKTYAHLFDDKVMKQLKRRRYTGWGRLSRKLINGIRDKQSGKTILDFLKSDGFANRNFMQLIHDDSLTFKEDIQKAQVSGQGDSLHEHIANLAGSPAIKKGILQTVKVVDELVKVMGRHKPENIVIEMARENQTTQKGQKNSRERMKRIEEGIKELGSQILKEHPVENTQLQNEKLYLYYLQNGRDMYVDQELDINRLSDYDVDHIVPQSFLKDDSIDNKVLTRSDKARGKSDNVPSEEVVKKMKNYWRQLLNAKLITQRKFDNLTKAERGGLSELDKAGFIKRQLVETRQITKHVAQILDSRMNTKYDENDKLIREVKVITLKSKLVSDFRKDFQFYKVREINNYHHAHDAYLNAVVGTALIKKYPKLESEFVYGDYKVYDVRKMIAKSEQEIGKATAKYFFYSNIMNFFKTEITLANGEIRKRPLIETNGETGEIVWDKGRDFATVRKVLSMPQVNIVKKTEVQTGGFSKESILPKRNSDKLIARKKDWDPKKYGGFDSPTVAYSVLVVAKVEKGKSKKLKSVKELLGITIMERSSFEKNPIDFLEAKGYKEVKKDLIIKLPKYSLFELENGRKRMLASAGELQKGNELALPSKYVNFLYLASHYEKLKGSPEDNEQKQLFVEQHKHYLDEIIEQISEFSKRVILADANLDKVLSAYNKHRDKPIREQAENIIHLFTLTNLGAPAAFKYFDTTIDRKRYTSTKEVLDATLIHQSITGLYETRIDLSQLGGDGGGGSGGGEAAAKGGTLNIEDEYRLHETSKGPDVPLGSTWLSDFPQAWAETGGMGLAVRQAPLIIPLKATSTPVSIKQYPMSQEARLGIKPHIQRLLDQGILVPCQSPWNTPLLPVKKPGTNDYRPVQDLREVNKRVEDIHPTVPNPYNLLSGLPPSHQWYTVLDLKDAFFCLRLHPTSQSLFAFEWRDPEMGISGQLTWTRLPQGFKNSPTLFNEALHRDLADFRIQHPDLILLQYVDDLLLAATSELDCQQGTRALLQTLGDLGYRASAKKAQICQKQVKYLGYLLKEGQRWLTEARKETVMGQPTPKTPRQLREFLGTAGFCRLWIPGFAEMAAPLYPLTKPGTLFEWGPDQQKAYQEIKQALLTAPALGLPDLTKPFELFVDEKQGYAKGVLTQKLGPWRRPVAYLSKKLDPVAAGWPPCLRMVAAIAVLTKDAGKLTMGQPLVILAPHAVEALVKQPPDRWLSNARMTHYQALLLDTDRVQFGPIVALNPATLLPLPEEGLQHDCLDILAEAHGTRPDLTDQPLPDADHTWYTDGSSFLQEGQRKAGAAVTTETEVVWAKALPAGTSAQRAELIALTQALKMAEGKKLNVYTDSRYAFATAHIHGEIYRRRGWLTSEGKEIKNKDEILALLKALFLPKRLSIIHCPGHQKGNRAEARGNRMADQAAREVATRETPETSTLLAGKRTADGSEFEKRTADGSEFESPKKKAKVE

SEQ ID NO: 2460 - protein, 2096 aa, synthetic construct
MPAAKRVKLDGGDKKYSIGLDIGTNSVGWAVITDEYKVPSKKFKVLGNTDRHSIKKNLIGALLFDSGETAEATRLKRTARRRYTRRKNRICYLQEIFSNEMAKVDDSFFHRLEESFLVEEDKKHERHPIFGNIVDEVAYHEKYPTIYHLRKKLVDSTDKADLRLIYLALAHMIKFRGHFLIEGDLNPDNSDVDKLFIQLVQTYNQLFEENPINASGVDAKAILSARLSKSRRLENLIAQLPGEKKNGLFGNLIALSLGLTPNFKSNFDLAEDAKLQLSKDTYDDDLDNLLAQIGDQYADLFLAAKNLSDAILLSDILRVNTEITKAPLSASMIKRYDEHHQDLTLLKALVRQQLPEKYKEIFFDQSKNGYAGYIDGGASQEEFYKFIKPILEKMDGTEELLVKLNREDLLRKQRTFDNGSIPHQIHLGELHAILRRQEDFYPFLKDNREKIEKILTFRIPYYVGPLARGNSRFAWMTRKSEETITPWNFEEVVDKGASAQSFIERMTNFDKNLPNEKVLPKHSLLYEYFTVYNELTKVKYVTEGMRKPAFLSGEQKKAIVDLLFKTNRKVTVKQLKEDYFKKIECFDSVEISGVEDRFNASLGTYHDLLKIIKDKDFLDNEENEDILEDIVLTLTLFEDREMIEERLKTYAHLFDDKVMKQLKRRRYTGWGRLSRKLINGIRDKQSGKTILDFLKSDGFANRNFMQLIHDDSLTFKEDIQKAQVSGQGDSLHEHIANLAGSPAIKKGILQTVKVVDELVKVMGRHKPENIVIEMARENQTTQKGQKNSRERMKRIEEGIKELGSQILKEHPVENTQLQNEKLYLYYLQNGRDMYVDQELDINRLSDYDVDHIVPQSFLKDDSIDNKVLTRSDKARGKSDNVPSEEVVKKMKNYWRQLLNAKLITQRKFDNLTKAERGGLSELDKAGFIKRQLVETRQITKHVAQILDSRMNTKYDENDKLIREVKVITLKSKLVSDFRKDFQFYKVREINNYHHAHDAYLNAVVGTALIKKYPKLESEFVYGDYKVYDVRKMIAKSEQEIGKATAKYFFYSNIMNFFKTEITLANGEIRKRPLIETNGETGEIVWDKGRDFATVRKVLSMPQVNIVKKTEVQTGGFSKESILPKRNSDKLIARKKDWDPKKYGGFDSPTVAYSVLVVAKVEKGKSKKLKSVKELLGITIMERSSFEKNPIDFLEAKGYKEVKKDLIIKLPKYSLFELENGRKRMLASAGELQKGNELALPSKYVNFLYLASHYEKLKGSPEDNEQKQLFVEQHKHYLDEIIEQISEFSKRVILADANLDKVLSAYNKHRDKPIREQAENIIHLFTLTNLGAPAAFKYFDTTIDRKRYTSTKEVLDATLIHQSITGLYETRIDLSQLGGDGGEAAAKGGSGSSGGTLNIEDEYRLHETSKGPDVPLGSTWLSDFPQAWAETGGMGLAVRQAPLIIPLKATSTPVSIKQYPMSQEARLGIKPHIQRLLDQGILVPCQSPWNTPLLPVKKPGTNDYRPVQDLREVNKRVEDIHPTVPNPYNLLSGLPPSHQWYTVLDLKDAFFCLRLHPTSQSLFAFEWRDPEMGISGQLTWTRLPQGFKNSPTLFNEALHRDLADFRIQHPDLILLQYVDDLLLAATSELDCQQGTRALLQTLGDLGYRASAKKAQICQKQVKYLGYLLKEGQRWLTEARKETVMGQPTPKTPRQLREFLGTAGFCRLWIPGFAEMAAPLYPLTKPGTLFEWGPDQQKAYQEIKQALLTAPALGLPDLTKPFELFVDEKQGYAKGVLTQKLGPWRRPVAYLSKKLDPVAAGWPPCLRMVAAIAVLTKDAGKLTMGQPLVILAPHAVEALVKQPPDRWLSNARMTHYQALLLDTDRVQFGPIVALNPATLLPLPEEGLQHDCLDILAEAHGTRPDLTDQPLPDADHTWYTDGSSFLQEGQRKAGAAVTTETEVVWAKALPAGTSAQRAELIALTQALKMAEGKKLNVYTDSRYAFATAHIHGEIYRRRGWLTSEGKEIKNKDEILALLKALFLPKRLSIIHCPGHQKGNRAEARGNRMADQAAREVATRETPETSTLLAGKRTADGSEFEKRTADGSEFESPKKKAKVE

SEQ ID NO: 2461 - protein, 2096 aa, synthetic construct
MPAAKRVKLDGGDKKYSIGLDIGTNSVGWAVITDEYKVPSKKFKVLGNTDRHSIKKNLIGALLFDSGETAEATRLKRTARRRYTRRKNRICYLQEIFSNEMAKVDDSFFHRLEESFLVEEDKKHERHPIFGNIVDEVAYHEKYPTIYHLRKKLVDSTDKADLRLIYLALAHMIKFRGHFLIEGDLNPDNSDVDKLFIQLVQTYNQLFEENPINASGVDAKAILSARLSKSRRLENLIAQLPGEKKNGLFGNLIALSLGLTPNFKSNFDLAEDAKLQLSKDTYDDDLDNLLAQIGDQYADLFLAAKNLSDAILLSDILRVNTEITKAPLSASMIKRYDEHHQDLTLLKALVRQQLPEKYKEIFFDQSKNGYAGYIDGGASQEEFYKFIKPILEKMDGTEELLVKLNREDLLRKQRTFDNGSIPHQIHLGELHAILRRQEDFYPFLKDNREKIEKILTFRIPYYVGPLARGNSRFAWMTRKSEETITPWNFEEVVDKGASAQSFIERMTNFDKNLPNEKVLPKHSLLYEYFTVYNELTKVKYVTEGMRKPAFLSGEQKKAIVDLLFKTNRKVTVKQLKEDYFKKIECFDSVEISGVEDRFNASLGTYHDLLKIIKDKDFLDNEENEDILEDIVLTLTLFEDREMIEERLKTYAHLFDDKVMKQLKRRRYTGWGRLSRKLINGIRDKQSGKTILDFLKSDGFANRNFMQLIHDDSLTFKEDIQKAQVSGQGDSLHEHIANLAGSPAIKKGILQTVKVVDELVKVMGRHKPENIVIEMARENQTTQKGQKNSRERMKRIEEGIKELGSQILKEHPVENTQLQNEKLYLYYLQNGRDMYVDQELDINRLSDYDVDHIVPQSFLKDDSIDNKVLTRSDKARGKSDNVPSEEVVKKMKNYWRQLLNAKLITQRKFDNLTKAERGGLSELDKAGFIKRQLVETRQITKHVAQILDSRMNTKYDENDKLIREVKVITLKSKLVSDFRKDFQFYKVREINNYHHAHDAYLNAVVGTALIKKYPKLESEFVYGDYKVYDVRKMIAKSEQEIGKATAKYFFYSNIMNFFKTEITLANGEIRKRPLIETNGETGEIVWDKGRDFATVRKVLSMPQVNIVKKTEVQTGGFSKESILPKRNSDKLIARKKDWDPKKYGGFDSPTVAYSVLVVAKVEKGKSKKLKSVKELLGITIMERSSFEKNPIDFLEAKGYKEVKKDLIIKLPKYSLFELENGRKRMLASAGELQKGNELALPSKYVNFLYLASHYEKLKGSPEDNEQKQLFVEQHKHYLDEIIEQISEFSKRVILADANLDKVLSAYNKHRDKPIREQAENIIHLFTLTNLGAPAAFKYFDTTIDRKRYTSTKEVLDATLIHQSITGLYETRIDLSQLGGDGGGGGGSSEAAAKGGTLNIEDEYRLHETSKGPDVPLGSTWLSDFPQAWAETGGMGLAVRQAPLIIPLKATSTPVSIKQYPMSQEARLGIKPHIQRLLDQGILVPCQSPWNTPLLPVKKPGTNDYRPVQDLREVNKRVEDIHPTVPNPYNLLSGLPPSHQWYTVLDLKDAFFCLRLHPTSQSLFAFEWRDPEMGISGQLTWTRLPQGFKNSPTLFNEALHRDLADFRIQHPDLILLQYVDDLLLAATSELDCQQGTRALLQTLGDLGYRASAKKAQICQKQVKYLGYLLKEGQRWLTEARKETVMGQPTPKTPRQLREFLGTAGFCRLWIPGFAEMAAPLYPLTKPGTLFEWGPDQQKAYQEIKQALLTAPALGLPDLTKPFELFVDEKQGYAKGVLTQKLGPWRRPVAYLSKKLDPVAAGWPPCLRMVAAIAVLTKDAGKLTMGQPLVILAPHAVEALVKQPPDRWLSNARMTHYQALLLDTDRVQFGPIVALNPATLLPLPEEGLQHDCLDILAEAHGTRPDLTDQPLPDADHTWYTDGSSFLQEGQRKAGAAVTTETEVVWAKALPAGTSAQRAELIALTQALKMAEGKKLNVYTDSRYAFATAHIHGEIYRRRGWLTSEGKEIKNKDEILALLKALFLPKRLSIIHCPGHQKGNRAEARGNRMADQAAREVATRETPETSTLLAGKRTADGSEFEKRTADGSEFESPKKKAKVE

SEQ ID NO: 2462 - protein, 2096 aa, synthetic construct
MPAAKRVKLDGGDKKYSIGLDIGTNSVGWAVITDEYKVPSKKFKVLGNTDRHSIKKNLIGALLFDSGETAEATRLKRTARRRYTRRKNRICYLQEIFSNEMAKVDDSFFHRLEESFLVEEDKKHERHPIFGNIVDEVAYHEKYPTIYHLRKKLVDSTDKADLRLIYLALAHMIKFRGHFLIEGDLNPDNSDVDKLFIQLVQTYNQLFEENPINASGVDAKAILSARLSKSRRLENLIAQLPGEKKNGLFGNLIALSLGLTPNFKSNFDLAEDAKLQLSKDTYDDDLDNLLAQIGDQYADLFLAAKNLSDAILLSDILRVNTEITKAPLSASMIKRYDEHHQDLTLLKALVRQQLPEKYKEIFFDQSKNGYAGYIDGGASQEEFYKFIKPILEKMDGTEELLVKLNREDLLRKQRTFDNGSIPHQIHLGELHAILRRQEDFYPFLKDNREKIEKILTFRIPYYVGPLARGNSRFAWMTRKSEETITPWNFEEVVDKGASAQSFIERMTNFDKNLPNEKVLPKHSLLYEYFTVYNELTKVKYVTEGMRKPAFLSGEQKKAIVDLLFKTNRKVTVKQLKEDYFKKIECFDSVEISGVEDRFNASLGTYHDLLKIIKDKDFLDNEENEDILEDIVLTLTLFEDREMIEERLKTYAHLFDDKVMKQLKRRRYTGWGRLSRKLINGIRDKQSGKTILDFLKSDGFANRNFMQLIHDDSLTFKEDIQKAQVSGQGDSLHEHIANLAGSPAIKKGILQTVKVVDELVKVMGRHKPENIVIEMARENQTTQKGQKNSRERMKRIEEGIKELGSQILKEHPVENTQLQNEKLYLYYLQNGRDMYVDQELDINRLSDYDVDHIVPQSFLKDDSIDNKVLTRSDKARGKSDNVPSEEVVKKMKNYWRQLLNAKLITQRKFDNLTKAERGGLSELDKAGFIKRQLVETRQITKHVAQILDSRMNTKYDENDKLIREVKVITLKSKLVSDFRKDFQFYKVREINNYHHAHDAYLNAVVGTALIKKYPKLESEFVYGDYKVYDVRKMIAKSEQEIGKATAKYFFYSNIMNFFKTEITLANGEIRKRPLIETNGETGEIVWDKGRDFATVRKVLSMPQVNIVKKTEVQTGGFSKESILPKRNSDKLIARKKDWDPKKYGGFDSPTVAYSVLVVAKVEKGKSKKLKSVKELLGITIMERSSFEKNPIDFLEAKGYKEVKKDLIIKLPKYSLFELENGRKRMLASAGELQKGNELALPSKYVNFLYLASHYEKLKGSPEDNEQKQLFVEQHKHYLDEIIEQISEFSKRVILADANLDKVLSAYNKHRDKPIREQAENIIHLFTLTNLGAPAAFKYFDTTIDRKRYTSTKEVLDATLIHQSITGLYETRIDLSQLGGDGGEAAAKGGGGSSGGTLNIEDEYRLHETSKGPDVPLGSTWLSDFPQAWAETGGMGLAVRQAPLIIPLKATSTPVSIKQYPMSQEARLGIKPHIQRLLDQGILVPCQSPWNTPLLPVKKPGTNDYRPVQDLREVNKRVEDIHPTVPNPYNLLSGLPPSHQWYTVLDLKDAFFCLRLHPTSQSLFAFEWRDPEMGISGQLTWTRLPQGFKNSPTLFNEALHRDLADFRIQHPDLILLQYVDDLLLAATSELDCQQGTRALLQTLGDLGYRASAKKAQICQKQVKYLGYLLKEGQRWLTEARKETVMGQPTPKTPRQLREFLGTAGFCRLWIPGFAEMAAPLYPLTKPGTLFEWGPDQQKAYQEIKQALLTAPALGLPDLTKPFELFVDEKQGYAKGVLTQKLGPWRRPVAYLSKKLDPVAAGWPPCLRMVAAIAVLTKDAGKLTMGQPLVILAPHAVEALVKQPPDRWLSNARMTHYQALLLDTDRVQFGPIVALNPATLLPLPEEGLQHDCLDILAEAHGTRPDLTDQPLPDADHTWYTDGSSFLQEGQRKAGAAVTTETEVVWAKALPAGTSAQRAELIALTQALKMAEGKKLNVYTDSRYAFATAHIHGEIYRRRGWLTSEGKEIKNKDEILALLKALFLPKRLSIIHCPGHQKGNRAEARGNRMADQAAREVATRETPETSTLLAGKRTADGSEFEKRTADGSEFESPKKKAKVE

SEQ ID NO: 2463 - protein, 2094 aa, synthetic construct
MPAAKRVKLDGGDKKYSIGLDIGTNSVGWAVITDEYKVPSKKFKVLGNTDRHSIKKNLIGALLFDSGETAEATRLKRTARRRYTRRKNRICYLQEIFSNEMAKVDDSFFHRLEESFLVEEDKKHERHPIFGNIVDEVAYHEKYPTIYHLRKKLVDSTDKADLRLIYLALAHMIKFRGHFLIEGDLNPDNSDVDKLFIQLVQTYNQLFEENPINASGVDAKAILSARLSKSRRLENLIAQLPGEKKNGLFGNLIALSLGLTPNFKSNFDLAEDAKLQLSKDTYDDDLDNLLAQIGDQYADLFLAAKNLSDAILLSDILRVNTEITKAPLSASMIKRYDEHHQDLTLLKALVRQQLPEKYKEIFFDQSKNGYAGYIDGGASQEEFYKFIKPILEKMDGTEELLVKLNREDLLRKQRTFDNGSIPHQIHLGELHAILRRQEDFYPFLKDNREKIEKILTFRIPYYVGPLARGNSRFAWMTRKSEETITPWNFEEVVDKGASAQSFIERMTNFDKNLPNEKVLPKHSLLYEYFTVYNELTKVKYVTEGMRKPAFLSGEQKKAIVDLLFKTNRKVTVKQLKEDYFKKIECFDSVEISGVEDRFNASLGTYHDLLKIIKDKDFLDNEENEDILEDIVLTLTLFEDREMIEERLKTYAHLFDDKVMKQLKRRRYTGWGRLSRKLINGIRDKQSGKTILDFLKSDGFANRNFMQLIHDDSLTFKEDIQKAQVSGQGDSLHEHIANLAGSPAIKKGILQTVKVVDELVKVMGRHKPENIVIEMARENQTTQKGQKNSRERMKRIEEGIKELGSQILKEHPVENTQLQNEKLYLYYLQNGRDMYVDQELDINRLSDYDVDHIVPQSFLKDDSIDNKVLTRSDKARGKSDNVPSEEVVKKMKNYWRQLLNAKLITQRKFDNLTKAERGGLSELDKAGFIKRQLVETRQITKHVAQILDSRMNTKYDENDKLIREVKVITLKSKLVSDFRKDFQFYKVREINNYHHAHDAYLNAVVGTALIKKYPKLESEFVYGDYKVYDVRKMIAKSEQEIGKATAKYFFYSNIMNFFKTEITLANGEIRKRPLIETNGETGEIVWDKGRDFATVRKVLSMPQVNIVKKTEVQTGGFSKESILPKRNSDKLIARKKDWDPKKYGGFDSPTVAYSVLVVAKVEKGKSKKLKSVKELLGITIMERSSFEKNPIDFLEAKGYKEVKKDLIIKLPKYSLFELENGRKRMLASAGELQKGNELALPSKYVNFLYLASHYEKLKGSPEDNEQKQLFVEQHKHYLDEIIEQISEFSKRVILADANLDKVLSAYNKHRDKPIREQAENIIHLFTLTNLGAPAAFKYFDTTIDRKRYTSTKEVLDATLIHQSITGLYETRIDLSQLGGDGGGSSGGSGGGGGTLNIEDEYRLHETSKGPDVPLGSTWLSDFPQAWAETGGMGLAVRQAPLIIPLKATSTPVSIKQYPMSQEARLGIKPHIQRLLDQGILVPCQSPWNTPLLPVKKPGTNDYRPVQDLREVNKRVEDIHPTVPNPYNLLSGLPPSHQWYTVLDLKDAFFCLRLHPTSQSLFAFEWRDPEMGISGQLTWTRLPQGFKNSPTLFNEALHRDLADFRIQHPDLILLQYVDDLLLAATSELDCQQGTRALLQTLGDLGYRASAKKAQICQKQVKYLGYLLKEGQRWLTEARKETVMGQPTPKTPRQLREFLGTAGFCRLWIPGFAEMAAPLYPLTKPGTLFEWGPDQQKAYQEIKQALLTAPALGLPDLTKPFELFVDEKQGYAKGVLTQKLGPWRRPVAYLSKKLDPVAAGWPPCLRMVAAIAVLTKDAGKLTMGQPLVILAPHAVEALVKQPPDRWLSNARMTHYQALLLDTDRVQFGPIVALNPATLLPLPEEGLQHDCLDILAEAHGTRPDLTDQPLPDADHTWYTDGSSFLQEGQRKAGAAVTTETEVVWAKALPAGTSAQRAELIALTQALKMAEGKKLNVYTDSRYAFATAHIHGEIYRRRGWLTSEGKEIKNKDEILALLKALFLPKRLSIIHCPGHQKGNRAEARGNRMADQAAREVATRETPETSTLLAGKRTADGSEFEKRTADGSEFESPKKKAKVE

SEQ ID NO: 2464 - protein, 2105 aa, synthetic construct
MPAAKRVKLDGGDKKYSIGLDIGTNSVGWAVITDEYKVPSKKFKVLGNTDRHSIKKNLIGALLFDSGETAEATRLKRTARRRYTRRKNRICYLQEIFSNEMAKVDDSFFHRLEESFLVEEDKKHERHPIFGNIVDEVAYHEKYPTIYHLRKKLVDSTDKADLRLIYLALAHMIKFRGHFLIEGDLNPDNSDVDKLFIQLVQTYNQLFEENPINASGVDAKAILSARLSKSRRLENLIAQLPGEKKNGLFGNLIALSLGLTPNFKSNFDLAEDAKLQLSKDTYDDDLDNLLAQIGDQYADLFLAAKNLSDAILLSDILRVNTEITKAPLSASMIKRYDEHHQDLTLLKALVRQQLPEKYKEIFFDQSKNGYAGYIDGGASQEEFYKFIKPILEKMDGTEELLVKLNREDLLRKQRTFDNGSIPHQIHLGELHAILRRQEDFYPFLKDNREKIEKILTFRIPYYVGPLARGNSRFAWMTRKSEETITPWNFEEVVDKGASAQSFIERMTNFDKNLPNEKVLPKHSLLYEYFTVYNELTKVKYVTEGMRKPAFLSGEQKKAIVDLLFKTNRKVTVKQLKEDYFKKIECFDSVEISGVEDRFNASLGTYHDLLKIIKDKDFLDNEENEDILEDIVLTLTLFEDREMIEERLKTYAHLFDDKVMKQLKRRRYTGWGRLSRKLINGIRDKQSGKTILDFLKSDGFANRNFMQLIHDDSLTFKEDIQKAQVSGQGDSLHEHIANLAGSPAIKKGILQTVKVVDELVKVMGRHKPENIVIEMARENQTTQKGQKNSRERMKRIEEGIKELGSQILKEHPVENTQLQNEKLYLYYLQNGRDMYVDQELDINRLSDYDVDHIVPQSFLKDDSIDNKVLTRSDKARGKSDNVPSEEVVKKMKNYWRQLLNAKLITQRKFDNLTKAERGGLSELDKAGFIKRQLVETRQITKHVAQILDSRMNTKYDENDKLIREVKVITLKSKLVSDFRKDFQFYKVREINNYHHAHDAYLNAVVGTALIKKYPKLESEFVYGDYKVYDVRKMIAKSEQEIGKATAKYFFYSNIMNFFKTEITLANGEIRKRPLIETNGETGEIVWDKGRDFATVRKVLSMPQVNIVKKTEVQTGGFSKESILPKRNSDKLIARKKDWDPKKYGGFDSPTVAYSVLVVAKVEKGKSKKLKSVKELLGITIMERSSFEKNPIDFLEAKGYKEVKKDLIIKLPKYSLFELENGRKRMLASAGELQKGNELALPSKYVNFLYLASHYEKLKGSPEDNEQKQLFVEQHKHYLDEIIEQISEFSKRVILADANLDKVLSAYNKHRDKPIREQAENIIHLFTLTNLGAPAAFKYFDTTIDRKRYTSTKEVLDATLIHQSITGLYETRIDLSQLGGDGGGGGGSGGGGSGGGGSGGGGSGGTLNIEDEYRLHETSKGPDVPLGSTWLSDFPQAWAETGGMGLAVRQAPLIIPLKATSTPVSIKQYPMSQEARLGIKPHIQRLLDQGILVPCQSPWNTPLLPVKKPGTNDYRPVQDLREVNKRVEDIHPTVPNPYNLLSGLPPSHQWYTVLDLKDAFFCLRLHPTSQSLFAFEWRDPEMGISGQLTWTRLPQGFKNSPTLFNEALHRDLADFRIQHPDLILLQYVDDLLLAATSELDCQQGTRALLQTLGDLGYRASAKKAQICQKQVKYLGYLLKEGQRWLTEARKETVMGQPTPKTPRQLREFLGTAGFCRLWIPGFAEMAAPLYPLTKPGTLFEWGPDQQKAYQEIKQALLTAPALGLPDLTKPFELFVDEKQGYAKGVLTQKLGPWRRPVAYLSKKLDPVAAGWPPCLRMVAAIAVLTKDAGKLTMGQPLVILAPHAVEALVKQPPDRWLSNARMTHYQALLLDTDRVQFGPIVALNPATLLPLPEEGLQHDCLDILAEAHGTRPDLTDQPLPDADHTWYTDGSSFLQEGQRKAGAAVTTETEVVWAKALPAGTSAQRAELIALTQALKMAEGKKLNVYTDSRYAFATAHIHGEIYRRRGWLTSEGKEIKNKDEILALLKALFLPKRLSIIHCPGHQKGNRAEARGNRMADQAAREVATRETPETSTLLAGKRTADGSEFEKRTADGSEFESPKKKAKVE

SEQ ID NO: 2465 - protein, 2100 aa, synthetic construct
MPAAKRVKLDGGDKKYSIGLDIGTNSVGWAVITDEYKVPSKKFKVLGNTDRHSIKKNLIGALLFDSGETAEATRLKRTARRRYTRRKNRICYLQEIFSNEMAKVDDSFFHRLEESFLVEEDKKHERHPIFGNIVDEVAYHEKYPTIYHLRKKLVDSTDKADLRLIYLALAHMIKFRGHFLIEGDLNPDNSDVDKLFIQLVQTYNQLFEENPINASGVDAKAILSARLSKSRRLENLIAQLPGEKKNGLFGNLIALSLGLTPNFKSNFDLAEDAKLQLSKDTYDDDLDNLLAQIGDQYADLFLAAKNLSDAILLSDILRVNTEITKAPLSASMIKRYDEHHQDLTLLKALVRQQLPEKYKEIFFDQSKNGYAGYIDGGASQEEFYKFIKPILEKMDGTEELLVKLNREDLLRKQRTFDNGSIPHQIHLGELHAILRRQEDFYPFLKDNREKIEKILTFRIPYYVGPLARGNSRFAWMTRKSEETITPWNFEEVVDKGASAQSFIERMTNFDKNLPNEKVLPKHSLLYEYFTVYNELTKVKYVTEGMRKPAFLSGEQKKAIVDLLFKTNRKVTVKQLKEDYFKKIECFDSVEISGVEDRFNASLGTYHDLLKIIKDKDFLDNEENEDILEDIVLTLTLFEDREMIEERLKTYAHLFDDKVMKQLKRRRYTGWGRLSRKLINGIRDKQSGKTILDFLKSDGFANRNFMQLIHDDSLTFKEDIQKAQVSGQGDSLHEHIANLAGSPAIKKGILQTVKVVDELVKVMGRHKPENIVIEMARENQTTQKGQKNSRERMKRIEEGIKELGSQILKEHPVENTQLQNEKLYLYYLQNGRDMYVDQELDINRLSDYDVDHIVPQSFLKDDSIDNKVLTRSDKARGKSDNVPSEEVVKKMKNYWRQLLNAKLITQRKFDNLTKAERGGLSELDKAGFIKRQLVETRQITKHVAQILDSRMNTKYDENDKLIREVKVITLKSKLVSDFRKDFQFYKVREINNYHHAHDAYLNAVVGTALIKKYPKLESEFVYGDYKVYDVRKMIAKSEQEIGKATAKYFFYSNIMNFFKTEITLANGEIRKRPLIETNGETGEIVWDKGRDFATVRKVLSMPQVNIVKKTEVQTGGFSKESILPKRNSDKLIARKKDWDPKKYGGFDSPTVAYSVLVVAKVEKGKSKKLKSVKELLGITIMERSSFEKNPIDFLEAKGYKEVKKDLIIKLPKYSLFELENGRKRMLASAGELQKGNELALPSKYVNFLYLASHYEKLKGSPEDNEQKQLFVEQHKHYLDEIIEQISEFSKRVILADANLDKVLSAYNKHRDKPIREQAENIIHLFTLTNLGAPAAFKYFDTTIDRKRYTSTKEVLDATLIHQSITGLYETRIDLSQLGGDGGGGSGGSGGSGGSGGSGGTLNIEDEYRLHETSKGPDVPLGSTWLSDFPQAWAETGGMGLAVRQAPLIIPLKATSTPVSIKQYPMSQEARLGIKPHIQRLLDQGILVPCQSPWNTPLLPVKKPGTNDYRPVQDLREVNKRVEDIHPTVPNPYNLLSGLPPSHQWYTVLDLKDAFFCLRLHPTSQSLFAFEWRDPEMGISGQLTWTRLPQGFKNSPTLFNEALHRDLADFRIQHPDLILLQYVDDLLLAATSELDCQQGTRALLQTLGDLGYRASAKKAQICQKQVKYLGYLLKEGQRWLTEARKETVMGQPTPKTPRQLREFLGTAGFCRLWIPGFAEMAAPLYPLTKPGTLFEWGPDQQKAYQEIKQALLTAPALGLPDLTKPFELFVDEKQGYAKGVLTQKLGPWRRPVAYLSKKLDPVAAGWPPCLRMVAAIAVLTKDAGKLTMGQPLVILAPHAVEALVKQPPDRWLSNARMTHYQALLLDTDRVQFGPIVALNPATLLPLPEEGLQHDCLDILAEAHGTRPDLTDQPLPDADHTWYTDGSSFLQEGQRKAGAAVTTETEVVWAKALPAGTSAQRAELIALTQALKMAEGKKLNVYTDSRYAFATAHIHGEIYRRRGWLTSEGKEIKNKDEILALLKALFLPKRLSIIHCPGHQKGNRAEARGNRMADQAAREVATRETPETSTLLAGKRTADGSEFEKRTADGSEFESPKKKAKVE

SEQ ID NO: 2466 - protein, 2096 aa, synthetic construct
MPAAKRVKLDGGDKKYSIGLDIGTNSVGWAVITDEYKVPSKKFKVLGNTDRHSIKKNLIGALLFDSGETAEATRLKRTARRRYTRRKNRICYLQEIFSNEMAKVDDSFFHRLEESFLVEEDKKHERHPIFGNIVDEVAYHEKYPTIYHLRKKLVDSTDKADLRLIYLALAHMIKFRGHFLIEGDLNPDNSDVDKLFIQLVQTYNQLFEENPINASGVDAKAILSARLSKSRRLENLIAQLPGEKKNGLFGNLIALSLGLTPNFKSNFDLAEDAKLQLSKDTYDDDLDNLLAQIGDQYADLFLAAKNLSDAILLSDILRVNTEITKAPLSASMIKRYDEHHQDLTLLKALVRQQLPEKYKEIFFDQSKNGYAGYIDGGASQEEFYKFIKPILEKMDGTEELLVKLNREDLLRKQRTFDNGSIPHQIHLGELHAILRRQEDFYPFLKDNREKIEKILTFRIPYYVGPLARGNSRFAWMTRKSEETITPWNFEEVVDKGASAQSFIERMTNFDKNLPNEKVLPKHSLLYEYFTVYNELTKVKYVTEGMRKPAFLSGEQKKAIVDLLFKTNRKVTVKQLKEDYFKKIECFDSVEISGVEDRFNASLGTYHDLLKIIKDKDFLDNEENEDILEDIVLTLTLFEDREMIEERLKTYAHLFDDKVMKQLKRRRYTGWGRLSRKLINGIRDKQSGKTILDFLKSDGFANRNFMQLIHDDSLTFKEDIQKAQVSGQGDSLHEHIANLAGSPAIKKGILQTVKVVDELVKVMGRHKPENIVIEMARENQTTQKGQKNSRERMKRIEEGIKELGSQILKEHPVENTQLQNEKLYLYYLQNGRDMYVDQELDINRLSDYDVDHIVPQSFLKDDSIDNKVLTRSDKARGKSDNVPSEEVVKKMKNYWRQLLNAKLITQRKFDNLTKAERGGLSELDKAGFIKRQLVETRQITKHVAQILDSRMNTKYDENDKLIREVKVITLKSKLVSDFRKDFQFYKVREINNYHHAHDAYLNAVVGTALIKKYPKLESEFVYGDYKVYDVRKMIAKSEQEIGKATAKYFFYSNIMNFFKTEITLANGEIRKRPLIETNGETGEIVWDKGRDFATVRKVLSMPQVNIVKKTEVQTGGFSKESILPKRNSDKLIARKKDWDPKKYGGFDSPTVAYSVLVVAKVEKGKSKKLKSVKELLGITIMERSSFEKNPIDFLEAKGYKEVKKDLIIKLPKYSLFELENGRKRMLASAGELQKGNELALPSKYVNFLYLASHYEKLKGSPEDNEQKQLFVEQHKHYLDEIIEQISEFSKRVILADANLDKVLSAYNKHRDKPIREQAENIIHLFTLTNLGAPAAFKYFDTTIDRKRYTSTKEVLDATLIHQSITGLYETRIDLSQLGGDGGPAPEAAAKGSSGGTLNIEDEYRLHETSKGPDVPLGSTWLSDFPQAWAETGGMGLAVRQAPLIIPLKATSTPVSIKQYPMSQEARLGIKPHIQRLLDQGILVPCQSPWNTPLLPVKKPGTNDYRPVQDLREVNKRVEDIHPTVPNPYNLLSGLPPSHQWYTVLDLKDAFFCLRLHPTSQSLFAFEWRDPEMGISGQLTWTRLPQGFKNSPTLFNEALHRDLADFRIQHPDLILLQYVDDLLLAATSELDCQQGTRALLQTLGDLGYRASAKKAQICQKQVKYLGYLLKEGQRWLTEARKETVMGQPTPKTPRQLREFLGTAGFCRLWIPGFAEMAAPLYPLTKPGTLFEWGPDQQKAYQEIKQALLTAPALGLPDLTKPFELFVDEKQGYAKGVLTQKLGPWRRPVAYLSKKLDPVAAGWPPCLRMVAAIAVLTKDAGKLTMGQPLVILAPHAVEALVKQPPDRWLSNARMTHYQALLLDTDRVQFGPIVALNPATLLPLPEEGLQHDCLDILAEAHGTRPDLTDQPLPDADHTWYTDGSSFLQEGQRKAGAAVTTETEVVWAKALPAGTSAQRAELIALTQALKMAEGKKLNVYTDSRYAFATAHIHGEIYRRRGWLTSEGKEIKNKDEILALLKALFLPKRLSIIHCPGHQKGNRAEARGNRMADQAAREVATRETPETSTLLAGKRTADGSEFEKRTADGSEFESPKKKAKVE

SEQ ID NO: 2467 - protein, 2094 aa, synthetic construct
MPAAKRVKLDGGDKKYSIGLDIGTNSVGWAVITDEYKVPSKKFKVLGNTDRHSIKKNLIGALLFDSGETAEATRLKRTARRRYTRRKNRICYLQEIFSNEMAKVDDSFFHRLEESFLVEEDKKHERHPIFGNIVDEVAYHEKYPTIYHLRKKLVDSTDKADLRLIYLALAHMIKFRGHFLIEGDLNPDNSDVDKLFIQLVQTYNQLFEENPINASGVDAKAILSARLSKSRRLENLIAQLPGEKKNGLFGNLIALSLGLTPNFKSNFDLAEDAKLQLSKDTYDDDLDNLLAQIGDQYADLFLAAKNLSDAILLSDILRVNTEITKAPLSASMIKRYDEHHQDLTLLKALVRQQLPEKYKEIFFDQSKNGYAGYIDGGASQEEFYKFIKPILEKMDGTEELLVKLNREDLLRKQRTFDNGSIPHQIHLGELHAILRRQEDFYPFLKDNREKIEKILTFRIPYYVGPLARGNSRFAWMTRKSEETITPWNFEEVVDKGASAQSFIERMTNFDKNLPNEKVLPKHSLLYEYFTVYNELTKVKYVTEGMRKPAFLSGEQKKAIVDLLFKTNRKVTVKQLKEDYFKKIECFDSVEISGVEDRFNASLGTYHDLLKIIKDKDFLDNEENEDILEDIVLTLTLFEDREMIEERLKTYAHLFDDKVMKQLKRRRYTGWGRLSRKLINGIRDKQSGKTILDFLKSDGFANRNFMQLIHDDSLTFKEDIQKAQVSGQGDSLHEHIANLAGSPAIKKGILQTVKVVDELVKVMGRHKPENIVIEMARENQTTQKGQKNSRERMKRIEEGIKELGSQILKEHPVENTQLQNEKLYLYYLQNGRDMYVDQELDINRLSDYDVDHIVPQSFLKDDSIDNKVLTRSDKARGKSDNVPSEEVVKKMKNYWRQLLNAKLITQRKFDNLTKAERGGLSELDKAGFIKRQLVETRQITKHVAQILDSRMNTKYDENDKLIREVKVITLKSKLVSDFRKDFQFYKVREINNYHHAHDAYLNAVVGTALIKKYPKLESEFVYGDYKVYDVRKMIAKSEQEIGKATAKYFFYSNIMNFFKTEITLANGEIRKRPLIETNGETGEIVWDKGRDFATVRKVLSMPQVNIVKKTEVQTGGFSKESILPKRNSDKLIARKKDWDPKKYGGFDSPTVAYSVLVVAKVEKGKSKKLKSVKELLGITIMERSSFEKNPIDFLEAKGYKEVKKDLIIKLPKYSLFELENGRKRMLASAGELQKGNELALPSKYVNFLYLASHYEKLKGSPEDNEQKQLFVEQHKHYLDEIIEQISEFSKRVILADANLDKVLSAYNKHRDKPIREQAENIIHLFTLTNLGAPAAFKYFDTTIDRKRYTSTKEVLDATLIHQSITGLYETRIDLSQLGGDGGPAPGGSGSSGGTLNIEDEYRLHETSKGPDVPLGSTWLSDFPQAWAETGGMGLAVRQAPLIIPLKATSTPVSIKQYPMSQEARLGIKPHIQRLLDQGILVPCQSPWNTPLLPVKKPGTNDYRPVQDLREVNKRVEDIHPTVPNPYNLLSGLPPSHQWYTVLDLKDAFFCLRLHPTSQSLFAFEWRDPEMGISGQLTWTRLPQGFKNSPTLFNEALHRDLADFRIQHPDLILLQYVDDLLLAATSELDCQQGTRALLQTLGDLGYRASAKKAQICQKQVKYLGYLLKEGQRWLTEARKETVMGQPTPKTPRQLREFLGTAGFCRLWIPGFAEMAAPLYPLTKPGTLFEWGPDQQKAYQEIKQALLTAPALGLPDLTKPFELFVDEKQGYAKGVLTQKLGPWRRPVAYLSKKLDPVAAGWPPCLRMVAAIAVLTKDAGKLTMGQPLVILAPHAVEALVKQPPDRWLSNARMTHYQALLLDTDRVQFGPIVALNPATLLPLPEEGLQHDCLDILAEAHGTRPDLTDQPLPDADHTWYTDGSSFLQEGQRKAGAAVTTETEVVWAKALPAGTSAQRAELIALTQALKMAEGKKLNVYTDSRYAFATAHIHGEIYRRRGWLTSEGKEIKNKDEILALLKALFLPKRLSIIHCPGHQKGNRAEARGNRMADQAAREVATRETPETSTLLAGKRTADGSEFEKRTADGSEFESPKKKAKVE

SEQ ID NO: 2468 - protein, 2091 aa, synthetic construct
MPAAKRVKLDGGDKKYSIGLDIGTNSVGWAVITDEYKVPSKKFKVLGNTDRHSIKKNLIGALLFDSGETAEATRLKRTARRRYTRRKNRICYLQEIFSNEMAKVDDSFFHRLEESFLVEEDKKHERHPIFGNIVDEVAYHEKYPTIYHLRKKLVDSTDKADLRLIYLALAHMIKFRGHFLIEGDLNPDNSDVDKLFIQLVQTYNQLFEENPINASGVDAKAILSARLSKSRRLENLIAQLPGEKKNGLFGNLIALSLGLTPNFKSNFDLAEDAKLQLSKDTYDDDLDNLLAQIGDQYADLFLAAKNLSDAILLSDILRVNTEITKAPLSASMIKRYDEHHQDLTLLKALVRQQLPEKYKEIFFDQSKNGYAGYIDGGASQEEFYKFIKPILEKMDGTEELLVKLNREDLLRKQRTFDNGSIPHQIHLGELHAILRRQEDFYPFLKDNREKIEKILTFRIPYYVGPLARGNSRFAWMTRKSEETITPWNFEEVVDKGASAQSFIERMTNFDKNLPNEKVLPKHSLLYEYFTVYNELTKVKYVTEGMRKPAFLSGEQKKAIVDLLFKTNRKVTVKQLKEDYFKKIECFDSVEISGVEDRFNASLGTYHDLLKIIKDKDFLDNEENEDILEDIVLTLTLFEDREMIEERLKTYAHLFDDKVMKQLKRRRYTGWGRLSRKLINGIRDKQSGKTILDFLKSDGFANRNFMQLIHDDSLTFKEDIQKAQVSGQGDSLHEHIANLAGSPAIKKGILQTVKVVDELVKVMGRHKPENIVIEMARENQTTQKGQKNSRERMKRIEEGIKELGSQILKEHPVENTQLQNEKLYLYYLQNGRDMYVDQELDINRLSDYDVDHIVPQSFLKDDSIDNKVLTRSDKARGKSDNVPSEEVVKKMKNYWRQLLNAKLITQRKFDNLTKAERGGLSELDKAGFIKRQLVETRQITKHVAQILDSRMNTKYDENDKLIREVKVITLKSKLVSDFRKDFQFYKVREINNYHHAHDAYLNAVVGTALIKKYPKLESEFVYGDYKVYDVRKMIAKSEQEIGKATAKYFFYSNIMNFFKTEITLANGEIRKRPLIETNGETGEIVWDKGRDFATVRKVLSMPQVNIVKKTEVQTGGFSKESILPKRNSDKLIARKKDWDPKKYGGFDSPTVAYSVLVVAKVEKGKSKKLKSVKELLGITIMERSSFEKNPIDFLEAKGYKEVKKDLIIKLPKYSLFELENGRKRMLASAGELQKGNELALPSKYVNFLYLASHYEKLKGSPEDNEQKQLFVEQHKHYLDEIIEQISEFSKRVILADANLDKVLSAYNKHRDKPIREQAENIIHLFTLTNLGAPAAFKYFDTTIDRKRYTSTKEVLDATLIHQSITGLYETRIDLSQLGGDGGGGGGSSGGTLNIEDEYRLHETSKGPDVPLGSTWLSDFPQAWAETGGMGLAVRQAPLIIPLKATSTPVSIKQYPMSQEARLGIKPHIQRLLDQGILVPCQSPWNTPLLPVKKPGTNDYRPVQDLREVNKRVEDIHPTVPNPYNLLSGLPPSHQWYTVLDLKDAFFCLRLHPTSQSLFAFEWRDPEMGISGQLTWTRLPQGFKNSPTLFNEALHRDLADFRIQHPDLILLQYVDDLLLAATSELDCQQGTRALLQTLGDLGYRASAKKAQICQKQVKYLGYLLKEGQRWLTEARKETVMGQPTPKTPRQLREFLGTAGFCRLWIPGFAEMAAPLYPLTKPGTLFEWGPDQQKAYQEIKQALLTAPALGLPDLTKPFELFVDEKQGYAKGVLTQKLGPWRRPVAYLSKKLDPVAAGWPPCLRMVAAIAVLTKDAGKLTMGQPLVILAPHAVEALVKQPPDRWLSNARMTHYQALLLDTDRVQFGPIVALNPATLLPLPEEGLQHDCLDILAEAHGTRPDLTDQPLPDADHTWYTDGSSFLQEGQRKAGAAVTTETEVVWAKALPAGTSAQRAELIALTQALKMAEGKKLNVYTDSRYAFATAHIHGEIYRRRGWLTSEGKEIKNKDEILALLKALFLPKRLSIIHCPGHQKGNRAEARGNRMADQAAREVATRETPETSTLLAGKRTADGSEFEKRTADGSEFESPKKKAKVE

SEQ ID NO: 2469 - protein, 2096 aa, synthetic construct
MPAAKRVKLDGGDKKYSIGLDIGTNSVGWAVITDEYKVPSKKFKVLGNTDRHSIKKNLIGALLFDSGETAEATRLKRTARRRYTRRKNRICYLQEIFSNEMAKVDDSFFHRLEESFLVEEDKKHERHPIFGNIVDEVAYHEKYPTIYHLRKKLVDSTDKADLRLIYLALAHMIKFRGHFLIEGDLNPDNSDVDKLFIQLVQTYNQLFEENPINASGVDAKAILSARLSKSRRLENLIAQLPGEKKNGLFGNLIALSLGLTPNFKSNFDLAEDAKLQLSKDTYDDDLDNLLAQIGDQYADLFLAAKNLSDAILLSDILRVNTEITKAPLSASMIKRYDEHHQDLTLLKALVRQQLPEKYKEIFFDQSKNGYAGYIDGGASQEEFYKFIKPILEKMDGTEELLVKLNREDLLRKQRTFDNGSIPHQIHLGELHAILRRQEDFYPFLKDNREKIEKILTFRIPYYVGPLARGNSRFAWMTRKSEETITPWNFEEVVDKGASAQSFIERMTNFDKNLPNEKVLPKHSLLYEYFTVYNELTKVKYVTEGMRKPAFLSGEQKKAIVDLLFKTNRKVTVKQLKEDYFKKIECFDSVEISGVEDRFNASLGTYHDLLKIIKDKDFLDNEENEDILEDIVLTLTLFEDREMIEERLKTYAHLFDDKVMKQLKRRRYTGWGRLSRKLINGIRDKQSGKTILDFLKSDGFANRNFMQLIHDDSLTFKEDIQKAQVSGQGDSLHEHIANLAGSPAIKKGILQTVKVVDELVKVMGRHKPENIVIEMARENQTTQKGQKNSRERMKRIEEGIKELGSQILKEHPVENTQLQNEKLYLYYLQNGRDMYVDQELDINRLSDYDVDHIVPQSFLKDDSIDNKVLTRSDKARGKSDNVPSEEVVKKMKNYWRQLLNAKLITQRKFDNLTKAERGGLSELDKAGFIKRQLVETRQITKHVAQILDSRMNTKYDENDKLIREVKVITLKSKLVSDFRKDFQFYKVREINNYHHAHDAYLNAVVGTALIKKYPKLESEFVYGDYKVYDVRKMIAKSEQEIGKATAKYFFYSNIMNFFKTEITLANGEIRKRPLIETNGETGEIVWDKGRDFATVRKVLSMPQVNIVKKTEVQTGGFSKESILPKRNSDKLIARKKDWDPKKYGGFDSPTVAYSVLVVAKVEKGKSKKLKSVKELLGITIMERSSFEKNPIDFLEAKGYKEVKKDLIIKLPKYSLFELENGRKRMLASAGELQKGNELALPSKYVNFLYLASHYEKLKGSPEDNEQKQLFVEQHKHYLDEIIEQISEFSKRVILADANLDKVLSAYNKHRDKPIREQAENIIHLFTLTNLGAPAAFKYFDTTIDRKRYTSTKEVLDATLIHQSITGLYETRIDLSQLGGDGGEAAAKGSSPAPGGTLNIEDEYRLHETSKGPDVPLGSTWLSDFPQAWAETGGMGLAVRQAPLIIPLKATSTPVSIKQYPMSQEARLGIKPHIQRLLDQGILVPCQSPWNTPLLPVKKPGTNDYRPVQDLREVNKRVEDIHPTVPNPYNLLSGLPPSHQWYTVLDLKDAFFCLRLHPTSQSLFAFEWRDPEMGISGQLTWTRLPQGFKNSPTLFNEALHRDLADFRIQHPDLILLQYVDDLLLAATSELDCQQGTRALLQTLGDLGYRASAKKAQICQKQVKYLGYLLKEGQRWLTEARKETVMGQPTPKTPRQLREFLGTAGFCRLWIPGFAEMAAPLYPLTKPGTLFEWGPDQQKAYQEIKQALLTAPALGLPDLTKPFELFVDEKQGYAKGVLTQKLGPWRRPVAYLSKKLDPVAAGWPPCLRMVAAIAVLTKDAGKLTMGQPLVILAPHAVEALVKQPPDRWLSNARMTHYQALLLDTDRVQFGPIVALNPATLLPLPEEGLQHDCLDILAEAHGTRPDLTDQPLPDADHTWYTDGSSFLQEGQRKAGAAVTTETEVVWAKALPAGTSAQRAELIALTQALKMAEGKKLNVYTDSRYAFATAHIHGEIYRRRGWLTSEGKEIKNKDEILALLKALFLPKRLSIIHCPGHQKGNRAEARGNRMADQAAREVATRETPETSTLLAGKRTADGSEFEKRTADGSEFESPKKKAKVE

SEQ ID NO: 2470 - protein, 2096 aa, synthetic construct
MPAAKRVKLDGGDKKYSIGLDIGTNSVGWAVITDEYKVPSKKFKVLGNTDRHSIKKNLIGALLFDSGETAEATRLKRTARRRYTRRKNRICYLQEIFSNEMAKVDDSFFHRLEESFLVEEDKKHERHPIFGNIVDEVAYHEKYPTIYHLRKKLVDSTDKADLRLIYLALAHMIKFRGHFLIEGDLNPDNSDVDKLFIQLVQTYNQLFEENPINASGVDAKAILSARLSKSRRLENLIAQLPGEKKNGLFGNLIALSLGLTPNFKSNFDLAEDAKLQLSKDTYDDDLDNLLAQIGDQYADLFLAAKNLSDAILLSDILRVNTEITKAPLSASMIKRYDEHHQDLTLLKALVRQQLPEKYKEIFFDQSKNGYAGYIDGGASQEEFYKFIKPILEKMDGTEELLVKLNREDLLRKQRTFDNGSIPHQIHLGELHAILRRQEDFYPFLKDNREKIEKILTFRIPYYVGPLARGNSRFAWMTRKSEETITPWNFEEVVDKGASAQSFIERMTNFDKNLPNEKVLPKHSLLYEYFTVYNELTKVKYVTEGMRKPAFLSGEQKKAIVDLLFKTNRKVTVKQLKEDYFKKIECFDSVEISGVEDRFNASLGTYHDLLKIIKDKDFLDNEENEDILEDIVLTLTLFEDREMIEERLKTYAHLFDDKVMKQLKRRRYTGWGRLSRKLINGIRDKQSGKTILDFLKSDGFANRNFMQLIHDDSLTFKEDIQKAQVSGQGDSLHEHIANLAGSPAIKKGILQTVKVVDELVKVMGRHKPENIVIEMARENQTTQKGQKNSRERMKRIEEGIKELGSQILKEHPVENTQLQNEKLYLYYLQNGRDMYVDQELDINRLSDYDVDHIVPQSFLKDDSIDNKVLTRSDKARGKSDNVPSEEVVKKMKNYWRQLLNAKLITQRKFDNLTKAERGGLSELDKAGFIKRQLVETRQITKHVAQILDSRMNTKYDENDKLIREVKVITLKSKLVSDFRKDFQFYKVREINNYHHAHDAYLNAVVGTALIKKYPKLESEFVYGDYKVYDVRKMIAKSEQEIGKATAKYFFYSNIMNFFKTEITLANGEIRKRPLIETNGETGEIVWDKGRDFATVRKVLSMPQVNIVKKTEVQTGGFSKESILPKRNSDKLIARKKDWDPKKYGGFDSPTVAYSVLVVAKVEKGKSKKLKSVKELLGITIMERSSFEKNPIDFLEAKGYKEVKKDLIIKLPKYSLFELENGRKRMLASAGELQKGNELALPSKYVNFLYLASHYEKLKGSPEDNEQKQLFVEQHKHYLDEIIEQISEFSKRVILADANLDKVLSAYNKHRDKPIREQAENIIHLFTLTNLGAPAAFKYFDTTIDRKRYTSTKEVLDATLIHQSITGLYETRIDLSQLGGDGGGGSGSSEAAAKGGTLNIEDEYRLHETSKGPDVPLGSTWLSDFPQAWAETGGMGLAVRQAPLIIPLKATSTPVSIKQYPMSQEARLGIKPHIQRLLDQGILVPCQSPWNTPLLPVKKPGTNDYRPVQDLREVNKRVEDIHPTVPNPYNLLSGLPPSHQWYTVLDLKDAFFCLRLHPTSQSLFAFEWRDPEMGISGQLTWTRLPQGFKNSPTLFNEALHRDLADFRIQHPDLILLQYVDDLLLAATSELDCQQGTRALLQTLGDLGYRASAKKAQICQKQVKYLGYLLKEGQRWLTEARKETVMGQPTPKTPRQLREFLGTAGFCRLWIPGFAEMAAPLYPLTKPGTLFEWGPDQQKAYQEIKQALLTAPALGLPDLTKPFELFVDEKQGYAKGVLTQKLGPWRRPVAYLSKKLDPVAAGWPPCLRMVAAIAVLTKDAGKLTMGQPLVILAPHAVEALVKQPPDRWLSNARMTHYQALLLDTDRVQFGPIVALNPATLLPLPEEGLQHDCLDILAEAHGTRPDLTDQPLPDADHTWYTDGSSFLQEGQRKAGAAVTTETEVVWAKALPAGTSAQRAELIALTQALKMAEGKKLNVYTDSRYAFATAHIHGEIYRRRGWLTSEGKEIKNKDEILALLKALFLPKRLSIIHCPGHQKGNRAEARGNRMADQAAREVATRETPETSTLLAGKRTADGSEFEKRTADGSEFESPKKKAKVE

SEQ ID NO: 2471 - protein, 2094 aa, synthetic construct
MPAAKRVKLDGGDKKYSIGLDIGTNSVGWAVITDEYKVPSKKFKVLGNTDRHSIKKNLIGALLFDSGETAEATRLKRTARRRYTRRKNRICYLQEIFSNEMAKVDDSFFHRLEESFLVEEDKKHERHPIFGNIVDEVAYHEKYPTIYHLRKKLVDSTDKADLRLIYLALAHMIKFRGHFLIEGDLNPDNSDVDKLFIQLVQTYNQLFEENPINASGVDAKAILSARLSKSRRLENLIAQLPGEKKNGLFGNLIALSLGLTPNFKSNFDLAEDAKLQLSKDTYDDDLDNLLAQIGDQYADLFLAAKNLSDAILLSDILRVNTEITKAPLSASMIKRYDEHHQDLTLLKALVRQQLPEKYKEIFFDQSKNGYAGYIDGGASQEEFYKFIKPILEKMDGTEELLVKLNREDLLRKQRTFDNGSIPHQIHLGELHAILRRQEDFYPFLKDNREKIEKILTFRIPYYVGPLARGNSRFAWMTRKSEETITPWNFEEVVDKGASAQSFIERMTNFDKNLPNEKVLPKHSLLYEYFTVYNELTKVKYVTEGMRKPAFLSGEQKKAIVDLLFKTNRKVTVKQLKEDYFKKIECFDSVEISGVEDRFNASLGTYHDLLKIIKDKDFLDNEENEDILEDIVLTLTLFEDREMIEERLKTYAHLFDDKVMKQLKRRRYTGWGRLSRKLINGIRDKQSGKTILDFLKSDGFANRNFMQLIHDDSLTFKEDIQKAQVSGQGDSLHEHIANLAGSPAIKKGILQTVKVVDELVKVMGRHKPENIVIEMARENQTTQKGQKNSRERMKRIEEGIKELGSQILKEHPVENTQLQNEKLYLYYLQNGRDMYVDQELDINRLSDYDVDHIVPQSFLKDDSIDNKVLTRSDKARGKSDNVPSEEVVKKMKNYWRQLLNAKLITQRKFDNLTKAERGGLSELDKAGFIKRQLVETRQITKHVAQILDSRMNTKYDENDKLIREVKVITLKSKLVSDFRKDFQFYKVREINNYHHAHDAYLNAVVGTALIKKYPKLESEFVYGDYKVYDVRKMIAKSEQEIGKATAKYFFYSNIMNFFKTEITLANGEIRKRPLIETNGETGEIVWDKGRDFATVRKVLSMPQVNIVKKTEVQTGGFSKESILPKRNSDKLIARKKDWDPKKYGGFDSPTVAYSVLVVAKVEKGKSKKLKSVKELLGITIMERSSFEKNPIDFLEAKGYKEVKKDLIIKLPKYSLFELENGRKRMLASAGELQKGNELALPSKYVNFLYLASHYEKLKGSPEDNEQKQLFVEQHKHYLDEIIEQISEFSKRVILADANLDKVLSAYNKHRDKPIREQAENIIHLFTLTNLGAPAAFKYFDTTIDRKRYTSTKEVLDATLIHQSITGLYETRIDLSQLGGDGGGSSGSSGSSGGTLNIEDEYRLHETSKGPDVPLGSTWLSDFPQAWAETGGMGLAVRQAPLIIPLKATSTPVSIKQYPMSQEARLGIKPHIQRLLDQGILVPCQSPWNTPLLPVKKPGTNDYRPVQDLREVNKRVEDIHPTVPNPYNLLSGLPPSHQWYTVLDLKDAFFCLRLHPTSQSLFAFEWRDPEMGISGQLTWTRLPQGFKNSPTLFNEALHRDLADFRIQHPDLILLQYVDDLLLAATSELDCQQGTRALLQTLGDLGYRASAKKAQICQKQVKYLGYLLKEGQRWLTEARKETVMGQPTPKTPRQLREFLGTAGFCRLWIPGFAEMAAPLYPLTKPGTLFEWGPDQQKAYQEIKQALLTAPALGLPDLTKPFELFVDEKQGYAKGVLTQKLGPWRRPVAYLSKKLDPVAAGWPPCLRMVAAIAVLTKDAGKLTMGQPLVILAPHAVEALVKQPPDRWLSNARMTHYQALLLDTDRVQFGPIVALNPATLLPLPEEGLQHDCLDILAEAHGTRPDLTDQPLPDADHTWYTDGSSFLQEGQRKAGAAVTTETEVVWAKALPAGTSAQRAELIALTQALKMAEGKKLNVYTDSRYAFATAHIHGEIYRRRGWLTSEGKEIKNKDEILALLKALFLPKRLSIIHCPGHQKGNRAEARGNRMADQAAREVATRETPETSTLLAGKRTADGSEFEKRTADGSEFESPKKKAKVE

SEQ ID NO: 2472 - protein, 2096 aa, synthetic construct
MPAAKRVKLDGGDKKYSIGLDIGTNSVGWAVITDEYKVPSKKFKVLGNTDRHSIKKNLIGALLFDSGETAEATRLKRTARRRYTRRKNRICYLQEIFSNEMAKVDDSFFHRLEESFLVEEDKKHERHPIFGNIVDEVAYHEKYPTIYHLRKKLVDSTDKADLRLIYLALAHMIKFRGHFLIEGDLNPDNSDVDKLFIQLVQTYNQLFEENPINASGVDAKAILSARLSKSRRLENLIAQLPGEKKNGLFGNLIALSLGLTPNFKSNFDLAEDAKLQLSKDTYDDDLDNLLAQIGDQYADLFLAAKNLSDAILLSDILRVNTEITKAPLSASMIKRYDEHHQDLTLLKALVRQQLPEKYKEIFFDQSKNGYAGYIDGGASQEEFYKFIKPILEKMDGTEELLVKLNREDLLRKQRTFDNGSIPHQIHLGELHAILRRQEDFYPFLKDNREKIEKILTFRIPYYVGPLARGNSRFAWMTRKSEETITPWNFEEVVDKGASAQSFIERMTNFDKNLPNEKVLPKHSLLYEYFTVYNELTKVKYVTEGMRKPAFLSGEQKKAIVDLLFKTNRKVTVKQLKEDYFKKIECFDSVEISGVEDRFNASLGTYHDLLKIIKDKDFLDNEENEDILEDIVLTLTLFEDREMIEERLKTYAHLFDDKVMKQLKRRRYTGWGRLSRKLINGIRDKQSGKTILDFLKSDGFANRNFMQLIHDDSLTFKEDIQKAQVSGQGDSLHEHIANLAGSPAIKKGILQTVKVVDELVKVMGRHKPENIVIEMARENQTTQKGQKNSRERMKRIEEGIKELGSQILKEHPVENTQLQNEKLYLYYLQNGRDMYVDQELDINRLSDYDVDHIVPQSFLKDDSIDNKVLTRSDKARGKSDNVPSEEVVKKMKNYWRQLLNAKLITQRKFDNLTKAERGGLSELDKAGFIKRQLVETRQITKHVAQILDSRMNTKYDENDKLIREVKVITLKSKLVSDFRKDFQFYKVREINNYHHAHDAYLNAVVGTALIKKYPKLESEFVYGDYKVYDVRKMIAKSEQEIGKATAKYFFYSNIMNFFKTEITLANGEIRKRPLIETNGETGEIVWDKGRDFATVRKVLSMPQVNIVKKTEVQTGGFSKESILPKRNSDKLIARKKDWDPKKYGGFDSPTVAYSVLVVAKVEKGKSKKLKSVKELLGITIMERSSFEKNPIDFLEAKGYKEVKKDLIIKLPKYSLFELENGRKRMLASAGELQKGNELALPSKYVNFLYLASHYEKLKGSPEDNEQKQLFVEQHKHYLDEIIEQISEFSKRVILADANLDKVLSAYNKHRDKPIREQAENIIHLFTLTNLGAPAAFKYFDTTIDRKRYTSTKEVLDATLIHQSITGLYETRIDLSQLGGDGGGGGPAPEAAAKGGTLNIEDEYRLHETSKGPDVPLGSTWLSDFPQAWAETGGMGLAVRQAPLIIPLKATSTPVSIKQYPMSQEARLGIKPHIQRLLDQGILVPCQSPWNTPLLPVKKPGTNDYRPVQDLREVNKRVEDIHPTVPNPYNLLSGLPPSHQWYTVLDLKDAFFCLRLHPTSQSLFAFEWRDPEMGISGQLTWTRLPQGFKNSPTLFNEALHRDLADFRIQHPDLILLQYVDDLLLAATSELDCQQGTRALLQTLGDLGYRASAKKAQICQKQVKYLGYLLKEGQRWLTEARKETVMGQPTPKTPRQLREFLGTAGFCRLWIPGFAEMAAPLYPLTKPGTLFEWGPDQQKAYQEIKQALLTAPALGLPDLTKPFELFVDEKQGYAKGVLTQKLGPWRRPVAYLSKKLDPVAAGWPPCLRMVAAIAVLTKDAGKLTMGQPLVILAPHAVEALVKQPPDRWLSNARMTHYQALLLDTDRVQFGPIVALNPATLLPLPEEGLQHDCLDILAEAHGTRPDLTDQPLPDADHTWYTDGSSFLQEGQRKAGAAVTTETEVVWAKALPAGTSAQRAELIALTQALKMAEGKKLNVYTDSRYAFATAHIHGEIYRRRGWLTSEGKEIKNKDEILALLKALFLPKRLSIIHCPGHQKGNRAEARGNRMADQAAREVATRETPETSTLLAGKRTADGSEFEKRTADGSEFESPKKKAKVE

SEQ ID NO: 2473 - protein, 2096 aa, synthetic construct
MPAAKRVKLDGGDKKYSIGLDIGTNSVGWAVITDEYKVPSKKFKVLGNTDRHSIKKNLIGALLFDSGETAEATRLKRTARRRYTRRKNRICYLQEIFSNEMAKVDDSFFHRLEESFLVEEDKKHERHPIFGNIVDEVAYHEKYPTIYHLRKKLVDSTDKADLRLIYLALAHMIKFRGHFLIEGDLNPDNSDVDKLFIQLVQTYNQLFEENPINASGVDAKAILSARLSKSRRLENLIAQLPGEKKNGLFGNLIALSLGLTPNFKSNFDLAEDAKLQLSKDTYDDDLDNLLAQIGDQYADLFLAAKNLSDAILLSDILRVNTEITKAPLSASMIKRYDEHHQDLTLLKALVRQQLPEKYKEIFFDQSKNGYAGYIDGGASQEEFYKFIKPILEKMDGTEELLVKLNREDLLRKQRTFDNGSIPHQIHLGELHAILRRQEDFYPFLKDNREKIEKILTFRIPYYVGPLARGNSRFAWMTRKSEETITPWNFEEVVDKGASAQSFIERMTNFDKNLPNEKVLPKHSLLYEYFTVYNELTKVKYVTEGMRKPAFLSGEQKKAIVDLLFKTNRKVTVKQLKEDYFKKIECFDSVEISGVEDRFNASLGTYHDLLKIIKDKDFLDNEENEDILEDIVLTLTLFEDREMIEERLKTYAHLFDDKVMKQLKRRRYTGWGRLSRKLINGIRDKQSGKTILDFLKSDGFANRNFMQLIHDDSLTFKEDIQKAQVSGQGDSLHEHIANLAGSPAIKKGILQTVKVVDELVKVMGRHKPENIVIEMARENQTTQKGQKNSRERMKRIEEGIKELGSQILKEHPVENTQLQNEKLYLYYLQNGRDMYVDQELDINRLSDYDVDHIVPQSFLKDDSIDNKVLTRSDKARGKSDNVPSEEVVKKMKNYWRQLLNAKLITQRKFDNLTKAERGGLSELDKAGFIKRQLVETRQITKHVAQILDSRMNTKYDENDKLIREVKVITLKSKLVSDFRKDFQFYKVREINNYHHAHDAYLNAVVGTALIKKYPKLESEFVYGDYKVYDVRKMIAKSEQEIGKATAKYFFYSNIMNFFKTEITLANGEIRKRPLIETNGETGEIVWDKGRDFATVRKVLSMPQVNIVKKTEVQTGGFSKESILPKRNSDKLIARKKDWDPKKYGGFDSPTVAYSVLVVAKVEKGKSKKLKSVKELLGITIMERSSFEKNPIDFLEAKGYKEVKKDLIIKLPKYSLFELENGRKRMLASAGELQKGNELALPSKYVNFLYLASHYEKLKGSPEDNEQKQLFVEQHKHYLDEIIEQISEFSKRVILADANLDKVLSAYNKHRDKPIREQAENIIHLFTLTNLGAPAAFKYFDTTIDRKRYTSTKEVLDATLIHQSITGLYETRIDLSQLGGDGGEAAAKPAPGSSGGTLNIEDEYRLHETSKGPDVPLGSTWLSDFPQAWAETGGMGLAVRQAPLIIPLKATSTPVSIKQYPMSQEARLGIKPHIQRLLDQGILVPCQSPWNTPLLPVKKPGTNDYRPVQDLREVNKRVEDIHPTVPNPYNLLSGLPPSHQWYTVLDLKDAFFCLRLHPTSQSLFAFEWRDPEMGISGQLTWTRLPQGFKNSPTLFNEALHRDLADFRIQHPDLILLQYVDDLLLAATSELDCQQGTRALLQTLGDLGYRASAKKAQICQKQVKYLGYLLKEGQRWLTEARKETVMGQPTPKTPRQLREFLGTAGFCRLWIPGFAEMAAPLYPLTKPGTLFEWGPDQQKAYQEIKQALLTAPALGLPDLTKPFELFVDEKQGYAKGVLTQKLGPWRRPVAYLSKKLDPVAAGWPPCLRMVAAIAVLTKDAGKLTMGQPLVILAPHAVEALVKQPPDRWLSNARMTHYQALLLDTDRVQFGPIVALNPATLLPLPEEGLQHDCLDILAEAHGTRPDLTDQPLPDADHTWYTDGSSFLQEGQRKAGAAVTTETEVVWAKALPAGTSAQRAELIALTQALKMAEGKKLNVYTDSRYAFATAHIHGEIYRRRGWLTSEGKEIKNKDEILALLKALFLPKRLSIIHCPGHQKGNRAEARGNRMADQAAREVATRETPETSTLLAGKRTADGSEFEKRTADGSEFESPKKKAKVE

SEQ ID NO: 2474 - protein, 2096 aa, synthetic construct
MPAAKRVKLDGGDKKYSIGLDIGTNSVGWAVITDEYKVPSKKFKVLGNTDRHSIKKNLIGALLFDSGETAEATRLKRTARRRYTRRKNRICYLQEIFSNEMAKVDDSFFHRLEESFLVEEDKKHERHPIFGNIVDEVAYHEKYPTIYHLRKKLVDSTDKADLRLIYLALAHMIKFRGHFLIEGDLNPDNSDVDKLFIQLVQTYNQLFEENPINASGVDAKAILSARLSKSRRLENLIAQLPGEKKNGLFGNLIALSLGLTPNFKSNFDLAEDAKLQLSKDTYDDDLDNLLAQIGDQYADLFLAAKNLSDAILLSDILRVNTEITKAPLSASMIKRYDEHHQDLTLLKALVRQQLPEKYKEIFFDQSKNGYAGYIDGGASQEEFYKFIKPILEKMDGTEELLVKLNREDLLRKQRTFDNGSIPHQIHLGELHAILRRQEDFYPFLKDNREKIEKILTFRIPYYVGPLARGNSRFAWMTRKSEETITPWNFEEVVDKGASAQSFIERMTNFDKNLPNEKVLPKHSLLYEYFTVYNELTKVKYVTEGMRKPAFLSGEQKKAIVDLLFKTNRKVTVKQLKEDYFKKIECFDSVEISGVEDRFNASLGTYHDLLKIIKDKDFLDNEENEDILEDIVLTLTLFEDREMIEERLKTYAHLFDDKVMKQLKRRRYTGWGRLSRKLINGIRDKQSGKTILDFLKSDGFANRNFMQLIHDDSLTFKEDIQKAQVSGQGDSLHEHIANLAGSPAIKKGILQTVKVVDELVKVMGRHKPENIVIEMARENQTTQKGQKNSRERMKRIEEGIKELGSQILKEHPVENTQLQNEKLYLYYLQNGRDMYVDQELDINRLSDYDVDHIVPQSFLKDDSIDNKVLTRSDKARGKSDNVPSEEVVKKMKNYWRQLLNAKLITQRKFDNLTKAERGGLSELDKAGFIKRQLVETRQITKHVAQILDSRMNTKYDENDKLIREVKVITLKSKLVSDFRKDFQFYKVREINNYHHAHDAYLNAVVGTALIKKYPKLESEFVYGDYKVYDVRKMIAKSEQEIGKATAKYFFYSNIMNFFKTEITLANGEIRKRPLIETNGETGEIVWDKGRDFATVRKVLSMPQVNIVKKTEVQTGGFSKESILPKRNSDKLIARKKDWDPKKYGGFDSPTVAYSVLVVAKVEKGKSKKLKSVKELLGITIMERSSFEKNPIDFLEAKGYKEVKKDLIIKLPKYSLFELENGRKRMLASAGELQKGNELALPSKYVNFLYLASHYEKLKGSPEDNEQKQLFVEQHKHYLDEIIEQISEFSKRVILADANLDKVLSAYNKHRDKPIREQAENIIHLFTLTNLGAPAAFKYFDTTIDRKRYTSTKEVLDATLIHQSITGLYETRIDLSQLGGDGGEAAAKGGSPAPGGTLNIEDEYRLHETSKGPDVPLGSTWLSDFPQAWAETGGMGLAVRQAPLIIPLKATSTPVSIKQYPMSQEARLGIKPHIQRLLDQGILVPCQSPWNTPLLPVKKPGTNDYRPVQDLREVNKRVEDIHPTVPNPYNLLSGLPPSHQWYTVLDLKDAFFCLRLHPTSQSLFAFEWRDPEMGISGQLTWTRLPQGFKNSPTLFNEALHRDLADFRIQHPDLILLQYVDDLLLAATSELDCQQGTRALLQTLGDLGYRASAKKAQICQKQVKYLGYLLKEGQRWLTEARKETVMGQPTPKTPRQLREFLGTAGFCRLWIPGFAEMAAPLYPLTKPGTLFEWGPDQQKAYQEIKQALLTAPALGLPDLTKPFELFVDEKQGYAKGVLTQKLGPWRRPVAYLSKKLDPVAAGWPPCLRMVAAIAVLTKDAGKLTMGQPLVILAPHAVEALVKQPPDRWLSNARMTHYQALLLDTDRVQFGPIVALNPATLLPLPEEGLQHDCLDILAEAHGTRPDLTDQPLPDADHTWYTDGSSFLQEGQRKAGAAVTTETEVVWAKALPAGTSAQRAELIALTQALKMAEGKKLNVYTDSRYAFATAHIHGEIYRRRGWLTSEGKEIKNKDEILALLKALFLPKRLSIIHCPGHQKGNRAEARGNRMADQAAREVATRETPETSTLLAGKRTADGSEFEKRTADGSEFESPKKKAKVE

SEQ ID NO: 2475 - protein, 2093 aa, synthetic construct
MPAAKRVKLDGGDKKYSIGLDIGTNSVGWAVITDEYKVPSKKFKVLGNTDRHSIKKNLIGALLFDSGETAEATRLKRTARRRYTRRKNRICYLQEIFSNEMAKVDDSFFHRLEESFLVEEDKKHERHPIFGNIVDEVAYHEKYPTIYHLRKKLVDSTDKADLRLIYLALAHMIKFRGHFLIEGDLNPDNSDVDKLFIQLVQTYNQLFEENPINASGVDAKAILSARLSKSRRLENLIAQLPGEKKNGLFGNLIALSLGLTPNFKSNFDLAEDAKLQLSKDTYDDDLDNLLAQIGDQYADLFLAAKNLSDAILLSDILRVNTEITKAPLSASMIKRYDEHHQDLTLLKALVRQQLPEKYKEIFFDQSKNGYAGYIDGGASQEEFYKFIKPILEKMDGTEELLVKLNREDLLRKQRTFDNGSIPHQIHLGELHAILRRQEDFYPFLKDNREKIEKILTFRIPYYVGPLARGNSRFAWMTRKSEETITPWNFEEVVDKGASAQSFIERMTNFDKNLPNEKVLPKHSLLYEYFTVYNELTKVKYVTEGMRKPAFLSGEQKKAIVDLLFKTNRKVTVKQLKEDYFKKIECFDSVEISGVEDRFNASLGTYHDLLKIIKDKDFLDNEENEDILEDIVLTLTLFEDREMIEERLKTYAHLFDDKVMKQLKRRRYTGWGRLSRKLINGIRDKQSGKTILDFLKSDGFANRNFMQLIHDDSLTFKEDIQKAQVSGQGDSLHEHIANLAGSPAIKKGILQTVKVVDELVKVMGRHKPENIVIEMARENQTTQKGQKNSRERMKRIEEGIKELGSQILKEHPVENTQLQNEKLYLYYLQNGRDMYVDQELDINRLSDYDVDHIVPQSFLKDDSIDNKVLTRSDKARGKSDNVPSEEVVKKMKNYWRQLLNAKLITQRKFDNLTKAERGGLSELDKAGFIKRQLVETRQITKHVAQILDSRMNTKYDENDKLIREVKVITLKSKLVSDFRKDFQFYKVREINNYHHAHDAYLNAVVGTALIKKYPKLESEFVYGDYKVYDVRKMIAKSEQEIGKATAKYFFYSNIMNFFKTEITLANGEIRKRPLIETNGETGEIVWDKGRDFATVRKVLSMPQVNIVKKTEVQTGGFSKESILPKRNSDKLIARKKDWDPKKYGGFDSPTVAYSVLVVAKVEKGKSKKLKSVKELLGITIMERSSFEKNPIDFLEAKGYKEVKKDLIIKLPKYSLFELENGRKRMLASAGELQKGNELALPSKYVNFLYLASHYEKLKGSPEDNEQKQLFVEQHKHYLDEIIEQISEFSKRVILADANLDKVLSAYNKHRDKPIREQAENIIHLFTLTNLGAPAAFKYFDTTIDRKRYTSTKEVLDATLIHQSITGLYETRIDLSQLGGDGGGSSEAAAKGGTLNIEDEYRLHETSKGPDVPLGSTWLSDFPQAWAETGGMGLAVRQAPLIIPLKATSTPVSIKQYPMSQEARLGIKPHIQRLLDQGILVPCQSPWNTPLLPVKKPGTNDYRPVQDLREVNKRVEDIHPTVPNPYNLLSGLPPSHQWYTVLDLKDAFFCLRLHPTSQSLFAFEWRDPEMGISGQLTWTRLPQGFKNSPTLFNEALHRDLADFRIQHPDLILLQYVDDLLLAATSELDCQQGTRALLQTLGDLGYRASAKKAQICQKQVKYLGYLLKEGQRWLTEARKETVMGQPTPKTPRQLREFLGTAGFCRLWIPGFAEMAAPLYPLTKPGTLFEWGPDQQKAYQEIKQALLTAPALGLPDLTKPFELFVDEKQGYAKGVLTQKLGPWRRPVAYLSKKLDPVAAGWPPCLRMVAAIAVLTKDAGKLTMGQPLVILAPHAVEALVKQPPDRWLSNARMTHYQALLLDTDRVQFGPIVALNPATLLPLPEEGLQHDCLDILAEAHGTRPDLTDQPLPDADHTWYTDGSSFLQEGQRKAGAAVTTETEVVWAKALPAGTSAQRAELIALTQALKMAEGKKLNVYTDSRYAFATAHIHGEIYRRRGWLTSEGKEIKNKDEILALLKALFLPKRLSIIHCPGHQKGNRAEARGNRMADQAAREVATRETPETSTLLAGKRTADGSEFEKRTADGSEFESPKKKAKVE

SEQ ID NO: 2476 - protein, 2094 aa, synthetic construct
MPAAKRVKLDGGDKKYSIGLDIGTNSVGWAVITDEYKVPSKKFKVLGNTDRHSIKKNLIGALLFDSGETAEATRLKRTARRRYTRRKNRICYLQEIFSNEMAKVDDSFFHRLEESFLVEEDKKHERHPIFGNIVDEVAYHEKYPTIYHLRKKLVDSTDKADLRLIYLALAHMIKFRGHFLIEGDLNPDNSDVDKLFIQLVQTYNQLFEENPINASGVDAKAILSARLSKSRRLENLIAQLPGEKKNGLFGNLIALSLGLTPNFKSNFDLAEDAKLQLSKDTYDDDLDNLLAQIGDQYADLFLAAKNLSDAILLSDILRVNTEITKAPLSASMIKRYDEHHQDLTLLKALVRQQLPEKYKEIFFDQSKNGYAGYIDGGASQEEFYKFIKPILEKMDGTEELLVKLNREDLLRKQRTFDNGSIPHQIHLGELHAILRRQEDFYPFLKDNREKIEKILTFRIPYYVGPLARGNSRFAWMTRKSEETITPWNFEEVVDKGASAQSFIERMTNFDKNLPNEKVLPKHSLLYEYFTVYNELTKVKYVTEGMRKPAFLSGEQKKAIVDLLFKTNRKVTVKQLKEDYFKKIECFDSVEISGVEDRFNASLGTYHDLLKIIKDKDFLDNEENEDILEDIVLTLTLFEDREMIEERLKTYAHLFDDKVMKQLKRRRYTGWGRLSRKLINGIRDKQSGKTILDFLKSDGFANRNFMQLIHDDSLTFKEDIQKAQVSGQGDSLHEHIANLAGSPAIKKGILQTVKVVDELVKVMGRHKPENIVIEMARENQTTQKGQKNSRERMKRIEEGIKELGSQILKEHPVENTQLQNEKLYLYYLQNGRDMYVDQELDINRLSDYDVDHIVPQSFLKDDSIDNKVLTRSDKARGKSDNVPSEEVVKKMKNYWRQLLNAKLITQRKFDNLTKAERGGLSELDKAGFIKRQLVETRQITKHVAQILDSRMNTKYDENDKLIREVKVITLKSKLVSDFRKDFQFYKVREINNYHHAHDAYLNAVVGTALIKKYPKLESEFVYGDYKVYDVRKMIAKSEQEIGKATAKYFFYSNIMNFFKTEITLANGEIRKRPLIETNGETGEIVWDKGRDFATVRKVLSMPQVNIVKKTEVQTGGFSKESILPKRNSDKLIARKKDWDPKKYGGFDSPTVAYSVLVVAKVEKGKSKKLKSVKELLGITIMERSSFEKNPIDFLEAKGYKEVKKDLIIKLPKYSLFELENGRKRMLASAGELQKGNELALPSKYVNFLYLASHYEKLKGSPEDNEQKQLFVEQHKHYLDEIIEQISEFSKRVILADANLDKVLSAYNKHRDKPIREQAENIIHLFTLTNLGAPAAFKYFDTTIDRKRYTSTKEVLDATLIHQSITGLYETRIDLSQLGGDGGGGSPAPGGGGGTLNIEDEYRLHETSKGPDVPLGSTWLSDFPQAWAETGGMGLAVRQAPLIIPLKATSTPVSIKQYPMSQEARLGIKPHIQRLLDQGILVPCQSPWNTPLLPVKKPGTNDYRPVQDLREVNKRVEDIHPTVPNPYNLLSGLPPSHQWYTVLDLKDAFFCLRLHPTSQSLFAFEWRDPEMGISGQLTWTRLPQGFKNSPTLFNEALHRDLADFRIQHPDLILLQYVDDLLLAATSELDCQQGTRALLQTLGDLGYRASAKKAQICQKQVKYLGYLLKEGQRWLTEARKETVMGQPTPKTPRQLREFLGTAGFCRLWIPGFAEMAAPLYPLTKPGTLFEWGPDQQKAYQEIKQALLTAPALGLPDLTKPFELFVDEKQGYAKGVLTQKLGPWRRPVAYLSKKLDPVAAGWPPCLRMVAAIAVLTKDAGKLTMGQPLVILAPHAVEALVKQPPDRWLSNARMTHYQALLLDTDRVQFGPIVALNPATLLPLPEEGLQHDCLDILAEAHGTRPDLTDQPLPDADHTWYTDGSSFLQEGQRKAGAAVTTETEVVWAKALPAGTSAQRAELIALTQALKMAEGKKLNVYTDSRYAFATAHIHGEIYRRRGWLTSEGKEIKNKDEILALLKALFLPKRLSIIHCPGHQKGNRAEARGNRMADQAAREVATRETPETSTLLAGKRTADGSEFEKRTADGSEFESPKKKAKVE

SEQ ID NO: 2477 - protein, 2091 aa, synthetic construct
MPAAKRVKLDGGDKKYSIGLDIGTNSVGWAVITDEYKVPSKKFKVLGNTDRHSIKKNLIGALLFDSGETAEATRLKRTARRRYTRRKNRICYLQEIFSNEMAKVDDSFFHRLEESFLVEEDKKHERHPIFGNIVDEVAYHEKYPTIYHLRKKLVDSTDKADLRLIYLALAHMIKFRGHFLIEGDLNPDNSDVDKLFIQLVQTYNQLFEENPINASGVDAKAILSARLSKSRRLENLIAQLPGEKKNGLFGNLIALSLGLTPNFKSNFDLAEDAKLQLSKDTYDDDLDNLLAQIGDQYADLFLAAKNLSDAILLSDILRVNTEITKAPLSASMIKRYDEHHQDLTLLKALVRQQLPEKYKEIFFDQSKNGYAGYIDGGASQEEFYKFIKPILEKMDGTEELLVKLNREDLLRKQRTFDNGSIPHQIHLGELHAILRRQEDFYPFLKDNREKIEKILTFRIPYYVGPLARGNSRFAWMTRKSEETITPWNFEEVVDKGASAQSFIERMTNFDKNLPNEKVLPKHSLLYEYFTVYNELTKVKYVTEGMRKPAFLSGEQKKAIVDLLFKTNRKVTVKQLKEDYFKKIECFDSVEISGVEDRFNASLGTYHDLLKIIKDKDFLDNEENEDILEDIVLTLTLFEDREMIEERLKTYAHLFDDKVMKQLKRRRYTGWGRLSRKLINGIRDKQSGKTILDFLKSDGFANRNFMQLIHDDSLTFKEDIQKAQVSGQGDSLHEHIANLAGSPAIKKGILQTVKVVDELVKVMGRHKPENIVIEMARENQTTQKGQKNSRERMKRIEEGIKELGSQILKEHPVENTQLQNEKLYLYYLQNGRDMYVDQELDINRLSDYDVDHIVPQSFLKDDSIDNKVLTRSDKARGKSDNVPSEEVVKKMKNYWRQLLNAKLITQRKFDNLTKAERGGLSELDKAGFIKRQLVETRQITKHVAQILDSRMNTKYDENDKLIREVKVITLKSKLVSDFRKDFQFYKVREINNYHHAHDAYLNAVVGTALIKKYPKLESEFVYGDYKVYDVRKMIAKSEQEIGKATAKYFFYSNIMNFFKTEITLANGEIRKRPLIETNGETGEIVWDKGRDFATVRKVLSMPQVNIVKKTEVQTGGFSKESILPKRNSDKLIARKKDWDPKKYGGFDSPTVAYSVLVVAKVEKGKSKKLKSVKELLGITIMERSSFEKNPIDFLEAKGYKEVKKDLIIKLPKYSLFELENGRKRMLASAGELQKGNELALPSKYVNFLYLASHYEKLKGSPEDNEQKQLFVEQHKHYLDEIIEQISEFSKRVILADANLDKVLSAYNKHRDKPIREQAENIIHLFTLTNLGAPAAFKYFDTTIDRKRYTSTKEVLDATLIHQSITGLYETRIDLSQLGGDGGGSSPAPGGTLNIEDEYRLHETSKGPDVPLGSTWLSDFPQAWAETGGMGLAVRQAPLIIPLKATSTPVSIKQYPMSQEARLGIKPHIQRLLDQGILVPCQSPWNTPLLPVKKPGTNDYRPVQDLREVNKRVEDIHPTVPNPYNLLSGLPPSHQWYTVLDLKDAFFCLRLHPTSQSLFAFEWRDPEMGISGQLTWTRLPQGFKNSPTLFNEALHRDLADFRIQHPDLILLQYVDDLLLAATSELDCQQGTRALLQTLGDLGYRASAKKAQICQKQVKYLGYLLKEGQRWLTEARKETVMGQPTPKTPRQLREFLGTAGFCRLWIPGFAEMAAPLYPLTKPGTLFEWGPDQQKAYQEIKQALLTAPALGLPDLTKPFELFVDEKQGYAKGVLTQKLGPWRRPVAYLSKKLDPVAAGWPPCLRMVAAIAVLTKDAGKLTMGQPLVILAPHAVEALVKQPPDRWLSNARMTHYQALLLDTDRVQFGPIVALNPATLLPLPEEGLQHDCLDILAEAHGTRPDLTDQPLPDADHTWYTDGSSFLQEGQRKAGAAVTTETEVVWAKALPAGTSAQRAELIALTQALKMAEGKKLNVYTDSRYAFATAHIHGEIYRRRGWLTSEGKEIKNKDEILALLKALFLPKRLSIIHCPGHQKGNRAEARGNRMADQAAREVATRETPETSTLLAGKRTADGSEFEKRTADGSEFESPKKKAKVE

SEQ ID NO: 2478 - protein, 2091 aa, synthetic construct
MPAAKRVKLDGGDKKYSIGLDIGTNSVGWAVITDEYKVPSKKFKVLGNTDRHSIKKNLIGALLFDSGETAEATRLKRTARRRYTRRKNRICYLQEIFSNEMAKVDDSFFHRLEESFLVEEDKKHERHPIFGNIVDEVAYHEKYPTIYHLRKKLVDSTDKADLRLIYLALAHMIKFRGHFLIEGDLNPDNSDVDKLFIQLVQTYNQLFEENPINASGVDAKAILSARLSKSRRLENLIAQLPGEKKNGLFGNLIALSLGLTPNFKSNFDLAEDAKLQLSKDTYDDDLDNLLAQIGDQYADLFLAAKNLSDAILLSDILRVNTEITKAPLSASMIKRYDEHHQDLTLLKALVRQQLPEKYKEIFFDQSKNGYAGYIDGGASQEEFYKFIKPILEKMDGTEELLVKLNREDLLRKQRTFDNGSIPHQIHLGELHAILRRQEDFYPFLKDNREKIEKILTFRIPYYVGPLARGNSRFAWMTRKSEETITPWNFEEVVDKGASAQSFIERMTNFDKNLPNEKVLPKHSLLYEYFTVYNELTKVKYVTEGMRKPAFLSGEQKKAIVDLLFKTNRKVTVKQLKEDYFKKIECFDSVEISGVEDRFNASLGTYHDLLKIIKDKDFLDNEENEDILEDIVLTLTLFEDREMIEERLKTYAHLFDDKVMKQLKRRRYTGWGRLSRKLINGIRDKQSGKTILDFLKSDGFANRNFMQLIHDDSLTFKEDIQKAQVSGQGDSLHEHIANLAGSPAIKKGILQTVKVVDELVKVMGRHKPENIVIEMARENQTTQKGQKNSRERMKRIEEGIKELGSQILKEHPVENTQLQNEKLYLYYLQNGRDMYVDQELDINRLSDYDVDHIVPQSFLKDDSIDNKVLTRSDKARGKSDNVPSEEVVKKMKNYWRQLLNAKLITQRKFDNLTKAERGGLSELDKAGFIKRQLVETRQITKHVAQILDSRMNTKYDENDKLIREVKVITLKSKLVSDFRKDFQFYKVREINNYHHAHDAYLNAVVGTALIKKYPKLESEFVYGDYKVYDVRKMIAKSEQEIGKATAKYFFYSNIMNFFKTEITLANGEIRKRPLIETNGETGEIVWDKGRDFATVRKVLSMPQVNIVKKTEVQTGGFSKESILPKRNSDKLIARKKDWDPKKYGGFDSPTVAYSVLVVAKVEKGKSKKLKSVKELLGITIMERSSFEKNPIDFLEAKGYKEVKKDLIIKLPKYSLFELENGRKRMLASAGELQKGNELALPSKYVNFLYLASHYEKLKGSPEDNEQKQLFVEQHKHYLDEIIEQISEFSKRVILADANLDKVLSAYNKHRDKPIREQAENIIHLFTLTNLGAPAAFKYFDTTIDRKRYTSTKEVLDATLIHQSITGLYETRIDLSQLGGDGGGGSGGGGGTLNIEDEYRLHETSKGPDVPLGSTWLSDFPQAWAETGGMGLAVRQAPLIIPLKATSTPVSIKQYPMSQEARLGIKPHIQRLLDQGILVPCQSPWNTPLLPVKKPGTNDYRPVQDLREVNKRVEDIHPTVPNPYNLLSGLPPSHQWYTVLDLKDAFFCLRLHPTSQSLFAFEWRDPEMGISGQLTWTRLPQGFKNSPTLFNEALHRDLADFRIQHPDLILLQYVDDLLLAATSELDCQQGTRALLQTLGDLGYRASAKKAQICQKQVKYLGYLLKEGQRWLTEARKETVMGQPTPKTPRQLREFLGTAGFCRLWIPGFAEMAAPLYPLTKPGTLFEWGPDQQKAYQEIKQALLTAPALGLPDLTKPFELFVDEKQGYAKGVLTQKLGPWRRPVAYLSKKLDPVAAGWPPCLRMVAAIAVLTKDAGKLTMGQPLVILAPHAVEALVKQPPDRWLSNARMTHYQALLLDTDRVQFGPIVALNPATLLPLPEEGLQHDCLDILAEAHGTRPDLTDQPLPDADHTWYTDGSSFLQEGQRKAGAAVTTETEVVWAKALPAGTSAQRAELIALTQALKMAEGKKLNVYTDSRYAFATAHIHGEIYRRRGWLTSEGKEIKNKDEILALLKALFLPKRLSIIHCPGHQKGNRAEARGNRMADQAAREVATRETPETSTLLAGKRTADGSEFEKRTADGSEFESPKKKAKVE

SEQ ID NO: 2479 - protein, 2094 aa, synthetic construct
MPAAKRVKLDGGDKKYSIGLDIGTNSVGWAVITDEYKVPSKKFKVLGNTDRHSIKKNLIGALLFDSGETAEATRLKRTARRRYTRRKNRICYLQEIFSNEMAKVDDSFFHRLEESFLVEEDKKHERHPIFGNIVDEVAYHEKYPTIYHLRKKLVDSTDKADLRLIYLALAHMIKFRGHFLIEGDLNPDNSDVDKLFIQLVQTYNQLFEENPINASGVDAKAILSARLSKSRRLENLIAQLPGEKKNGLFGNLIALSLGLTPNFKSNFDLAEDAKLQLSKDTYDDDLDNLLAQIGDQYADLFLAAKNLSDAILLSDILRVNTEITKAPLSASMIKRYDEHHQDLTLLKALVRQQLPEKYKEIFFDQSKNGYAGYIDGGASQEEFYKFIKPILEKMDGTEELLVKLNREDLLRKQRTFDNGSIPHQIHLGELHAILRRQEDFYPFLKDNREKIEKILTFRIPYYVGPLARGNSRFAWMTRKSEETITPWNFEEVVDKGASAQSFIERMTNFDKNLPNEKVLPKHSLLYEYFTVYNELTKVKYVTEGMRKPAFLSGEQKKAIVDLLFKTNRKVTVKQLKEDYFKKIECFDSVEISGVEDRFNASLGTYHDLLKIIKDKDFLDNEENEDILEDIVLTLTLFEDREMIEERLKTYAHLFDDKVMKQLKRRRYTGWGRLSRKLINGIRDKQSGKTILDFLKSDGFANRNFMQLIHDDSLTFKEDIQKAQVSGQGDSLHEHIANLAGSPAIKKGILQTVKVVDELVKVMGRHKPENIVIEMARENQTTQKGQKNSRERMKRIEEGIKELGSQILKEHPVENTQLQNEKLYLYYLQNGRDMYVDQELDINRLSDYDVDHIVPQSFLKDDSIDNKVLTRSDKARGKSDNVPSEEVVKKMKNYWRQLLNAKLITQRKFDNLTKAERGGLSELDKAGFIKRQLVETRQITKHVAQILDSRMNTKYDENDKLIREVKVITLKSKLVSDFRKDFQFYKVREINNYHHAHDAYLNAVVGTALIKKYPKLESEFVYGDYKVYDVRKMIAKSEQEIGKATAKYFFYSNIMNFFKTEITLANGEIRKRPLIETNGETGEIVWDKGRDFATVRKVLSMPQVNIVKKTEVQTGGFSKESILPKRNSDKLIARKKDWDPKKYGGFDSPTVAYSVLVVAKVEKGKSKKLKSVKELLGITIMERSSFEKNPIDFLEAKGYKEVKKDLIIKLPKYSLFELENGRKRMLASAGELQKGNELALPSKYVNFLYLASHYEKLKGSPEDNEQKQLFVEQHKHYLDEIIEQISEFSKRVILADANLDKVLSAYNKHRDKPIREQAENIIHLFTLTNLGAPAAFKYFDTTIDRKRYTSTKEVLDATLIHQSITGLYETRIDLSQLGGDGGGGSGGGGSSGGTLNIEDEYRLHETSKGPDVPLGSTWLSDFPQAWAETGGMGLAVRQAPLIIPLKATSTPVSIKQYPMSQEARLGIKPHIQRLLDQGILVPCQSPWNTPLLPVKKPGTNDYRPVQDLREVNKRVEDIHPTVPNPYNLLSGLPPSHQWYTVLDLKDAFFCLRLHPTSQSLFAFEWRDPEMGISGQLTWTRLPQGFKNSPTLFNEALHRDLADFRIQHPDLILLQYVDDLLLAATSELDCQQGTRALLQTLGDLGYRASAKKAQICQKQVKYLGYLLKEGQRWLTEARKETVMGQPTPKTPRQLREFLGTAGFCRLWIPGFAEMAAPLYPLTKPGTLFEWGPDQQKAYQEIKQALLTAPALGLPDLTKPFELFVDEKQGYAKGVLTQKLGPWRRPVAYLSKKLDPVAAGWPPCLRMVAAIAVLTKDAGKLTMGQPLVILAPHAVEALVKQPPDRWLSNARMTHYQALLLDTDRVQFGPIVALNPATLLPLPEEGLQHDCLDILAEAHGTRPDLTDQPLPDADHTWYTDGSSFLQEGQRKAGAAVTTETEVVWAKALPAGTSAQRAELIALTQALKMAEGKKLNVYTDSRYAFATAHIHGEIYRRRGWLTSEGKEIKNKDEILALLKALFLPKRLSIIHCPGHQKGNRAEARGNRMADQAAREVATRETPETSTLLAGKRTADGSEFEKRTADGSEFESPKKKAKVE

SEQ ID NO: 2480 - protein, 2096 aa, synthetic construct
MPAAKRVKLDGGDKKYSIGLDIGTNSVGWAVITDEYKVPSKKFKVLGNTDRHSIKKNLIGALLFDSGETAEATRLKRTARRRYTRRKNRICYLQEIFSNEMAKVDDSFFHRLEESFLVEEDKKHERHPIFGNIVDEVAYHEKYPTIYHLRKKLVDSTDKADLRLIYLALAHMIKFRGHFLIEGDLNPDNSDVDKLFIQLVQTYNQLFEENPINASGVDAKAILSARLSKSRRLENLIAQLPGEKKNGLFGNLIALSLGLTPNFKSNFDLAEDAKLQLSKDTYDDDLDNLLAQIGDQYADLFLAAKNLSDAILLSDILRVNTEITKAPLSASMIKRYDEHHQDLTLLKALVRQQLPEKYKEIFFDQSKNGYAGYIDGGASQEEFYKFIKPILEKMDGTEELLVKLNREDLLRKQRTFDNGSIPHQIHLGELHAILRRQEDFYPFLKDNREKIEKILTFRIPYYVGPLARGNSRFAWMTRKSEETITPWNFEEVVDKGASAQSFIERMTNFDKNLPNEKVLPKHSLLYEYFTVYNELTKVKYVTEGMRKPAFLSGEQKKAIVDLLFKTNRKVTVKQLKEDYFKKIECFDSVEISGVEDRFNASLGTYHDLLKIIKDKDFLDNEENEDILEDIVLTLTLFEDREMIEERLKTYAHLFDDKVMKQLKRRRYTGWGRLSRKLINGIRDKQSGKTILDFLKSDGFANRNFMQLIHDDSLTFKEDIQKAQVSGQGDSLHEHIANLAGSPAIKKGILQTVKVVDELVKVMGRHKPENIVIEMARENQTTQKGQKNSRERMKRIEEGIKELGSQILKEHPVENTQLQNEKLYLYYLQNGRDMYVDQELDINRLSDYDVDHIVPQSFLKDDSIDNKVLTRSDKARGKSDNVPSEEVVKKMKNYWRQLLNAKLITQRKFDNLTKAERGGLSELDKAGFIKRQLVETRQITKHVAQILDSRMNTKYDENDKLIREVKVITLKSKLVSDFRKDFQFYKVREINNYHHAHDAYLNAVVGTALIKKYPKLESEFVYGDYKVYDVRKMIAKSEQEIGKATAKYFFYSNIMNFFKTEITLANGEIRKRPLIETNGETGEIVWDKGRDFATVRKVLSMPQVNIVKKTEVQTGGFSKESILPKRNSDKLIARKKDWDPKKYGGFDSPTVAYSVLVVAKVEKGKSKKLKSVKELLGITIMERSSFEKNPIDFLEAKGYKEVKKDLIIKLPKYSLFELENGRKRMLASAGELQKGNELALPSKYVNFLYLASHYEKLKGSPEDNEQKQLFVEQHKHYLDEIIEQISEFSKRVILADANLDKVLSAYNKHRDKPIREQAENIIHLFTLTNLGAPAAFKYFDTTIDRKRYTSTKEVLDATLIHQSITGLYETRIDLSQLGGDGGGSSPAPEAAAKGGTLNIEDEYRLHETSKGPDVPLGSTWLSDFPQAWAETGGMGLAVRQAPLIIPLKATSTPVSIKQYPMSQEARLGIKPHIQRLLDQGILVPCQSPWNTPLLPVKKPGTNDYRPVQDLREVNKRVEDIHPTVPNPYNLLSGLPPSHQWYTVLDLKDAFFCLRLHPTSQSLFAFEWRDPEMGISGQLTWTRLPQGFKNSPTLFNEALHRDLADFRIQHPDLILLQYVDDLLLAATSELDCQQGTRALLQTLGDLGYRASAKKAQICQKQVKYLGYLLKEGQRWLTEARKETVMGQPTPKTPRQLREFLGTAGFCRLWIPGFAEMAAPLYPLTKPGTLFEWGPDQQKAYQEIKQALLTAPALGLPDLTKPFELFVDEKQGYAKGVLTQKLGPWRRPVAYLSKKLDPVAAGWPPCLRMVAAIAVLTKDAGKLTMGQPLVILAPHAVEALVKQPPDRWLSNARMTHYQALLLDTDRVQFGPIVALNPATLLPLPEEGLQHDCLDILAEAHGTRPDLTDQPLPDADHTWYTDGSSFLQEGQRKAGAAVTTETEVVWAKALPAGTSAQRAELIALTQALKMAEGKKLNVYTDSRYAFATAHIHGEIYRRRGWLTSEGKEIKNKDEILALLKALFLPKRLSIIHCPGHQKGNRAEARGNRMADQAAREVATRETPETSTLLAGKRTADGSEFEKRTADGSEFESPKKKAKVE

SEQ ID NO: 2481 - protein, 2091 aa, synthetic construct
MPAAKRVKLDGGDKKYSIGLDIGTNSVGWAVITDEYKVPSKKFKVLGNTDRHSIKKNLIGALLFDSGETAEATRLKRTARRRYTRRKNRICYLQEIFSNEMAKVDDSFFHRLEESFLVEEDKKHERHPIFGNIVDEVAYHEKYPTIYHLRKKLVDSTDKADLRLIYLALAHMIKFRGHFLIEGDLNPDNSDVDKLFIQLVQTYNQLFEENPINASGVDAKAILSARLSKSRRLENLIAQLPGEKKNGLFGNLIALSLGLTPNFKSNFDLAEDAKLQLSKDTYDDDLDNLLAQIGDQYADLFLAAKNLSDAILLSDILRVNTEITKAPLSASMIKRYDEHHQDLTLLKALVRQQLPEKYKEIFFDQSKNGYAGYIDGGASQEEFYKFIKPILEKMDGTEELLVKLNREDLLRKQRTFDNGSIPHQIHLGELHAILRRQEDFYPFLKDNREKIEKILTFRIPYYVGPLARGNSRFAWMTRKSEETITPWNFEEVVDKGASAQSFIERMTNFDKNLPNEKVLPKHSLLYEYFTVYNELTKVKYVTEGMRKPAFLSGEQKKAIVDLLFKTNRKVTVKQLKEDYFKKIECFDSVEISGVEDRFNASLGTYHDLLKIIKDKDFLDNEENEDILEDIVLTLTLFEDREMIEERLKTYAHLFDDKVMKQLKRRRYTGWGRLSRKLINGIRDKQSGKTILDFLKSDGFANRNFMQLIHDDSLTFKEDIQKAQVSGQGDSLHEHIANLAGSPAIKKGILQTVKVVDELVKVMGRHKPENIVIEMARENQTTQKGQKNSRERMKRIEEGIKELGSQILKEHPVENTQLQNEKLYLYYLQNGRDMYVDQELDINRLSDYDVDHIVPQSFLKDDSIDNKVLTRSDKARGKSDNVPSEEVVKKMKNYWRQLLNAKLITQRKFDNLTKAERGGLSELDKAGFIKRQLVETRQITKHVAQILDSRMNTKYDENDKLIREVKVITLKSKLVSDFRKDFQFYKVREINNYHHAHDAYLNAVVGTALIKKYPKLESEFVYGDYKVYDVRKMIAKSEQEIGKATAKYFFYSNIMNFFKTEITLANGEIRKRPLIETNGETGEIVWDKGRDFATVRKVLSMPQVNIVKKTEVQTGGFSKESILPKRNSDKLIARKKDWDPKKYGGFDSPTVAYSVLVVAKVEKGKSKKLKSVKELLGITIMERSSFEKNPIDFLEAKGYKEVKKDLIIKLPKYSLFELENGRKRMLASAGELQKGNELALPSKYVNFLYLASHYEKLKGSPEDNEQKQLFVEQHKHYLDEIIEQISEFSKRVILADANLDKVLSAYNKHRDKPIREQAENIIHLFTLTNLGAPAAFKYFDTTIDRKRYTSTKEVLDATLIHQSITGLYETRIDLSQLGGDGGGGSPAPGGTLNIEDEYRLHETSKGPDVPLGSTWLSDFPQAWAETGGMGLAVRQAPLIIPLKATSTPVSIKQYPMSQEARLGIKPHIQRLLDQGILVPCQSPWNTPLLPVKKPGTNDYRPVQDLREVNKRVEDIHPTVPNPYNLLSGLPPSHQWYTVLDLKDAFFCLRLHPTSQSLFAFEWRDPEMGISGQLTWTRLPQGFKNSPTLFNEALHRDLADFRIQHPDLILLQYVDDLLLAATSELDCQQGTRALLQTLGDLGYRASAKKAQICQKQVKYLGYLLKEGQRWLTEARKETVMGQPTPKTPRQLREFLGTAGFCRLWIPGFAEMAAPLYPLTKPGTLFEWGPDQQKAYQEIKQALLTAPALGLPDLTKPFELFVDEKQGYAKGVLTQKLGPWRRPVAYLSKKLDPVAAGWPPCLRMVAAIAVLTKDAGKLTMGQPLVILAPHAVEALVKQPPDRWLSNARMTHYQALLLDTDRVQFGPIVALNPATLLPLPEEGLQHDCLDILAEAHGTRPDLTDQPLPDADHTWYTDGSSFLQEGQRKAGAAVTTETEVVWAKALPAGTSAQRAELIALTQALKMAEGKKLNVYTDSRYAFATAHIHGEIYRRRGWLTSEGKEIKNKDEILALLKALFLPKRLSIIHCPGHQKGNRAEARGNRMADQAAREVATRETPETSTLLAGKRTADGSEFEKRTADGSEFESPKKKAKVE

SEQ ID NO: 2482 - protein, 2090 aa, synthetic construct
MPAAKRVKLDGGDKKYSIGLDIGTNSVGWAVITDEYKVPSKKFKVLGNTDRHSIKKNLIGALLFDSGETAEATRLKRTARRRYTRRKNRICYLQEIFSNEMAKVDDSFFHRLEESFLVEEDKKHERHPIFGNIVDEVAYHEKYPTIYHLRKKLVDSTDKADLRLIYLALAHMIKFRGHFLIEGDLNPDNSDVDKLFIQLVQTYNQLFEENPINASGVDAKAILSARLSKSRRLENLIAQLPGEKKNGLFGNLIALSLGLTPNFKSNFDLAEDAKLQLSKDTYDDDLDNLLAQIGDQYADLFLAAKNLSDAILLSDILRVNTEITKAPLSASMIKRYDEHHQDLTLLKALVRQQLPEKYKEIFFDQSKNGYAGYIDGGASQEEFYKFIKPILEKMDGTEELLVKLNREDLLRKQRTFDNGSIPHQIHLGELHAILRRQEDFYPFLKDNREKIEKILTFRIPYYVGPLARGNSRFAWMTRKSEETITPWNFEEVVDKGASAQSFIERMTNFDKNLPNEKVLPKHSLLYEYFTVYNELTKVKYVTEGMRKPAFLSGEQKKAIVDLLFKTNRKVTVKQLKEDYFKKIECFDSVEISGVEDRFNASLGTYHDLLKIIKDKDFLDNEENEDILEDIVLTLTLFEDREMIEERLKTYAHLFDDKVMKQLKRRRYTGWGRLSRKLINGIRDKQSGKTILDFLKSDGFANRNFMQLIHDDSLTFKEDIQKAQVSGQGDSLHEHIANLAGSPAIKKGILQTVKVVDELVKVMGRHKPENIVIEMARENQTTQKGQKNSRERMKRIEEGIKELGSQILKEHPVENTQLQNEKLYLYYLQNGRDMYVDQELDINRLSDYDVDHIVPQSFLKDDSIDNKVLTRSDKARGKSDNVPSEEVVKKMKNYWRQLLNAKLITQRKFDNLTKAERGGLSELDKAGFIKRQLVETRQITKHVAQILDSRMNTKYDENDKLIREVKVITLKSKLVSDFRKDFQFYKVREINNYHHAHDAYLNAVVGTALIKKYPKLESEFVYGDYKVYDVRKMIAKSEQEIGKATAKYFFYSNIMNFFKTEITLANGEIRKRPLIETNGETGEIVWDKGRDFATVRKVLSMPQVNIVKKTEVQTGGFSKESILPKRNSDKLIARKKDWDPKKYGGFDSPTVAYSVLVVAKVEKGKSKKLKSVKELLGITIMERSSFEKNPIDFLEAKGYKEVKKDLIIKLPKYSLFELENGRKRMLASAGELQKGNELALPSKYVNFLYLASHYEKLKGSPEDNEQKQLFVEQHKHYLDEIIEQISEFSKRVILADANLDKVLSAYNKHRDKPIREQAENIIHLFTLTNLGAPAAFKYFDTTIDRKRYTSTKEVLDATLIHQSITGLYETRIDLSQLGGDGGGGGGSGGTLNIEDEYRLHETSKGPDVPLGSTWLSDFPQAWAETGGMGLAVRQAPLIIPLKATSTPVSIKQYPMSQEARLGIKPHIQRLLDQGILVPCQSPWNTPLLPVKKPGTNDYRPVQDLREVNKRVEDIHPTVPNPYNLLSGLPPSHQWYTVLDLKDAFFCLRLHPTSQSLFAFEWRDPEMGISGQLTWTRLPQGFKNSPTLFNEALHRDLADFRIQHPDLILLQYVDDLLLAATSELDCQQGTRALLQTLGDLGYRASAKKAQICQKQVKYLGYLLKEGQRWLTEARKETVMGQPTPKTPRQLREFLGTAGFCRLWIPGFAEMAAPLYPLTKPGTLFEWGPDQQKAYQEIKQALLTAPALGLPDLTKPFELFVDEKQGYAKGVLTQKLGPWRRPVAYLSKKLDPVAAGWPPCLRMVAAIAVLTKDAGKLTMGQPLVILAPHAVEALVKQPPDRWLSNARMTHYQALLLDTDRVQFGPIVALNPATLLPLPEEGLQHDCLDILAEAHGTRPDLTDQPLPDADHTWYTDGSSFLQEGQRKAGAAVTTETEVVWAKALPAGTSAQRAELIALTQALKMAEGKKLNVYTDSRYAFATAHIHGEIYRRRGWLTSEGKEIKNKDEILALLKALFLPKRLSIIHCPGHQKGNRAEARGNRMADQAAREVATRETPETSTLLAGKRTADGSEFEKRTADGSEFESPKKKAKVE

SEQ ID NO: 2483 - protein, 2096 aa, synthetic construct
MPAAKRVKLDGGDKKYSIGLDIGTNSVGWAVITDEYKVPSKKFKVLGNTDRHSIKKNLIGALLFDSGETAEATRLKRTARRRYTRRKNRICYLQEIFSNEMAKVDDSFFHRLEESFLVEEDKKHERHPIFGNIVDEVAYHEKYPTIYHLRKKLVDSTDKADLRLIYLALAHMIKFRGHFLIEGDLNPDNSDVDKLFIQLVQTYNQLFEENPINASGVDAKAILSARLSKSRRLENLIAQLPGEKKNGLFGNLIALSLGLTPNFKSNFDLAEDAKLQLSKDTYDDDLDNLLAQIGDQYADLFLAAKNLSDAILLSDILRVNTEITKAPLSASMIKRYDEHHQDLTLLKALVRQQLPEKYKEIFFDQSKNGYAGYIDGGASQEEFYKFIKPILEKMDGTEELLVKLNREDLLRKQRTFDNGSIPHQIHLGELHAILRRQEDFYPFLKDNREKIEKILTFRIPYYVGPLARGNSRFAWMTRKSEETITPWNFEEVVDKGASAQSFIERMTNFDKNLPNEKVLPKHSLLYEYFTVYNELTKVKYVTEGMRKPAFLSGEQKKAIVDLLFKTNRKVTVKQLKEDYFKKIECFDSVEISGVEDRFNASLGTYHDLLKIIKDKDFLDNEENEDILEDIVLTLTLFEDREMIEERLKTYAHLFDDKVMKQLKRRRYTGWGRLSRKLINGIRDKQSGKTILDFLKSDGFANRNFMQLIHDDSLTFKEDIQKAQVSGQGDSLHEHIANLAGSPAIKKGILQTVKVVDELVKVMGRHKPENIVIEMARENQTTQKGQKNSRERMKRIEEGIKELGSQILKEHPVENTQLQNEKLYLYYLQNGRDMYVDQELDINRLSDYDVDHIVPQSFLKDDSIDNKVLTRSDKARGKSDNVPSEEVVKKMKNYWRQLLNAKLITQRKFDNLTKAERGGLSELDKAGFIKRQLVETRQITKHVAQILDSRMNTKYDENDKLIREVKVITLKSKLVSDFRKDFQFYKVREINNYHHAHDAYLNAVVGTALIKKYPKLESEFVYGDYKVYDVRKMIAKSEQEIGKATAKYFFYSNIMNFFKTEITLANGEIRKRPLIETNGETGEIVWDKGRDFATVRKVLSMPQVNIVKKTEVQTGGFSKESILPKRNSDKLIARKKDWDPKKYGGFDSPTVAYSVLVVAKVEKGKSKKLKSVKELLGITIMERSSFEKNPIDFLEAKGYKEVKKDLIIKLPKYSLFELENGRKRMLASAGELQKGNELALPSKYVNFLYLASHYEKLKGSPEDNEQKQLFVEQHKHYLDEIIEQISEFSKRVILADANLDKVLSAYNKHRDKPIREQAENIIHLFTLTNLGAPAAFKYFDTTIDRKRYTSTKEVLDATLIHQSITGLYETRIDLSQLGGDGGEAAAKGGGGGSGGTLNIEDEYRLHETSKGPDVPLGSTWLSDFPQAWAETGGMGLAVRQAPLIIPLKATSTPVSIKQYPMSQEARLGIKPHIQRLLDQGILVPCQSPWNTPLLPVKKPGTNDYRPVQDLREVNKRVEDIHPTVPNPYNLLSGLPPSHQWYTVLDLKDAFFCLRLHPTSQSLFAFEWRDPEMGISGQLTWTRLPQGFKNSPTLFNEALHRDLADFRIQHPDLILLQYVDDLLLAATSELDCQQGTRALLQTLGDLGYRASAKKAQICQKQVKYLGYLLKEGQRWLTEARKETVMGQPTPKTPRQLREFLGTAGFCRLWIPGFAEMAAPLYPLTKPGTLFEWGPDQQKAYQEIKQALLTAPALGLPDLTKPFELFVDEKQGYAKGVLTQKLGPWRRPVAYLSKKLDPVAAGWPPCLRMVAAIAVLTKDAGKLTMGQPLVILAPHAVEALVKQPPDRWLSNARMTHYQALLLDTDRVQFGPIVALNPATLLPLPEEGLQHDCLDILAEAHGTRPDLTDQPLPDADHTWYTDGSSFLQEGQRKAGAAVTTETEVVWAKALPAGTSAQRAELIALTQALKMAEGKKLNVYTDSRYAFATAHIHGEIYRRRGWLTSEGKEIKNKDEILALLKALFLPKRLSIIHCPGHQKGNRAEARGNRMADQAAREVATRETPETSTLLAGKRTADGSEFEKRTADGSEFESPKKKAKVE

SEQ ID NO: 2484 - protein, 2095 aa, synthetic construct
MPAAKRVKLDGGDKKYSIGLDIGTNSVGWAVITDEYKVPSKKFKVLGNTDRHSIKKNLIGALLFDSGETAEATRLKRTARRRYTRRKNRICYLQEIFSNEMAKVDDSFFHRLEESFLVEEDKKHERHPIFGNIVDEVAYHEKYPTIYHLRKKLVDSTDKADLRLIYLALAHMIKFRGHFLIEGDLNPDNSDVDKLFIQLVQTYNQLFEENPINASGVDAKAILSARLSKSRRLENLIAQLPGEKKNGLFGNLIALSLGLTPNFKSNFDLAEDAKLQLSKDTYDDDLDNLLAQIGDQYADLFLAAKNLSDAILLSDILRVNTEITKAPLSASMIKRYDEHHQDLTLLKALVRQQLPEKYKEIFFDQSKNGYAGYIDGGASQEEFYKFIKPILEKMDGTEELLVKLNREDLLRKQRTFDNGSIPHQIHLGELHAILRRQEDFYPFLKDNREKIEKILTFRIPYYVGPLARGNSRFAWMTRKSEETITPWNFEEVVDKGASAQSFIERMTNFDKNLPNEKVLPKHSLLYEYFTVYNELTKVKYVTEGMRKPAFLSGEQKKAIVDLLFKTNRKVTVKQLKEDYFKKIECFDSVEISGVEDRFNASLGTYHDLLKIIKDKDFLDNEENEDILEDIVLTLTLFEDREMIEERLKTYAHLFDDKVMKQLKRRRYTGWGRLSRKLINGIRDKQSGKTILDFLKSDGFANRNFMQLIHDDSLTFKEDIQKAQVSGQGDSLHEHIANLAGSPAIKKGILQTVKVVDELVKVMGRHKPENIVIEMARENQTTQKGQKNSRERMKRIEEGIKELGSQILKEHPVENTQLQNEKLYLYYLQNGRDMYVDQELDINRLSDYDVDHIVPQSFLKDDSIDNKVLTRSDKARGKSDNVPSEEVVKKMKNYWRQLLNAKLITQRKFDNLTKAERGGLSELDKAGFIKRQLVETRQITKHVAQILDSRMNTKYDENDKLIREVKVITLKSKLVSDFRKDFQFYKVREINNYHHAHDAYLNAVVGTALIKKYPKLESEFVYGDYKVYDVRKMIAKSEQEIGKATAKYFFYSNIMNFFKTEITLANGEIRKRPLIETNGETGEIVWDKGRDFATVRKVLSMPQVNIVKKTEVQTGGFSKESILPKRNSDKLIARKKDWDPKKYGGFDSPTVAYSVLVVAKVEKGKSKKLKSVKELLGITIMERSSFEKNPIDFLEAKGYKEVKKDLIIKLPKYSLFELENGRKRMLASAGELQKGNELALPSKYVNFLYLASHYEKLKGSPEDNEQKQLFVEQHKHYLDEIIEQISEFSKRVILADANLDKVLSAYNKHRDKPIREQAENIIHLFTLTNLGAPAAFKYFDTTIDRKRYTSTKEVLDATLIHQSITGLYETRIDLSQLGGDGGEAAAKEAAAKGGTLNIEDEYRLHETSKGPDVPLGSTWLSDFPQAWAETGGMGLAVRQAPLIIPLKATSTPVSIKQYPMSQEARLGIKPHIQRLLDQGILVPCQSPWNTPLLPVKKPGTNDYRPVQDLREVNKRVEDIHPTVPNPYNLLSGLPPSHQWYTVLDLKDAFFCLRLHPTSQSLFAFEWRDPEMGISGQLTWTRLPQGFKNSPTLFNEALHRDLADFRIQHPDLILLQYVDDLLLAATSELDCQQGTRALLQTLGDLGYRASAKKAQICQKQVKYLGYLLKEGQRWLTEARKETVMGQPTPKTPRQLREFLGTAGFCRLWIPGFAEMAAPLYPLTKPGTLFEWGPDQQKAYQEIKQALLTAPALGLPDLTKPFELFVDEKQGYAKGVLTQKLGPWRRPVAYLSKKLDPVAAGWPPCLRMVAAIAVLTKDAGKLTMGQPLVILAPHAVEALVKQPPDRWLSNARMTHYQALLLDTDRVQFGPIVALNPATLLPLPEEGLQHDCLDILAEAHGTRPDLTDQPLPDADHTWYTDGSSFLQEGQRKAGAAVTTETEVVWAKALPAGTSAQRAELIALTQALKMAEGKKLNVYTDSRYAFATAHIHGEIYRRRGWLTSEGKEIKNKDEILALLKALFLPKRLSIIHCPGHQKGNRAEARGNRMADQAAREVATRETPETSTLLAGKRTADGSEFEKRTADGSEFESPKKKAKVE

SEQ ID NO: 2485 - protein, 2096 aa, synthetic construct
MPAAKRVKLDGGDKKYSIGLDIGTNSVGWAVITDEYKVPSKKFKVLGNTDRHSIKKNLIGALLFDSGETAEATRLKRTARRRYTRRKNRICYLQEIFSNEMAKVDDSFFHRLEESFLVEEDKKHERHPIFGNIVDEVAYHEKYPTIYHLRKKLVDSTDKADLRLIYLALAHMIKFRGHFLIEGDLNPDNSDVDKLFIQLVQTYNQLFEENPINASGVDAKAILSARLSKSRRLENLIAQLPGEKKNGLFGNLIALSLGLTPNFKSNFDLAEDAKLQLSKDTYDDDLDNLLAQIGDQYADLFLAAKNLSDAILLSDILRVNTEITKAPLSASMIKRYDEHHQDLTLLKALVRQQLPEKYKEIFFDQSKNGYAGYIDGGASQEEFYKFIKPILEKMDGTEELLVKLNREDLLRKQRTFDNGSIPHQIHLGELHAILRRQEDFYPFLKDNREKIEKILTFRIPYYVGPLARGNSRFAWMTRKSEETITPWNFEEVVDKGASAQSFIERMTNFDKNLPNEKVLPKHSLLYEYFTVYNELTKVKYVTEGMRKPAFLSGEQKKAIVDLLFKTNRKVTVKQLKEDYFKKIECFDSVEISGVEDRFNASLGTYHDLLKIIKDKDFLDNEENEDILEDIVLTLTLFEDREMIEERLKTYAHLFDDKVMKQLKRRRYTGWGRLSRKLINGIRDKQSGKTILDFLKSDGFANRNFMQLIHDDSLTFKEDIQKAQVSGQGDSLHEHIANLAGSPAIKKGILQTVKVVDELVKVMGRHKPENIVIEMARENQTTQKGQKNSRERMKRIEEGIKELGSQILKEHPVENTQLQNEKLYLYYLQNGRDMYVDQELDINRLSDYDVDHIVPQSFLKDDSIDNKVLTRSDKARGKSDNVPSEEVVKKMKNYWRQLLNAKLITQRKFDNLTKAERGGLSELDKAGFIKRQLVETRQITKHVAQILDSRMNTKYDENDKLIREVKVITLKSKLVSDFRKDFQFYKVREINNYHHAHDAYLNAVVGTALIKKYPKLESEFVYGDYKVYDVRKMIAKSEQEIGKATAKYFFYSNIMNFFKTEITLANGEIRKRPLIETNGETGEIVWDKGRDFATVRKVLSMPQVNIVKKTEVQTGGFSKESILPKRNSDKLIARKKDWDPKKYGGFDSPTVAYSVLVVAKVEKGKSKKLKSVKELLGITIMERSSFEKNPIDFLEAKGYKEVKKDLIIKLPKYSLFELENGRKRMLASAGELQKGNELALPSKYVNFLYLASHYEKLKGSPEDNEQKQLFVEQHKHYLDEIIEQISEFSKRVILADANLDKVLSAYNKHRDKPIREQAENIIHLFTLTNLGAPAAFKYFDTTIDRKRYTSTKEVLDATLIHQSITGLYETRIDLSQLGGDGGGSSEAAAKPAPGGTLNIEDEYRLHETSKGPDVPLGSTWLSDFPQAWAETGGMGLAVRQAPLIIPLKATSTPVSIKQYPMSQEARLGIKPHIQRLLDQGILVPCQSPWNTPLLPVKKPGTNDYRPVQDLREVNKRVEDIHPTVPNPYNLLSGLPPSHQWYTVLDLKDAFFCLRLHPTSQSLFAFEWRDPEMGISGQLTWTRLPQGFKNSPTLFNEALHRDLADFRIQHPDLILLQYVDDLLLAATSELDCQQGTRALLQTLGDLGYRASAKKAQICQKQVKYLGYLLKEGQRWLTEARKETVMGQPTPKTPRQLREFLGTAGFCRLWIPGFAEMAAPLYPLTKPGTLFEWGPDQQKAYQEIKQALLTAPALGLPDLTKPFELFVDEKQGYAKGVLTQKLGPWRRPVAYLSKKLDPVAAGWPPCLRMVAAIAVLTKDAGKLTMGQPLVILAPHAVEALVKQPPDRWLSNARMTHYQALLLDTDRVQFGPIVALNPATLLPLPEEGLQHDCLDILAEAHGTRPDLTDQPLPDADHTWYTDGSSFLQEGQRKAGAAVTTETEVVWAKALPAGTSAQRAELIALTQALKMAEGKKLNVYTDSRYAFATAHIHGEIYRRRGWLTSEGKEIKNKDEILALLKALFLPKRLSIIHCPGHQKGNRAEARGNRMADQAAREVATRETPETSTLLAGKRTADGSEFEKRTADGSEFESPKKKAKVE

SEQ ID NO: 2486 - protein, 2096 aa, synthetic construct
MPAAKRVKLDGGDKKYSIGLDIGTNSVGWAVITDEYKVPSKKFKVLGNTDRHSIKKNLIGALLFDSGETAEATRLKRTARRRYTRRKNRICYLQEIFSNEMAKVDDSFFHRLEESFLVEEDKKHERHPIFGNIVDEVAYHEKYPTIYHLRKKLVDSTDKADLRLIYLALAHMIKFRGHFLIEGDLNPDNSDVDKLFIQLVQTYNQLFEENPINASGVDAKAILSARLSKSRRLENLIAQLPGEKKNGLFGNLIALSLGLTPNFKSNFDLAEDAKLQLSKDTYDDDLDNLLAQIGDQYADLFLAAKNLSDAILLSDILRVNTEITKAPLSASMIKRYDEHHQDLTLLKALVRQQLPEKYKEIFFDQSKNGYAGYIDGGASQEEFYKFIKPILEKMDGTEELLVKLNREDLLRKQRTFDNGSIPHQIHLGELHAILRRQEDFYPFLKDNREKIEKILTFRIPYYVGPLARGNSRFAWMTRKSEETITPWNFEEVVDKGASAQSFIERMTNFDKNLPNEKVLPKHSLLYEYFTVYNELTKVKYVTEGMRKPAFLSGEQKKAIVDLLFKTNRKVTVKQLKEDYFKKIECFDSVEISGVEDRFNASLGTYHDLLKIIKDKDFLDNEENEDILEDIVLTLTLFEDREMIEERLKTYAHLFDDKVMKQLKRRRYTGWGRLSRKLINGIRDKQSGKTILDFLKSDGFANRNFMQLIHDDSLTFKEDIQKAQVSGQGDSLHEHIANLAGSPAIKKGILQTVKVVDELVKVMGRHKPENIVIEMARENQTTQKGQKNSRERMKRIEEGIKELGSQILKEHPVENTQLQNEKLYLYYLQNGRDMYVDQELDINRLSDYDVDHIVPQSFLKDDSIDNKVLTRSDKARGKSDNVPSEEVVKKMKNYWRQLLNAKLITQRKFDNLTKAERGGLSELDKAGFIKRQLVETRQITKHVAQILDSRMNTKYDENDKLIREVKVITLKSKLVSDFRKDFQFYKVREINNYHHAHDAYLNAVVGTALIKKYPKLESEFVYGDYKVYDVRKMIAKSEQEIGKATAKYFFYSNIMNFFKTEITLANGEIRKRPLIETNGETGEIVWDKGRDFATVRKVLSMPQVNIVKKTEVQTGGFSKESILPKRNSDKLIARKKDWDPKKYGGFDSPTVAYSVLVVAKVEKGKSKKLKSVKELLGITIMERSSFEKNPIDFLEAKGYKEVKKDLIIKLPKYSLFELENGRKRMLASAGELQKGNELALPSKYVNFLYLASHYEKLKGSPEDNEQKQLFVEQHKHYLDEIIEQISEFSKRVILADANLDKVLSAYNKHRDKPIREQAENIIHLFTLTNLGAPAAFKYFDTTIDRKRYTSTKEVLDATLIHQSITGLYETRIDLSQLGGDGGGGSEAAAKPAPGGTLNIEDEYRLHETSKGPDVPLGSTWLSDFPQAWAETGGMGLAVRQAPLIIPLKATSTPVSIKQYPMSQEARLGIKPHIQRLLDQGILVPCQSPWNTPLLPVKKPGTNDYRPVQDLREVNKRVEDIHPTVPNPYNLLSGLPPSHQWYTVLDLKDAFFCLRLHPTSQSLFAFEWRDPEMGISGQLTWTRLPQGFKNSPTLFNEALHRDLADFRIQHPDLILLQYVDDLLLAATSELDCQQGTRALLQTLGDLGYRASAKKAQICQKQVKYLGYLLKEGQRWLTEARKETVMGQPTPKTPRQLREFLGTAGFCRLWIPGFAEMAAPLYPLTKPGTLFEWGPDQQKAYQEIKQALLTAPALGLPDLTKPFELFVDEKQGYAKGVLTQKLGPWRRPVAYLSKKLDPVAAGWPPCLRMVAAIAVLTKDAGKLTMGQPLVILAPHAVEALVKQPPDRWLSNARMTHYQALLLDTDRVQFGPIVALNPATLLPLPEEGLQHDCLDILAEAHGTRPDLTDQPLPDADHTWYTDGSSFLQEGQRKAGAAVTTETEVVWAKALPAGTSAQRAELIALTQALKMAEGKKLNVYTDSRYAFATAHIHGEIYRRRGWLTSEGKEIKNKDEILALLKALFLPKRLSIIHCPGHQKGNRAEARGNRMADQAAREVATRETPETSTLLAGKRTADGSEFEKRTADGSEFESPKKKAKVE

SEQ ID NO: 2487 - protein, 2091 aa, synthetic construct
MPAAKRVKLDGGDKKYSIGLDIGTNSVGWAVITDEYKVPSKKFKVLGNTDRHSIKKNLIGALLFDSGETAEATRLKRTARRRYTRRKNRICYLQEIFSNEMAKVDDSFFHRLEESFLVEEDKKHERHPIFGNIVDEVAYHEKYPTIYHLRKKLVDSTDKADLRLIYLALAHMIKFRGHFLIEGDLNPDNSDVDKLFIQLVQTYNQLFEENPINASGVDAKAILSARLSKSRRLENLIAQLPGEKKNGLFGNLIALSLGLTPNFKSNFDLAEDAKLQLSKDTYDDDLDNLLAQIGDQYADLFLAAKNLSDAILLSDILRVNTEITKAPLSASMIKRYDEHHQDLTLLKALVRQQLPEKYKEIFFDQSKNGYAGYIDGGASQEEFYKFIKPILEKMDGTEELLVKLNREDLLRKQRTFDNGSIPHQIHLGELHAILRRQEDFYPFLKDNREKIEKILTFRIPYYVGPLARGNSRFAWMTRKSEETITPWNFEEVVDKGASAQSFIERMTNFDKNLPNEKVLPKHSLLYEYFTVYNELTKVKYVTEGMRKPAFLSGEQKKAIVDLLFKTNRKVTVKQLKEDYFKKIECFDSVEISGVEDRFNASLGTYHDLLKIIKDKDFLDNEENEDILEDIVLTLTLFEDREMIEERLKTYAHLFDDKVMKQLKRRRYTGWGRLSRKLINGIRDKQSGKTILDFLKSDGFANRNFMQLIHDDSLTFKEDIQKAQVSGQGDSLHEHIANLAGSPAIKKGILQTVKVVDELVKVMGRHKPENIVIEMARENQTTQKGQKNSRERMKRIEEGIKELGSQILKEHPVENTQLQNEKLYLYYLQNGRDMYVDQELDINRLSDYDVDHIVPQSFLKDDSIDNKVLTRSDKARGKSDNVPSEEVVKKMKNYWRQLLNAKLITQRKFDNLTKAERGGLSELDKAGFIKRQLVETRQITKHVAQILDSRMNTKYDENDKLIREVKVITLKSKLVSDFRKDFQFYKVREINNYHHAHDAYLNAVVGTALIKKYPKLESEFVYGDYKVYDVRKMIAKSEQEIGKATAKYFFYSNIMNFFKTEITLANGEIRKRPLIETNGETGEIVWDKGRDFATVRKVLSMPQVNIVKKTEVQTGGFSKESILPKRNSDKLIARKKDWDPKKYGGFDSPTVAYSVLVVAKVEKGKSKKLKSVKELLGITIMERSSFEKNPIDFLEAKGYKEVKKDLIIKLPKYSLFELENGRKRMLASAGELQKGNELALPSKYVNFLYLASHYEKLKGSPEDNEQKQLFVEQHKHYLDEIIEQISEFSKRVILADANLDKVLSAYNKHRDKPIREQAENIIHLFTLTNLGAPAAFKYFDTTIDRKRYTSTKEVLDATLIHQSITGLYETRIDLSQLGGDGGGGSGSSGGTLNIEDEYRLHETSKGPDVPLGSTWLSDFPQAWAETGGMGLAVRQAPLIIPLKATSTPVSIKQYPMSQEARLGIKPHIQRLLDQGILVPCQSPWNTPLLPVKKPGTNDYRPVQDLREVNKRVEDIHPTVPNPYNLLSGLPPSHQWYTVLDLKDAFFCLRLHPTSQSLFAFEWRDPEMGISGQLTWTRLPQGFKNSPTLFNEALHRDLADFRIQHPDLILLQYVDDLLLAATSELDCQQGTRALLQTLGDLGYRASAKKAQICQKQVKYLGYLLKEGQRWLTEARKETVMGQPTPKTPRQLREFLGTAGFCRLWIPGFAEMAAPLYPLTKPGTLFEWGPDQQKAYQEIKQALLTAPALGLPDLTKPFELFVDEKQGYAKGVLTQKLGPWRRPVAYLSKKLDPVAAGWPPCLRMVAAIAVLTKDAGKLTMGQPLVILAPHAVEALVKQPPDRWLSNARMTHYQALLLDTDRVQFGPIVALNPATLLPLPEEGLQHDCLDILAEAHGTRPDLTDQPLPDADHTWYTDGSSFLQEGQRKAGAAVTTETEVVWAKALPAGTSAQRAELIALTQALKMAEGKKLNVYTDSRYAFATAHIHGEIYRRRGWLTSEGKEIKNKDEILALLKALFLPKRLSIIHCPGHQKGNRAEARGNRMADQAAREVATRETPETSTLLAGKRTADGSEFEKRTADGSEFESPKKKAKVE

SEQ ID NO: 2488 - protein, 2096 aa, synthetic construct
MPAAKRVKLDGGDKKYSIGLDIGTNSVGWAVITDEYKVPSKKFKVLGNTDRHSIKKNLIGALLFDSGETAEATRLKRTARRRYTRRKNRICYLQEIFSNEMAKVDDSFFHRLEESFLVEEDKKHERHPIFGNIVDEVAYHEKYPTIYHLRKKLVDSTDKADLRLIYLALAHMIKFRGHFLIEGDLNPDNSDVDKLFIQLVQTYNQLFEENPINASGVDAKAILSARLSKSRRLENLIAQLPGEKKNGLFGNLIALSLGLTPNFKSNFDLAEDAKLQLSKDTYDDDLDNLLAQIGDQYADLFLAAKNLSDAILLSDILRVNTEITKAPLSASMIKRYDEHHQDLTLLKALVRQQLPEKYKEIFFDQSKNGYAGYIDGGASQEEFYKFIKPILEKMDGTEELLVKLNREDLLRKQRTFDNGSIPHQIHLGELHAILRRQEDFYPFLKDNREKIEKILTFRIPYYVGPLARGNSRFAWMTRKSEETITPWNFEEVVDKGASAQSFIERMTNFDKNLPNEKVLPKHSLLYEYFTVYNELTKVKYVTEGMRKPAFLSGEQKKAIVDLLFKTNRKVTVKQLKEDYFKKIECFDSVEISGVEDRFNASLGTYHDLLKIIKDKDFLDNEENEDILEDIVLTLTLFEDREMIEERLKTYAHLFDDKVMKQLKRRRYTGWGRLSRKLINGIRDKQSGKTILDFLKSDGFANRNFMQLIHDDSLTFKEDIQKAQVSGQGDSLHEHIANLAGSPAIKKGILQTVKVVDELVKVMGRHKPENIVIEMARENQTTQKGQKNSRERMKRIEEGIKELGSQILKEHPVENTQLQNEKLYLYYLQNGRDMYVDQELDINRLSDYDVDHIVPQSFLKDDSIDNKVLTRSDKARGKSDNVPSEEVVKKMKNYWRQLLNAKLITQRKFDNLTKAERGGLSELDKAGFIKRQLVETRQITKHVAQILDSRMNTKYDENDKLIREVKVITLKSKLVSDFRKDFQFYKVREINNYHHAHDAYLNAVVGTALIKKYPKLESEFVYGDYKVYDVRKMIAKSEQEIGKATAKYFFYSNIMNFFKTEITLANGEIRKRPLIETNGETGEIVWDKGRDFATVRKVLSMPQVNIVKKTEVQTGGFSKESILPKRNSDKLIARKKDWDPKKYGGFDSPTVAYSVLVVAKVEKGKSKKLKSVKELLGITIMERSSFEKNPIDFLEAKGYKEVKKDLIIKLPKYSLFELENGRKRMLASAGELQKGNELALPSKYVNFLYLASHYEKLKGSPEDNEQKQLFVEQHKHYLDEIIEQISEFSKRVILADANLDKVLSAYNKHRDKPIREQAENIIHLFTLTNLGAPAAFKYFDTTIDRKRYTSTKEVLDATLIHQSITGLYETRIDLSQLGGDGGGSSGGSEAAAKGGTLNIEDEYRLHETSKGPDVPLGSTWLSDFPQAWAETGGMGLAVRQAPLIIPLKATSTPVSIKQYPMSQEARLGIKPHIQRLLDQGILVPCQSPWNTPLLPVKKPGTNDYRPVQDLREVNKRVEDIHPTVPNPYNLLSGLPPSHQWYTVLDLKDAFFCLRLHPTSQSLFAFEWRDPEMGISGQLTWTRLPQGFKNSPTLFNEALHRDLADFRIQHPDLILLQYVDDLLLAATSELDCQQGTRALLQTLGDLGYRASAKKAQICQKQVKYLGYLLKEGQRWLTEARKETVMGQPTPKTPRQLREFLGTAGFCRLWIPGFAEMAAPLYPLTKPGTLFEWGPDQQKAYQEIKQALLTAPALGLPDLTKPFELFVDEKQGYAKGVLTQKLGPWRRPVAYLSKKLDPVAAGWPPCLRMVAAIAVLTKDAGKLTMGQPLVILAPHAVEALVKQPPDRWLSNARMTHYQALLLDTDRVQFGPIVALNPATLLPLPEEGLQHDCLDILAEAHGTRPDLTDQPLPDADHTWYTDGSSFLQEGQRKAGAAVTTETEVVWAKALPAGTSAQRAELIALTQALKMAEGKKLNVYTDSRYAFATAHIHGEIYRRRGWLTSEGKEIKNKDEILALLKALFLPKRLSIIHCPGHQKGNRAEARGNRMADQAAREVATRETPETSTLLAGKRTADGSEFEKRTADGSEFESPKKKAKVE

SEQ ID NO: 2489 - protein, 2101 aa, synthetic construct
MPAAKRVKLDGGDKKYSIGLDIGTNSVGWAVITDEYKVPSKKFKVLGNTDRHSIKKNLIGALLFDSGETAEATRLKRTARRRYTRRKNRICYLQEIFSNEMAKVDDSFFHRLEESFLVEEDKKHERHPIFGNIVDEVAYHEKYPTIYHLRKKLVDSTDKADLRLIYLALAHMIKFRGHFLIEGDLNPDNSDVDKLFIQLVQTYNQLFEENPINASGVDAKAILSARLSKSRRLENLIAQLPGEKKNGLFGNLIALSLGLTPNFKSNFDLAEDAKLQLSKDTYDDDLDNLLAQIGDQYADLFLAAKNLSDAILLSDILRVNTEITKAPLSASMIKRYDEHHQDLTLLKALVRQQLPEKYKEIFFDQSKNGYAGYIDGGASQEEFYKFIKPILEKMDGTEELLVKLNREDLLRKQRTFDNGSIPHQIHLGELHAILRRQEDFYPFLKDNREKIEKILTFRIPYYVGPLARGNSRFAWMTRKSEETITPWNFEEVVDKGASAQSFIERMTNFDKNLPNEKVLPKHSLLYEYFTVYNELTKVKYVTEGMRKPAFLSGEQKKAIVDLLFKTNRKVTVKQLKEDYFKKIECFDSVEISGVEDRFNASLGTYHDLLKIIKDKDFLDNEENEDILEDIVLTLTLFEDREMIEERLKTYAHLFDDKVMKQLKRRRYTGWGRLSRKLINGIRDKQSGKTILDFLKSDGFANRNFMQLIHDDSLTFKEDIQKAQVSGQGDSLHEHIANLAGSPAIKKGILQTVKVVDELVKVMGRHKPENIVIEMARENQTTQKGQKNSRERMKRIEEGIKELGSQILKEHPVENTQLQNEKLYLYYLQNGRDMYVDQELDINRLSDYDVDHIVPQSFLKDDSIDNKVLTRSDKARGKSDNVPSEEVVKKMKNYWRQLLNAKLITQRKFDNLTKAERGGLSELDKAGFIKRQLVETRQITKHVAQILDSRMNTKYDENDKLIREVKVITLKSKLVSDFRKDFQFYKVREINNYHHAHDAYLNAVVGTALIKKYPKLESEFVYGDYKVYDVRKMIAKSEQEIGKATAKYFFYSNIMNFFKTEITLANGEIRKRPLIETNGETGEIVWDKGRDFATVRKVLSMPQVNIVKKTEVQTGGFSKESILPKRNSDKLIARKKDWDPKKYGGFDSPTVAYSVLVVAKVEKGKSKKLKSVKELLGITIMERSSFEKNPIDFLEAKGYKEVKKDLIIKLPKYSLFELENGRKRMLASAGELQKGNELALPSKYVNFLYLASHYEKLKGSPEDNEQKQLFVEQHKHYLDEIIEQISEFSKRVILADANLDKVLSAYNKHRDKPIREQAENIIHLFTLTNLGAPAAFKYFDTTIDRKRYTSTKEVLDATLIHQSITGLYETRIDLSQLGGDGGSGSETPGTSESATPESGGTLNIEDEYRLHETSKGPDVPLGSTWLSDFPQAWAETGGMGLAVRQAPLIIPLKATSTPVSIKQYPMSQEARLGIKPHIQRLLDQGILVPCQSPWNTPLLPVKKPGTNDYRPVQDLREVNKRVEDIHPTVPNPYNLLSGLPPSHQWYTVLDLKDAFFCLRLHPTSQSLFAFEWRDPEMGISGQLTWTRLPQGFKNSPTLFNEALHRDLADFRIQHPDLILLQYVDDLLLAATSELDCQQGTRALLQTLGDLGYRASAKKAQICQKQVKYLGYLLKEGQRWLTEARKETVMGQPTPKTPRQLREFLGTAGFCRLWIPGFAEMAAPLYPLTKPGTLFEWGPDQQKAYQEIKQALLTAPALGLPDLTKPFELFVDEKQGYAKGVLTQKLGPWRRPVAYLSKKLDPVAAGWPPCLRMVAAIAVLTKDAGKLTMGQPLVILAPHAVEALVKQPPDRWLSNARMTHYQALLLDTDRVQFGPIVALNPATLLPLPEEGLQHDCLDILAEAHGTRPDLTDQPLPDADHTWYTDGSSFLQEGQRKAGAAVTTETEVVWAKALPAGTSAQRAELIALTQALKMAEGKKLNVYTDSRYAFATAHIHGEIYRRRGWLTSEGKEIKNKDEILALLKALFLPKRLSIIHCPGHQKGNRAEARGNRMADQAAREVATRETPETSTLLAGKRTADGSEFEKRTADGSEFESPKKKAKVE

SEQ ID NO: 2490 - protein, 2097 aa, synthetic construct
MPAAKRVKLDGGDKKYSIGLDIGTNSVGWAVITDEYKVPSKKFKVLGNTDRHSIKKNLIGALLFDSGETAEATRLKRTARRRYTRRKNRICYLQEIFSNEMAKVDDSFFHRLEESFLVEEDKKHERHPIFGNIVDEVAYHEKYPTIYHLRKKLVDSTDKADLRLIYLALAHMIKFRGHFLIEGDLNPDNSDVDKLFIQLVQTYNQLFEENPINASGVDAKAILSARLSKSRRLENLIAQLPGEKKNGLFGNLIALSLGLTPNFKSNFDLAEDAKLQLSKDTYDDDLDNLLAQIGDQYADLFLAAKNLSDAILLSDILRVNTEITKAPLSASMIKRYDEHHQDLTLLKALVRQQLPEKYKEIFFDQSKNGYAGYIDGGASQEEFYKFIKPILEKMDGTEELLVKLNREDLLRKQRTFDNGSIPHQIHLGELHAILRRQEDFYPFLKDNREKIEKILTFRIPYYVGPLARGNSRFAWMTRKSEETITPWNFEEVVDKGASAQSFIERMTNFDKNLPNEKVLPKHSLLYEYFTVYNELTKVKYVTEGMRKPAFLSGEQKKAIVDLLFKTNRKVTVKQLKEDYFKKIECFDSVEISGVEDRFNASLGTYHDLLKIIKDKDFLDNEENEDILEDIVLTLTLFEDREMIEERLKTYAHLFDDKVMKQLKRRRYTGWGRLSRKLINGIRDKQSGKTILDFLKSDGFANRNFMQLIHDDSLTFKEDIQKAQVSGQGDSLHEHIANLAGSPAIKKGILQTVKVVDELVKVMGRHKPENIVIEMARENQTTQKGQKNSRERMKRIEEGIKELGSQILKEHPVENTQLQNEKLYLYYLQNGRDMYVDQELDINRLSDYDVDHIVPQSFLKDDSIDNKVLTRSDKARGKSDNVPSEEVVKKMKNYWRQLLNAKLITQRKFDNLTKAERGGLSELDKAGFIKRQLVETRQITKHVAQILDSRMNTKYDENDKLIREVKVITLKSKLVSDFRKDFQFYKVREINNYHHAHDAYLNAVVGTALIKKYPKLESEFVYGDYKVYDVRKMIAKSEQEIGKATAKYFFYSNIMNFFKTEITLANGEIRKRPLIETNGETGEIVWDKGRDFATVRKVLSMPQVNIVKKTEVQTGGFSKESILPKRNSDKLIARKKDWDPKKYGGFDSPTVAYSVLVVAKVEKGKSKKLKSVKELLGITIMERSSFEKNPIDFLEAKGYKEVKKDLIIKLPKYSLFELENGRKRMLASAGELQKGNELALPSKYVNFLYLASHYEKLKGSPEDNEQKQLFVEQHKHYLDEIIEQISEFSKRVILADANLDKVLSAYNKHRDKPIREQAENIIHLFTLTNLGAPAAFKYFDTTIDRKRYTSTKEVLDATLIHQSITGLYETRIDLSQLGGDGGGSAGSAAGSGEFGGTLNIEDEYRLHETSKGPDVPLGSTWLSDFPQAWAETGGMGLAVRQAPLIIPLKATSTPVSIKQYPMSQEARLGIKPHIQRLLDQGILVPCQSPWNTPLLPVKKPGTNDYRPVQDLREVNKRVEDIHPTVPNPYNLLSGLPPSHQWYTVLDLKDAFFCLRLHPTSQSLFAFEWRDPEMGISGQLTWTRLPQGFKNSPTLFNEALHRDLADFRIQHPDLILLQYVDDLLLAATSELDCQQGTRALLQTLGDLGYRASAKKAQICQKQVKYLGYLLKEGQRWLTEARKETVMGQPTPKTPRQLREFLGTAGFCRLWIPGFAEMAAPLYPLTKPGTLFEWGPDQQKAYQEIKQALLTAPALGLPDLTKPFELFVDEKQGYAKGVLTQKLGPWRRPVAYLSKKLDPVAAGWPPCLRMVAAIAVLTKDAGKLTMGQPLVILAPHAVEALVKQPPDRWLSNARMTHYQALLLDTDRVQFGPIVALNPATLLPLPEEGLQHDCLDILAEAHGTRPDLTDQPLPDADHTWYTDGSSFLQEGQRKAGAAVTTETEVVWAKALPAGTSAQRAELIALTQALKMAEGKKLNVYTDSRYAFATAHIHGEIYRRRGWLTSEGKEIKNKDEILALLKALFLPKRLSIIHCPGHQKGNRAEARGNRMADQAAREVATRETPETSTLLAGKRTADGSEFEKRTADGSEFESPKKKAKVE

SEQ ID NO: 2491 - protein, 2094 aa, synthetic construct
MPAAKRVKLDGGDKKYSIGLDIGTNSVGWAVITDEYKVPSKKFKVLGNTDRHSIKKNLIGALLFDSGETAEATRLKRTARRRYTRRKNRICYLQEIFSNEMAKVDDSFFHRLEESFLVEEDKKHERHPIFGNIVDEVAYHEKYPTIYHLRKKLVDSTDKADLRLIYLALAHMIKFRGHFLIEGDLNPDNSDVDKLFIQLVQTYNQLFEENPINASGVDAKAILSARLSKSRRLENLIAQLPGEKKNGLFGNLIALSLGLTPNFKSNFDLAEDAKLQLSKDTYDDDLDNLLAQIGDQYADLFLAAKNLSDAILLSDILRVNTEITKAPLSASMIKRYDEHHQDLTLLKALVRQQLPEKYKEIFFDQSKNGYAGYIDGGASQEEFYKFIKPILEKMDGTEELLVKLNREDLLRKQRTFDNGSIPHQIHLGELHAILRRQEDFYPFLKDNREKIEKILTFRIPYYVGPLARGNSRFAWMTRKSEETITPWNFEEVVDKGASAQSFIERMTNFDKNLPNEKVLPKHSLLYEYFTVYNELTKVKYVTEGMRKPAFLSGEQKKAIVDLLFKTNRKVTVKQLKEDYFKKIECFDSVEISGVEDRFNASLGTYHDLLKIIKDKDFLDNEENEDILEDIVLTLTLFEDREMIEERLKTYAHLFDDKVMKQLKRRRYTGWGRLSRKLINGIRDKQSGKTILDFLKSDGFANRNFMQLIHDDSLTFKEDIQKAQVSGQGDSLHEHIANLAGSPAIKKGILQTVKVVDELVKVMGRHKPENIVIEMARENQTTQKGQKNSRERMKRIEEGIKELGSQILKEHPVENTQLQNEKLYLYYLQNGRDMYVDQELDINRLSDYDVDHIVPQSFLKDDSIDNKVLTRSDKARGKSDNVPSEEVVKKMKNYWRQLLNAKLITQRKFDNLTKAERGGLSELDKAGFIKRQLVETRQITKHVAQILDSRMNTKYDENDKLIREVKVITLKSKLVSDFRKDFQFYKVREINNYHHAHDAYLNAVVGTALIKKYPKLESEFVYGDYKVYDVRKMIAKSEQEIGKATAKYFFYSNIMNFFKTEITLANGEIRKRPLIETNGETGEIVWDKGRDFATVRKVLSMPQVNIVKKTEVQTGGFSKESILPKRNSDKLIARKKDWDPKKYGGFDSPTVAYSVLVVAKVEKGKSKKLKSVKELLGITIMERSSFEKNPIDFLEAKGYKEVKKDLIIKLPKYSLFELENGRKRMLASAGELQKGNELALPSKYVNFLYLASHYEKLKGSPEDNEQKQLFVEQHKHYLDEIIEQISEFSKRVILADANLDKVLSAYNKHRDKPIREQAENIIHLFTLTNLGAPAAFKYFDTTIDRKRYTSTKEVLDATLIHQSITGLYETRIDLSQLGGDGGGSSGGSPAPGGTLNIEDEYRLHETSKGPDVPLGSTWLSDFPQAWAETGGMGLAVRQAPLIIPLKATSTPVSIKQYPMSQEARLGIKPHIQRLLDQGILVPCQSPWNTPLLPVKKPGTNDYRPVQDLREVNKRVEDIHPTVPNPYNLLSGLPPSHQWYTVLDLKDAFFCLRLHPTSQSLFAFEWRDPEMGISGQLTWTRLPQGFKNSPTLFNEALHRDLADFRIQHPDLILLQYVDDLLLAATSELDCQQGTRALLQTLGDLGYRASAKKAQICQKQVKYLGYLLKEGQRWLTEARKETVMGQPTPKTPRQLREFLGTAGFCRLWIPGFAEMAAPLYPLTKPGTLFEWGPDQQKAYQEIKQALLTAPALGLPDLTKPFELFVDEKQGYAKGVLTQKLGPWRRPVAYLSKKLDPVAAGWPPCLRMVAAIAVLTKDAGKLTMGQPLVILAPHAVEALVKQPPDRWLSNARMTHYQALLLDTDRVQFGPIVALNPATLLPLPEEGLQHDCLDILAEAHGTRPDLTDQPLPDADHTWYTDGSSFLQEGQRKAGAAVTTETEVVWAKALPAGTSAQRAELIALTQALKMAEGKKLNVYTDSRYAFATAHIHGEIYRRRGWLTSEGKEIKNKDEILALLKALFLPKRLSIIHCPGHQKGNRAEARGNRMADQAAREVATRETPETSTLLAGKRTADGSEFEKRTADGSEFESPKKKAKVE

SEQ ID NO: 2492 - protein, 2091 aa, synthetic construct
MPAAKRVKLDGGDKKYSIGLDIGTNSVGWAVITDEYKVPSKKFKVLGNTDRHSIKKNLIGALLFDSGETAEATRLKRTARRRYTRRKNRICYLQEIFSNEMAKVDDSFFHRLEESFLVEEDKKHERHPIFGNIVDEVAYHEKYPTIYHLRKKLVDSTDKADLRLIYLALAHMIKFRGHFLIEGDLNPDNSDVDKLFIQLVQTYNQLFEENPINASGVDAKAILSARLSKSRRLENLIAQLPGEKKNGLFGNLIALSLGLTPNFKSNFDLAEDAKLQLSKDTYDDDLDNLLAQIGDQYADLFLAAKNLSDAILLSDILRVNTEITKAPLSASMIKRYDEHHQDLTLLKALVRQQLPEKYKEIFFDQSKNGYAGYIDGGASQEEFYKFIKPILEKMDGTEELLVKLNREDLLRKQRTFDNGSIPHQIHLGELHAILRRQEDFYPFLKDNREKIEKILTFRIPYYVGPLARGNSRFAWMTRKSEETITPWNFEEVVDKGASAQSFIERMTNFDKNLPNEKVLPKHSLLYEYFTVYNELTKVKYVTEGMRKPAFLSGEQKKAIVDLLFKTNRKVTVKQLKEDYFKKIECFDSVEISGVEDRFNASLGTYHDLLKIIKDKDFLDNEENEDILEDIVLTLTLFEDREMIEERLKTYAHLFDDKVMKQLKRRRYTGWGRLSRKLINGIRDKQSGKTILDFLKSDGFANRNFMQLIHDDSLTFKEDIQKAQVSGQGDSLHEHIANLAGSPAIKKGILQTVKVVDELVKVMGRHKPENIVIEMARENQTTQKGQKNSRERMKRIEEGIKELGSQILKEHPVENTQLQNEKLYLYYLQNGRDMYVDQELDINRLSDYDVDHIVPQSFLKDDSIDNKVLTRSDKARGKSDNVPSEEVVKKMKNYWRQLLNAKLITQRKFDNLTKAERGGLSELDKAGFIKRQLVETRQITKHVAQILDSRMNTKYDENDKLIREVKVITLKSKLVSDFRKDFQFYKVREINNYHHAHDAYLNAVVGTALIKKYPKLESEFVYGDYKVYDVRKMIAKSEQEIGKATAKYFFYSNIMNFFKTEITLANGEIRKRPLIETNGETGEIVWDKGRDFATVRKVLSMPQVNIVKKTEVQTGGFSKESILPKRNSDKLIARKKDWDPKKYGGFDSPTVAYSVLVVAKVEKGKSKKLKSVKELLGITIMERSSFEKNPIDFLEAKGYKEVKKDLIIKLPKYSLFELENGRKRMLASAGELQKGNELALPSKYVNFLYLASHYEKLKGSPEDNEQKQLFVEQHKHYLDEIIEQISEFSKRVILADANLDKVLSAYNKHRDKPIREQAENIIHLFTLTNLGAPAAFKYFDTTIDRKRYTSTKEVLDATLIHQSITGLYETRIDLSQLGGDGGPAPGGGGGTLNIEDEYRLHETSKGPDVPLGSTWLSDFPQAWAETGGMGLAVRQAPLIIPLKATSTPVSIKQYPMSQEARLGIKPHIQRLLDQGILVPCQSPWNTPLLPVKKPGTNDYRPVQDLREVNKRVEDIHPTVPNPYNLLSGLPPSHQWYTVLDLKDAFFCLRLHPTSQSLFAFEWRDPEMGISGQLTWTRLPQGFKNSPTLFNEALHRDLADFRIQHPDLILLQYVDDLLLAATSELDCQQGTRALLQTLGDLGYRASAKKAQICQKQVKYLGYLLKEGQRWLTEARKETVMGQPTPKTPRQLREFLGTAGFCRLWIPGFAEMAAPLYPLTKPGTLFEWGPDQQKAYQEIKQALLTAPALGLPDLTKPFELFVDEKQGYAKGVLTQKLGPWRRPVAYLSKKLDPVAAGWPPCLRMVAAIAVLTKDAGKLTMGQPLVILAPHAVEALVKQPPDRWLSNARMTHYQALLLDTDRVQFGPIVALNPATLLPLPEEGLQHDCLDILAEAHGTRPDLTDQPLPDADHTWYTDGSSFLQEGQRKAGAAVTTETEVVWAKALPAGTSAQRAELIALTQALKMAEGKKLNVYTDSRYAFATAHIHGEIYRRRGWLTSEGKEIKNKDEILALLKALFLPKRLSIIHCPGHQKGNRAEARGNRMADQAAREVATRETPETSTLLAGKRTADGSEFEKRTADGSEFESPKKKAKVE

SEQ ID NO: 2493 - protein, 2094 aa, synthetic construct
MPAAKRVKLDGGDKKYSIGLDIGTNSVGWAVITDEYKVPSKKFKVLGNTDRHSIKKNLIGALLFDSGETAEATRLKRTARRRYTRRKNRICYLQEIFSNEMAKVDDSFFHRLEESFLVEEDKKHERHPIFGNIVDEVAYHEKYPTIYHLRKKLVDSTDKADLRLIYLALAHMIKFRGHFLIEGDLNPDNSDVDKLFIQLVQTYNQLFEENPINASGVDAKAILSARLSKSRRLENLIAQLPGEKKNGLFGNLIALSLGLTPNFKSNFDLAEDAKLQLSKDTYDDDLDNLLAQIGDQYADLFLAAKNLSDAILLSDILRVNTEITKAPLSASMIKRYDEHHQDLTLLKALVRQQLPEKYKEIFFDQSKNGYAGYIDGGASQEEFYKFIKPILEKMDGTEELLVKLNREDLLRKQRTFDNGSIPHQIHLGELHAILRRQEDFYPFLKDNREKIEKILTFRIPYYVGPLARGNSRFAWMTRKSEETITPWNFEEVVDKGASAQSFIERMTNFDKNLPNEKVLPKHSLLYEYFTVYNELTKVKYVTEGMRKPAFLSGEQKKAIVDLLFKTNRKVTVKQLKEDYFKKIECFDSVEISGVEDRFNASLGTYHDLLKIIKDKDFLDNEENEDILEDIVLTLTLFEDREMIEERLKTYAHLFDDKVMKQLKRRRYTGWGRLSRKLINGIRDKQSGKTILDFLKSDGFANRNFMQLIHDDSLTFKEDIQKAQVSGQGDSLHEHIANLAGSPAIKKGILQTVKVVDELVKVMGRHKPENIVIEMARENQTTQKGQKNSRERMKRIEEGIKELGSQILKEHPVENTQLQNEKLYLYYLQNGRDMYVDQELDINRLSDYDVDHIVPQSFLKDDSIDNKVLTRSDKARGKSDNVPSEEVVKKMKNYWRQLLNAKLITQRKFDNLTKAERGGLSELDKAGFIKRQLVETRQITKHVAQILDSRMNTKYDENDKLIREVKVITLKSKLVSDFRKDFQFYKVREINNYHHAHDAYLNAVVGTALIKKYPKLESEFVYGDYKVYDVRKMIAKSEQEIGKATAKYFFYSNIMNFFKTEITLANGEIRKRPLIETNGETGEIVWDKGRDFATVRKVLSMPQVNIVKKTEVQTGGFSKESILPKRNSDKLIARKKDWDPKKYGGFDSPTVAYSVLVVAKVEKGKSKKLKSVKELLGITIMERSSFEKNPIDFLEAKGYKEVKKDLIIKLPKYSLFELENGRKRMLASAGELQKGNELALPSKYVNFLYLASHYEKLKGSPEDNEQKQLFVEQHKHYLDEIIEQISEFSKRVILADANLDKVLSAYNKHRDKPIREQAENIIHLFTLTNLGAPAAFKYFDTTIDRKRYTSTKEVLDATLIHQSITGLYETRIDLSQLGGDGGPAPGGSGGGGGTLNIEDEYRLHETSKGPDVPLGSTWLSDFPQAWAETGGMGLAVRQAPLIIPLKATSTPVSIKQYPMSQEARLGIKPHIQRLLDQGILVPCQSPWNTPLLPVKKPGTNDYRPVQDLREVNKRVEDIHPTVPNPYNLLSGLPPSHQWYTVLDLKDAFFCLRLHPTSQSLFAFEWRDPEMGISGQLTWTRLPQGFKNSPTLFNEALHRDLADFRIQHPDLILLQYVDDLLLAATSELDCQQGTRALLQTLGDLGYRASAKKAQICQKQVKYLGYLLKEGQRWLTEARKETVMGQPTPKTPRQLREFLGTAGFCRLWIPGFAEMAAPLYPLTKPGTLFEWGPDQQKAYQEIKQALLTAPALGLPDLTKPFELFVDEKQGYAKGVLTQKLGPWRRPVAYLSKKLDPVAAGWPPCLRMVAAIAVLTKDAGKLTMGQPLVILAPHAVEALVKQPPDRWLSNARMTHYQALLLDTDRVQFGPIVALNPATLLPLPEEGLQHDCLDILAEAHGTRPDLTDQPLPDADHTWYTDGSSFLQEGQRKAGAAVTTETEVVWAKALPAGTSAQRAELIALTQALKMAEGKKLNVYTDSRYAFATAHIHGEIYRRRGWLTSEGKEIKNKDEILALLKALFLPKRLSIIHCPGHQKGNRAEARGNRMADQAAREVATRETPETSTLLAGKRTADGSEFEKRTADGSEFESPKKKAKVE

SEQ ID NO: 2494 - protein, 2096 aa, synthetic construct
MPAAKRVKLDGGDKKYSIGLDIGTNSVGWAVITDEYKVPSKKFKVLGNTDRHSIKKNLIGALLFDSGETAEATRLKRTARRRYTRRKNRICYLQEIFSNEMAKVDDSFFHRLEESFLVEEDKKHERHPIFGNIVDEVAYHEKYPTIYHLRKKLVDSTDKADLRLIYLALAHMIKFRGHFLIEGDLNPDNSDVDKLFIQLVQTYNQLFEENPINASGVDAKAILSARLSKSRRLENLIAQLPGEKKNGLFGNLIALSLGLTPNFKSNFDLAEDAKLQLSKDTYDDDLDNLLAQIGDQYADLFLAAKNLSDAILLSDILRVNTEITKAPLSASMIKRYDEHHQDLTLLKALVRQQLPEKYKEIFFDQSKNGYAGYIDGGASQEEFYKFIKPILEKMDGTEELLVKLNREDLLRKQRTFDNGSIPHQIHLGELHAILRRQEDFYPFLKDNREKIEKILTFRIPYYVGPLARGNSRFAWMTRKSEETITPWNFEEVVDKGASAQSFIERMTNFDKNLPNEKVLPKHSLLYEYFTVYNELTKVKYVTEGMRKPAFLSGEQKKAIVDLLFKTNRKVTVKQLKEDYFKKIECFDSVEISGVEDRFNASLGTYHDLLKIIKDKDFLDNEENEDILEDIVLTLTLFEDREMIEERLKTYAHLFDDKVMKQLKRRRYTGWGRLSRKLINGIRDKQSGKTILDFLKSDGFANRNFMQLIHDDSLTFKEDIQKAQVSGQGDSLHEHIANLAGSPAIKKGILQTVKVVDELVKVMGRHKPENIVIEMARENQTTQKGQKNSRERMKRIEEGIKELGSQILKEHPVENTQLQNEKLYLYYLQNGRDMYVDQELDINRLSDYDVDHIVPQSFLKDDSIDNKVLTRSDKARGKSDNVPSEEVVKKMKNYWRQLLNAKLITQRKFDNLTKAERGGLSELDKAGFIKRQLVETRQITKHVAQILDSRMNTKYDENDKLIREVKVITLKSKLVSDFRKDFQFYKVREINNYHHAHDAYLNAVVGTALIKKYPKLESEFVYGDYKVYDVRKMIAKSEQEIGKATAKYFFYSNIMNFFKTEITLANGEIRKRPLIETNGETGEIVWDKGRDFATVRKVLSMPQVNIVKKTEVQTGGFSKESILPKRNSDKLIARKKDWDPKKYGGFDSPTVAYSVLVVAKVEKGKSKKLKSVKELLGITIMERSSFEKNPIDFLEAKGYKEVKKDLIIKLPKYSLFELENGRKRMLASAGELQKGNELALPSKYVNFLYLASHYEKLKGSPEDNEQKQLFVEQHKHYLDEIIEQISEFSKRVILADANLDKVLSAYNKHRDKPIREQAENIIHLFTLTNLGAPAAFKYFDTTIDRKRYTSTKEVLDATLIHQSITGLYETRIDLSQLGGDGGPAPEAAAKGGGGGTLNIEDEYRLHETSKGPDVPLGSTWLSDFPQAWAETGGMGLAVRQAPLIIPLKATSTPVSIKQYPMSQEARLGIKPHIQRLLDQGILVPCQSPWNTPLLPVKKPGTNDYRPVQDLREVNKRVEDIHPTVPNPYNLLSGLPPSHQWYTVLDLKDAFFCLRLHPTSQSLFAFEWRDPEMGISGQLTWTRLPQGFKNSPTLFNEALHRDLADFRIQHPDLILLQYVDDLLLAATSELDCQQGTRALLQTLGDLGYRASAKKAQICQKQVKYLGYLLKEGQRWLTEARKETVMGQPTPKTPRQLREFLGTAGFCRLWIPGFAEMAAPLYPLTKPGTLFEWGPDQQKAYQEIKQALLTAPALGLPDLTKPFELFVDEKQGYAKGVLTQKLGPWRRPVAYLSKKLDPVAAGWPPCLRMVAAIAVLTKDAGKLTMGQPLVILAPHAVEALVKQPPDRWLSNARMTHYQALLLDTDRVQFGPIVALNPATLLPLPEEGLQHDCLDILAEAHGTRPDLTDQPLPDADHTWYTDGSSFLQEGQRKAGAAVTTETEVVWAKALPAGTSAQRAELIALTQALKMAEGKKLNVYTDSRYAFATAHIHGEIYRRRGWLTSEGKEIKNKDEILALLKALFLPKRLSIIHCPGHQKGNRAEARGNRMADQAAREVATRETPETSTLLAGKRTADGSEFEKRTADGSEFESPKKKAKVE

SEQ ID NO: 2495 - protein, 2096 aa, synthetic construct
MPAAKRVKLDGGDKKYSIGLDIGTNSVGWAVITDEYKVPSKKFKVLGNTDRHSIKKNLIGALLFDSGETAEATRLKRTARRRYTRRKNRICYLQEIFSNEMAKVDDSFFHRLEESFLVEEDKKHERHPIFGNIVDEVAYHEKYPTIYHLRKKLVDSTDKADLRLIYLALAHMIKFRGHFLIEGDLNPDNSDVDKLFIQLVQTYNQLFEENPINASGVDAKAILSARLSKSRRLENLIAQLPGEKKNGLFGNLIALSLGLTPNFKSNFDLAEDAKLQLSKDTYDDDLDNLLAQIGDQYADLFLAAKNLSDAILLSDILRVNTEITKAPLSASMIKRYDEHHQDLTLLKALVRQQLPEKYKEIFFDQSKNGYAGYIDGGASQEEFYKFIKPILEKMDGTEELLVKLNREDLLRKQRTFDNGSIPHQIHLGELHAILRRQEDFYPFLKDNREKIEKILTFRIPYYVGPLARGNSRFAWMTRKSEETITPWNFEEVVDKGASAQSFIERMTNFDKNLPNEKVLPKHSLLYEYFTVYNELTKVKYVTEGMRKPAFLSGEQKKAIVDLLFKTNRKVTVKQLKEDYFKKIECFDSVEISGVEDRFNASLGTYHDLLKIIKDKDFLDNEENEDILEDIVLTLTLFEDREMIEERLKTYAHLFDDKVMKQLKRRRYTGWGRLSRKLINGIRDKQSGKTILDFLKSDGFANRNFMQLIHDDSLTFKEDIQKAQVSGQGDSLHEHIANLAGSPAIKKGILQTVKVVDELVKVMGRHKPENIVIEMARENQTTQKGQKNSRERMKRIEEGIKELGSQILKEHPVENTQLQNEKLYLYYLQNGRDMYVDQELDINRLSDYDVDHIVPQSFLKDDSIDNKVLTRSDKARGKSDNVPSEEVVKKMKNYWRQLLNAKLITQRKFDNLTKAERGGLSELDKAGFIKRQLVETRQITKHVAQILDSRMNTKYDENDKLIREVKVITLKSKLVSDFRKDFQFYKVREINNYHHAHDAYLNAVVGTALIKKYPKLESEFVYGDYKVYDVRKMIAKSEQEIGKATAKYFFYSNIMNFFKTEITLANGEIRKRPLIETNGETGEIVWDKGRDFATVRKVLSMPQVNIVKKTEVQTGGFSKESILPKRNSDKLIARKKDWDPKKYGGFDSPTVAYSVLVVAKVEKGKSKKLKSVKELLGITIMERSSFEKNPIDFLEAKGYKEVKKDLIIKLPKYSLFELENGRKRMLASAGELQKGNELALPSKYVNFLYLASHYEKLKGSPEDNEQKQLFVEQHKHYLDEIIEQISEFSKRVILADANLDKVLSAYNKHRDKPIREQAENIIHLFTLTNLGAPAAFKYFDTTIDRKRYTSTKEVLDATLIHQSITGLYETRIDLSQLGGDGGEAAAKPAPGGSGGTLNIEDEYRLHETSKGPDVPLGSTWLSDFPQAWAETGGMGLAVRQAPLIIPLKATSTPVSIKQYPMSQEARLGIKPHIQRLLDQGILVPCQSPWNTPLLPVKKPGTNDYRPVQDLREVNKRVEDIHPTVPNPYNLLSGLPPSHQWYTVLDLKDAFFCLRLHPTSQSLFAFEWRDPEMGISGQLTWTRLPQGFKNSPTLFNEALHRDLADFRIQHPDLILLQYVDDLLLAATSELDCQQGTRALLQTLGDLGYRASAKKAQICQKQVKYLGYLLKEGQRWLTEARKETVMGQPTPKTPRQLREFLGTAGFCRLWIPGFAEMAAPLYPLTKPGTLFEWGPDQQKAYQEIKQALLTAPALGLPDLTKPFELFVDEKQGYAKGVLTQKLGPWRRPVAYLSKKLDPVAAGWPPCLRMVAAIAVLTKDAGKLTMGQPLVILAPHAVEALVKQPPDRWLSNARMTHYQALLLDTDRVQFGPIVALNPATLLPLPEEGLQHDCLDILAEAHGTRPDLTDQPLPDADHTWYTDGSSFLQEGQRKAGAAVTTETEVVWAKALPAGTSAQRAELIALTQALKMAEGKKLNVYTDSRYAFATAHIHGEIYRRRGWLTSEGKEIKNKDEILALLKALFLPKRLSIIHCPGHQKGNRAEARGNRMADQAAREVATRETPETSTLLAGKRTADGSEFEKRTADGSEFESPKKKAKVE

SEQ ID NO: 2496 - protein, 2094 aa, synthetic construct
MPAAKRVKLDGGDKKYSIGLDIGTNSVGWAVITDEYKVPSKKFKVLGNTDRHSIKKNLIGALLFDSGETAEATRLKRTARRRYTRRKNRICYLQEIFSNEMAKVDDSFFHRLEESFLVEEDKKHERHPIFGNIVDEVAYHEKYPTIYHLRKKLVDSTDKADLRLIYLALAHMIKFRGHFLIEGDLNPDNSDVDKLFIQLVQTYNQLFEENPINASGVDAKAILSARLSKSRRLENLIAQLPGEKKNGLFGNLIALSLGLTPNFKSNFDLAEDAKLQLSKDTYDDDLDNLLAQIGDQYADLFLAAKNLSDAILLSDILRVNTEITKAPLSASMIKRYDEHHQDLTLLKALVRQQLPEKYKEIFFDQSKNGYAGYIDGGASQEEFYKFIKPILEKMDGTEELLVKLNREDLLRKQRTFDNGSIPHQIHLGELHAILRRQEDFYPFLKDNREKIEKILTFRIPYYVGPLARGNSRFAWMTRKSEETITPWNFEEVVDKGASAQSFIERMTNFDKNLPNEKVLPKHSLLYEYFTVYNELTKVKYVTEGMRKPAFLSGEQKKAIVDLLFKTNRKVTVKQLKEDYFKKIECFDSVEISGVEDRFNASLGTYHDLLKIIKDKDFLDNEENEDILEDIVLTLTLFEDREMIEERLKTYAHLFDDKVMKQLKRRRYTGWGRLSRKLINGIRDKQSGKTILDFLKSDGFANRNFMQLIHDDSLTFKEDIQKAQVSGQGDSLHEHIANLAGSPAIKKGILQTVKVVDELVKVMGRHKPENIVIEMARENQTTQKGQKNSRERMKRIEEGIKELGSQILKEHPVENTQLQNEKLYLYYLQNGRDMYVDQELDINRLSDYDVDHIVPQSFLKDDSIDNKVLTRSDKARGKSDNVPSEEVVKKMKNYWRQLLNAKLITQRKFDNLTKAERGGLSELDKAGFIKRQLVETRQITKHVAQILDSRMNTKYDENDKLIREVKVITLKSKLVSDFRKDFQFYKVREINNYHHAHDAYLNAVVGTALIKKYPKLESEFVYGDYKVYDVRKMIAKSEQEIGKATAKYFFYSNIMNFFKTEITLANGEIRKRPLIETNGETGEIVWDKGRDFATVRKVLSMPQVNIVKKTEVQTGGFSKESILPKRNSDKLIARKKDWDPKKYGGFDSPTVAYSVLVVAKVEKGKSKKLKSVKELLGITIMERSSFEKNPIDFLEAKGYKEVKKDLIIKLPKYSLFELENGRKRMLASAGELQKGNELALPSKYVNFLYLASHYEKLKGSPEDNEQKQLFVEQHKHYLDEIIEQISEFSKRVILADANLDKVLSAYNKHRDKPIREQAENIIHLFTLTNLGAPAAFKYFDTTIDRKRYTSTKEVLDATLIHQSITGLYETRIDLSQLGGDGGGGGPAPGGSGGTLNIEDEYRLHETSKGPDVPLGSTWLSDFPQAWAETGGMGLAVRQAPLIIPLKATSTPVSIKQYPMSQEARLGIKPHIQRLLDQGILVPCQSPWNTPLLPVKKPGTNDYRPVQDLREVNKRVEDIHPTVPNPYNLLSGLPPSHQWYTVLDLKDAFFCLRLHPTSQSLFAFEWRDPEMGISGQLTWTRLPQGFKNSPTLFNEALHRDLADFRIQHPDLILLQYVDDLLLAATSELDCQQGTRALLQTLGDLGYRASAKKAQICQKQVKYLGYLLKEGQRWLTEARKETVMGQPTPKTPRQLREFLGTAGFCRLWIPGFAEMAAPLYPLTKPGTLFEWGPDQQKAYQEIKQALLTAPALGLPDLTKPFELFVDEKQGYAKGVLTQKLGPWRRPVAYLSKKLDPVAAGWPPCLRMVAAIAVLTKDAGKLTMGQPLVILAPHAVEALVKQPPDRWLSNARMTHYQALLLDTDRVQFGPIVALNPATLLPLPEEGLQHDCLDILAEAHGTRPDLTDQPLPDADHTWYTDGSSFLQEGQRKAGAAVTTETEVVWAKALPAGTSAQRAELIALTQALKMAEGKKLNVYTDSRYAFATAHIHGEIYRRRGWLTSEGKEIKNKDEILALLKALFLPKRLSIIHCPGHQKGNRAEARGNRMADQAAREVATRETPETSTLLAGKRTADGSEFEKRTADGSEFESPKKKAKVE

SEQ ID NO: 2497 - protein, 2091 aa, synthetic construct
MPAAKRVKLDGGDKKYSIGLDIGTNSVGWAVITDEYKVPSKKFKVLGNTDRHSIKKNLIGALLFDSGETAEATRLKRTARRRYTRRKNRICYLQEIFSNEMAKVDDSFFHRLEESFLVEEDKKHERHPIFGNIVDEVAYHEKYPTIYHLRKKLVDSTDKADLRLIYLALAHMIKFRGHFLIEGDLNPDNSDVDKLFIQLVQTYNQLFEENPINASGVDAKAILSARLSKSRRLENLIAQLPGEKKNGLFGNLIALSLGLTPNFKSNFDLAEDAKLQLSKDTYDDDLDNLLAQIGDQYADLFLAAKNLSDAILLSDILRVNTEITKAPLSASMIKRYDEHHQDLTLLKALVRQQLPEKYKEIFFDQSKNGYAGYIDGGASQEEFYKFIKPILEKMDGTEELLVKLNREDLLRKQRTFDNGSIPHQIHLGELHAILRRQEDFYPFLKDNREKIEKILTFRIPYYVGPLARGNSRFAWMTRKSEETITPWNFEEVVDKGASAQSFIERMTNFDKNLPNEKVLPKHSLLYEYFTVYNELTKVKYVTEGMRKPAFLSGEQKKAIVDLLFKTNRKVTVKQLKEDYFKKIECFDSVEISGVEDRFNASLGTYHDLLKIIKDKDFLDNEENEDILEDIVLTLTLFEDREMIEERLKTYAHLFDDKVMKQLKRRRYTGWGRLSRKLINGIRDKQSGKTILDFLKSDGFANRNFMQLIHDDSLTFKEDIQKAQVSGQGDSLHEHIANLAGSPAIKKGILQTVKVVDELVKVMGRHKPENIVIEMARENQTTQKGQKNSRERMKRIEEGIKELGSQILKEHPVENTQLQNEKLYLYYLQNGRDMYVDQELDINRLSDYDVDHIVPQSFLKDDSIDNKVLTRSDKARGKSDNVPSEEVVKKMKNYWRQLLNAKLITQRKFDNLTKAERGGLSELDKAGFIKRQLVETRQITKHVAQILDSRMNTKYDENDKLIREVKVITLKSKLVSDFRKDFQFYKVREINNYHHAHDAYLNAVVGTALIKKYPKLESEFVYGDYKVYDVRKMIAKSEQEIGKATAKYFFYSNIMNFFKTEITLANGEIRKRPLIETNGETGEIVWDKGRDFATVRKVLSMPQVNIVKKTEVQTGGFSKESILPKRNSDKLIARKKDWDPKKYGGFDSPTVAYSVLVVAKVEKGKSKKLKSVKELLGITIMERSSFEKNPIDFLEAKGYKEVKKDLIIKLPKYSLFELENGRKRMLASAGELQKGNELALPSKYVNFLYLASHYEKLKGSPEDNEQKQLFVEQHKHYLDEIIEQISEFSKRVILADANLDKVLSAYNKHRDKPIREQAENIIHLFTLTNLGAPAAFKYFDTTIDRKRYTSTKEVLDATLIHQSITGLYETRIDLSQLGGDGGPAPGGSGGTLNIEDEYRLHETSKGPDVPLGSTWLSDFPQAWAETGGMGLAVRQAPLIIPLKATSTPVSIKQYPMSQEARLGIKPHIQRLLDQGILVPCQSPWNTPLLPVKKPGTNDYRPVQDLREVNKRVEDIHPTVPNPYNLLSGLPPSHQWYTVLDLKDAFFCLRLHPTSQSLFAFEWRDPEMGISGQLTWTRLPQGFKNSPTLFNEALHRDLADFRIQHPDLILLQYVDDLLLAATSELDCQQGTRALLQTLGDLGYRASAKKAQICQKQVKYLGYLLKEGQRWLTEARKETVMGQPTPKTPRQLREFLGTAGFCRLWIPGFAEMAAPLYPLTKPGTLFEWGPDQQKAYQEIKQALLTAPALGLPDLTKPFELFVDEKQGYAKGVLTQKLGPWRRPVAYLSKKLDPVAAGWPPCLRMVAAIAVLTKDAGKLTMGQPLVILAPHAVEALVKQPPDRWLSNARMTHYQALLLDTDRVQFGPIVALNPATLLPLPEEGLQHDCLDILAEAHGTRPDLTDQPLPDADHTWYTDGSSFLQEGQRKAGAAVTTETEVVWAKALPAGTSAQRAELIALTQALKMAEGKKLNVYTDSRYAFATAHIHGEIYRRRGWLTSEGKEIKNKDEILALLKALFLPKRLSIIHCPGHQKGNRAEARGNRMADQAAREVATRETPETSTLLAGKRTADGSEFEKRTADGSEFESPKKKAKVE

SEQ ID NO: 2498 - protein, 2094 aa, synthetic construct
MPAAKRVKLDGGDKKYSIGLDIGTNSVGWAVITDEYKVPSKKFKVLGNTDRHSIKKNLIGALLFDSGETAEATRLKRTARRRYTRRKNRICYLQEIFSNEMAKVDDSFFHRLEESFLVEEDKKHERHPIFGNIVDEVAYHEKYPTIYHLRKKLVDSTDKADLRLIYLALAHMIKFRGHFLIEGDLNPDNSDVDKLFIQLVQTYNQLFEENPINASGVDAKAILSARLSKSRRLENLIAQLPGEKKNGLFGNLIALSLGLTPNFKSNFDLAEDAKLQLSKDTYDDDLDNLLAQIGDQYADLFLAAKNLSDAILLSDILRVNTEITKAPLSASMIKRYDEHHQDLTLLKALVRQQLPEKYKEIFFDQSKNGYAGYIDGGASQEEFYKFIKPILEKMDGTEELLVKLNREDLLRKQRTFDNGSIPHQIHLGELHAILRRQEDFYPFLKDNREKIEKILTFRIPYYVGPLARGNSRFAWMTRKSEETITPWNFEEVVDKGASAQSFIERMTNFDKNLPNEKVLPKHSLLYEYFTVYNELTKVKYVTEGMRKPAFLSGEQKKAIVDLLFKTNRKVTVKQLKEDYFKKIECFDSVEISGVEDRFNASLGTYHDLLKIIKDKDFLDNEENEDILEDIVLTLTLFEDREMIEERLKTYAHLFDDKVMKQLKRRRYTGWGRLSRKLINGIRDKQSGKTILDFLKSDGFANRNFMQLIHDDSLTFKEDIQKAQVSGQGDSLHEHIANLAGSPAIKKGILQTVKVVDELVKVMGRHKPENIVIEMARENQTTQKGQKNSRERMKRIEEGIKELGSQILKEHPVENTQLQNEKLYLYYLQNGRDMYVDQELDINRLSDYDVDHIVPQSFLKDDSIDNKVLTRSDKARGKSDNVPSEEVVKKMKNYWRQLLNAKLITQRKFDNLTKAERGGLSELDKAGFIKRQLVETRQITKHVAQILDSRMNTKYDENDKLIREVKVITLKSKLVSDFRKDFQFYKVREINNYHHAHDAYLNAVVGTALIKKYPKLESEFVYGDYKVYDVRKMIAKSEQEIGKATAKYFFYSNIMNFFKTEITLANGEIRKRPLIETNGETGEIVWDKGRDFATVRKVLSMPQVNIVKKTEVQTGGFSKESILPKRNSDKLIARKKDWDPKKYGGFDSPTVAYSVLVVAKVEKGKSKKLKSVKELLGITIMERSSFEKNPIDFLEAKGYKEVKKDLIIKLPKYSLFELENGRKRMLASAGELQKGNELALPSKYVNFLYLASHYEKLKGSPEDNEQKQLFVEQHKHYLDEIIEQISEFSKRVILADANLDKVLSAYNKHRDKPIREQAENIIHLFTLTNLGAPAAFKYFDTTIDRKRYTSTKEVLDATLIHQSITGLYETRIDLSQLGGDGGGGGGGSPAPGGTLNIEDEYRLHETSKGPDVPLGSTWLSDFPQAWAETGGMGLAVRQAPLIIPLKATSTPVSIKQYPMSQEARLGIKPHIQRLLDQGILVPCQSPWNTPLLPVKKPGTNDYRPVQDLREVNKRVEDIHPTVPNPYNLLSGLPPSHQWYTVLDLKDAFFCLRLHPTSQSLFAFEWRDPEMGISGQLTWTRLPQGFKNSPTLFNEALHRDLADFRIQHPDLILLQYVDDLLLAATSELDCQQGTRALLQTLGDLGYRASAKKAQICQKQVKYLGYLLKEGQRWLTEARKETVMGQPTPKTPRQLREFLGTAGFCRLWIPGFAEMAAPLYPLTKPGTLFEWGPDQQKAYQEIKQALLTAPALGLPDLTKPFELFVDEKQGYAKGVLTQKLGPWRRPVAYLSKKLDPVAAGWPPCLRMVAAIAVLTKDAGKLTMGQPLVILAPHAVEALVKQPPDRWLSNARMTHYQALLLDTDRVQFGPIVALNPATLLPLPEEGLQHDCLDILAEAHGTRPDLTDQPLPDADHTWYTDGSSFLQEGQRKAGAAVTTETEVVWAKALPAGTSAQRAELIALTQALKMAEGKKLNVYTDSRYAFATAHIHGEIYRRRGWLTSEGKEIKNKDEILALLKALFLPKRLSIIHCPGHQKGNRAEARGNRMADQAAREVATRETPETSTLLAGKRTADGSEFEKRTADGSEFESPKKKAKVE

SEQ ID NO: 2499 - protein, 2094 aa, synthetic construct
MPAAKRVKLDGGDKKYSIGLDIGTNSVGWAVITDEYKVPSKKFKVLGNTDRHSIKKNLIGALLFDSGETAEATRLKRTARRRYTRRKNRICYLQEIFSNEMAKVDDSFFHRLEESFLVEEDKKHERHPIFGNIVDEVAYHEKYPTIYHLRKKLVDSTDKADLRLIYLALAHMIKFRGHFLIEGDLNPDNSDVDKLFIQLVQTYNQLFEENPINASGVDAKAILSARLSKSRRLENLIAQLPGEKKNGLFGNLIALSLGLTPNFKSNFDLAEDAKLQLSKDTYDDDLDNLLAQIGDQYADLFLAAKNLSDAILLSDILRVNTEITKAPLSASMIKRYDEHHQDLTLLKALVRQQLPEKYKEIFFDQSKNGYAGYIDGGASQEEFYKFIKPILEKMDGTEELLVKLNREDLLRKQRTFDNGSIPHQIHLGELHAILRRQEDFYPFLKDNREKIEKILTFRIPYYVGPLARGNSRFAWMTRKSEETITPWNFEEVVDKGASAQSFIERMTNFDKNLPNEKVLPKHSLLYEYFTVYNELTKVKYVTEGMRKPAFLSGEQKKAIVDLLFKTNRKVTVKQLKEDYFKKIECFDSVEISGVEDRFNASLGTYHDLLKIIKDKDFLDNEENEDILEDIVLTLTLFEDREMIEERLKTYAHLFDDKVMKQLKRRRYTGWGRLSRKLINGIRDKQSGKTILDFLKSDGFANRNFMQLIHDDSLTFKEDIQKAQVSGQGDSLHEHIANLAGSPAIKKGILQTVKVVDELVKVMGRHKPENIVIEMARENQTTQKGQKNSRERMKRIEEGIKELGSQILKEHPVENTQLQNEKLYLYYLQNGRDMYVDQELDINRLSDYDVDHIVPQSFLKDDSIDNKVLTRSDKARGKSDNVPSEEVVKKMKNYWRQLLNAKLITQRKFDNLTKAERGGLSELDKAGFIKRQLVETRQITKHVAQILDSRMNTKYDENDKLIREVKVITLKSKLVSDFRKDFQFYKVREINNYHHAHDAYLNAVVGTALIKKYPKLESEFVYGDYKVYDVRKMIAKSEQEIGKATAKYFFYSNIMNFFKTEITLANGEIRKRPLIETNGETGEIVWDKGRDFATVRKVLSMPQVNIVKKTEVQTGGFSKESILPKRNSDKLIARKKDWDPKKYGGFDSPTVAYSVLVVAKVEKGKSKKLKSVKELLGITIMERSSFEKNPIDFLEAKGYKEVKKDLIIKLPKYSLFELENGRKRMLASAGELQKGNELALPSKYVNFLYLASHYEKLKGSPEDNEQKQLFVEQHKHYLDEIIEQISEFSKRVILADANLDKVLSAYNKHRDKPIREQAENIIHLFTLTNLGAPAAFKYFDTTIDRKRYTSTKEVLDATLIHQSITGLYETRIDLSQLGGDGGGGSGGSGGSGGTLNIEDEYRLHETSKGPDVPLGSTWLSDFPQAWAETGGMGLAVRQAPLIIPLKATSTPVSIKQYPMSQEARLGIKPHIQRLLDQGILVPCQSPWNTPLLPVKKPGTNDYRPVQDLREVNKRVEDIHPTVPNPYNLLSGLPPSHQWYTVLDLKDAFFCLRLHPTSQSLFAFEWRDPEMGISGQLTWTRLPQGFKNSPTLFNEALHRDLADFRIQHPDLILLQYVDDLLLAATSELDCQQGTRALLQTLGDLGYRASAKKAQICQKQVKYLGYLLKEGQRWLTEARKETVMGQPTPKTPRQLREFLGTAGFCRLWIPGFAEMAAPLYPLTKPGTLFEWGPDQQKAYQEIKQALLTAPALGLPDLTKPFELFVDEKQGYAKGVLTQKLGPWRRPVAYLSKKLDPVAAGWPPCLRMVAAIAVLTKDAGKLTMGQPLVILAPHAVEALVKQPPDRWLSNARMTHYQALLLDTDRVQFGPIVALNPATLLPLPEEGLQHDCLDILAEAHGTRPDLTDQPLPDADHTWYTDGSSFLQEGQRKAGAAVTTETEVVWAKALPAGTSAQRAELIALTQALKMAEGKKLNVYTDSRYAFATAHIHGEIYRRRGWLTSEGKEIKNKDEILALLKALFLPKRLSIIHCPGHQKGNRAEARGNRMADQAAREVATRETPETSTLLAGKRTADGSEFEKRTADGSEFESPKKKAKVE

SEQ ID NO: 2500 - protein, 2093 aa, synthetic construct
MPAAKRVKLDGGDKKYSIGLDIGTNSVGWAVITDEYKVPSKKFKVLGNTDRHSIKKNLIGALLFDSGETAEATRLKRTARRRYTRRKNRICYLQEIFSNEMAKVDDSFFHRLEESFLVEEDKKHERHPIFGNIVDEVAYHEKYPTIYHLRKKLVDSTDKADLRLIYLALAHMIKFRGHFLIEGDLNPDNSDVDKLFIQLVQTYNQLFEENPINASGVDAKAILSARLSKSRRLENLIAQLPGEKKNGLFGNLIALSLGLTPNFKSNFDLAEDAKLQLSKDTYDDDLDNLLAQIGDQYADLFLAAKNLSDAILLSDILRVNTEITKAPLSASMIKRYDEHHQDLTLLKALVRQQLPEKYKEIFFDQSKNGYAGYIDGGASQEEFYKFIKPILEKMDGTEELLVKLNREDLLRKQRTFDNGSIPHQIHLGELHAILRRQEDFYPFLKDNREKIEKILTFRIPYYVGPLARGNSRFAWMTRKSEETITPWNFEEVVDKGASAQSFIERMTNFDKNLPNEKVLPKHSLLYEYFTVYNELTKVKYVTEGMRKPAFLSGEQKKAIVDLLFKTNRKVTVKQLKEDYFKKIECFDSVEISGVEDRFNASLGTYHDLLKIIKDKDFLDNEENEDILEDIVLTLTLFEDREMIEERLKTYAHLFDDKVMKQLKRRRYTGWGRLSRKLINGIRDKQSGKTILDFLKSDGFANRNFMQLIHDDSLTFKEDIQKAQVSGQGDSLHEHIANLAGSPAIKKGILQTVKVVDELVKVMGRHKPENIVIEMARENQTTQKGQKNSRERMKRIEEGIKELGSQILKEHPVENTQLQNEKLYLYYLQNGRDMYVDQELDINRLSDYDVDHIVPQSFLKDDSIDNKVLTRSDKARGKSDNVPSEEVVKKMKNYWRQLLNAKLITQRKFDNLTKAERGGLSELDKAGFIKRQLVETRQITKHVAQILDSRMNTKYDENDKLIREVKVITLKSKLVSDFRKDFQFYKVREINNYHHAHDAYLNAVVGTALIKKYPKLESEFVYGDYKVYDVRKMIAKSEQEIGKATAKYFFYSNIMNFFKTEITLANGEIRKRPLIETNGETGEIVWDKGRDFATVRKVLSMPQVNIVKKTEVQTGGFSKESILPKRNSDKLIARKKDWDPKKYGGFDSPTVAYSVLVVAKVEKGKSKKLKSVKELLGITIMERSSFEKNPIDFLEAKGYKEVKKDLIIKLPKYSLFELENGRKRMLASAGELQKGNELALPSKYVNFLYLASHYEKLKGSPEDNEQKQLFVEQHKHYLDEIIEQISEFSKRVILADANLDKVLSAYNKHRDKPIREQAENIIHLFTLTNLGAPAAFKYFDTTIDRKRYTSTKEVLDATLIHQSITGLYETRIDLSQLGGDGGGGGGGGGGGGTLNIEDEYRLHETSKGPDVPLGSTWLSDFPQAWAETGGMGLAVRQAPLIIPLKATSTPVSIKQYPMSQEARLGIKPHIQRLLDQGILVPCQSPWNTPLLPVKKPGTNDYRPVQDLREVNKRVEDIHPTVPNPYNLLSGLPPSHQWYTVLDLKDAFFCLRLHPTSQSLFAFEWRDPEMGISGQLTWTRLPQGFKNSPTLFNEALHRDLADFRIQHPDLILLQYVDDLLLAATSELDCQQGTRALLQTLGDLGYRASAKKAQICQKQVKYLGYLLKEGQRWLTEARKETVMGQPTPKTPRQLREFLGTAGFCRLWIPGFAEMAAPLYPLTKPGTLFEWGPDQQKAYQEIKQALLTAPALGLPDLTKPFELFVDEKQGYAKGVLTQKLGPWRRPVAYLSKKLDPVAAGWPPCLRMVAAIAVLTKDAGKLTMGQPLVILAPHAVEALVKQPPDRWLSNARMTHYQALLLDTDRVQFGPIVALNPATLLPLPEEGLQHDCLDILAEAHGTRPDLTDQPLPDADHTWYTDGSSFLQEGQRKAGAAVTTETEVVWAKALPAGTSAQRAELIALTQALKMAEGKKLNVYTDSRYAFATAHIHGEIYRRRGWLTSEGKEIKNKDEILALLKALFLPKRLSIIHCPGHQKGNRAEARGNRMADQAAREVATRETPETSTLLAGKRTADGSEFEKRTADGSEFESPKKKAKVE

SEQ ID NO: 2501 - protein, 2094 aa, synthetic construct
MPAAKRVKLDGGDKKYSIGLDIGTNSVGWAVITDEYKVPSKKFKVLGNTDRHSIKKNLIGALLFDSGETAEATRLKRTARRRYTRRKNRICYLQEIFSNEMAKVDDSFFHRLEESFLVEEDKKHERHPIFGNIVDEVAYHEKYPTIYHLRKKLVDSTDKADLRLIYLALAHMIKFRGHFLIEGDLNPDNSDVDKLFIQLVQTYNQLFEENPINASGVDAKAILSARLSKSRRLENLIAQLPGEKKNGLFGNLIALSLGLTPNFKSNFDLAEDAKLQLSKDTYDDDLDNLLAQIGDQYADLFLAAKNLSDAILLSDILRVNTEITKAPLSASMIKRYDEHHQDLTLLKALVRQQLPEKYKEIFFDQSKNGYAGYIDGGASQEEFYKFIKPILEKMDGTEELLVKLNREDLLRKQRTFDNGSIPHQIHLGELHAILRRQEDFYPFLKDNREKIEKILTFRIPYYVGPLARGNSRFAWMTRKSEETITPWNFEEVVDKGASAQSFIERMTNFDKNLPNEKVLPKHSLLYEYFTVYNELTKVKYVTEGMRKPAFLSGEQKKAIVDLLFKTNRKVTVKQLKEDYFKKIECFDSVEISGVEDRFNASLGTYHDLLKIIKDKDFLDNEENEDILEDIVLTLTLFEDREMIEERLKTYAHLFDDKVMKQLKRRRYTGWGRLSRKLINGIRDKQSGKTILDFLKSDGFANRNFMQLIHDDSLTFKEDIQKAQVSGQGDSLHEHIANLAGSPAIKKGILQTVKVVDELVKVMGRHKPENIVIEMARENQTTQKGQKNSRERMKRIEEGIKELGSQILKEHPVENTQLQNEKLYLYYLQNGRDMYVDQELDINRLSDYDVDHIVPQSFLKDDSIDNKVLTRSDKARGKSDNVPSEEVVKKMKNYWRQLLNAKLITQRKFDNLTKAERGGLSELDKAGFIKRQLVETRQITKHVAQILDSRMNTKYDENDKLIREVKVITLKSKLVSDFRKDFQFYKVREINNYHHAHDAYLNAVVGTALIKKYPKLESEFVYGDYKVYDVRKMIAKSEQEIGKATAKYFFYSNIMNFFKTEITLANGEIRKRPLIETNGETGEIVWDKGRDFATVRKVLSMPQVNIVKKTEVQTGGFSKESILPKRNSDKLIARKKDWDPKKYGGFDSPTVAYSVLVVAKVEKGKSKKLKSVKELLGITIMERSSFEKNPIDFLEAKGYKEVKKDLIIKLPKYSLFELENGRKRMLASAGELQKGNELALPSKYVNFLYLASHYEKLKGSPEDNEQKQLFVEQHKHYLDEIIEQISEFSKRVILADANLDKVLSAYNKHRDKPIREQAENIIHLFTLTNLGAPAAFKYFDTTIDRKRYTSTKEVLDATLIHQSITGLYETRIDLSQLGGDGGGSSPAPGGSGGTLNIEDEYRLHETSKGPDVPLGSTWLSDFPQAWAETGGMGLAVRQAPLIIPLKATSTPVSIKQYPMSQEARLGIKPHIQRLLDQGILVPCQSPWNTPLLPVKKPGTNDYRPVQDLREVNKRVEDIHPTVPNPYNLLSGLPPSHQWYTVLDLKDAFFCLRLHPTSQSLFAFEWRDPEMGISGQLTWTRLPQGFKNSPTLFNEALHRDLADFRIQHPDLILLQYVDDLLLAATSELDCQQGTRALLQTLGDLGYRASAKKAQICQKQVKYLGYLLKEGQRWLTEARKETVMGQPTPKTPRQLREFLGTAGFCRLWIPGFAEMAAPLYPLTKPGTLFEWGPDQQKAYQEIKQALLTAPALGLPDLTKPFELFVDEKQGYAKGVLTQKLGPWRRPVAYLSKKLDPVAAGWPPCLRMVAAIAVLTKDAGKLTMGQPLVILAPHAVEALVKQPPDRWLSNARMTHYQALLLDTDRVQFGPIVALNPATLLPLPEEGLQHDCLDILAEAHGTRPDLTDQPLPDADHTWYTDGSSFLQEGQRKAGAAVTTETEVVWAKALPAGTSAQRAELIALTQALKMAEGKKLNVYTDSRYAFATAHIHGEIYRRRGWLTSEGKEIKNKDEILALLKALFLPKRLSIIHCPGHQKGNRAEARGNRMADQAAREVATRETPETSTLLAGKRTADGSEFEKRTADGSEFESPKKKAKVE

SEQ ID NO: 2502 - protein, 2094 aa, synthetic construct
MPAAKRVKLDGGDKKYSIGLDIGTNSVGWAVITDEYKVPSKKFKVLGNTDRHSIKKNLIGALLFDSGETAEATRLKRTARRRYTRRKNRICYLQEIFSNEMAKVDDSFFHRLEESFLVEEDKKHERHPIFGNIVDEVAYHEKYPTIYHLRKKLVDSTDKADLRLIYLALAHMIKFRGHFLIEGDLNPDNSDVDKLFIQLVQTYNQLFEENPINASGVDAKAILSARLSKSRRLENLIAQLPGEKKNGLFGNLIALSLGLTPNFKSNFDLAEDAKLQLSKDTYDDDLDNLLAQIGDQYADLFLAAKNLSDAILLSDILRVNTEITKAPLSASMIKRYDEHHQDLTLLKALVRQQLPEKYKEIFFDQSKNGYAGYIDGGASQEEFYKFIKPILEKMDGTEELLVKLNREDLLRKQRTFDNGSIPHQIHLGELHAILRRQEDFYPFLKDNREKIEKILTFRIPYYVGPLARGNSRFAWMTRKSEETITPWNFEEVVDKGASAQSFIERMTNFDKNLPNEKVLPKHSLLYEYFTVYNELTKVKYVTEGMRKPAFLSGEQKKAIVDLLFKTNRKVTVKQLKEDYFKKIECFDSVEISGVEDRFNASLGTYHDLLKIIKDKDFLDNEENEDILEDIVLTLTLFEDREMIEERLKTYAHLFDDKVMKQLKRRRYTGWGRLSRKLINGIRDKQSGKTILDFLKSDGFANRNFMQLIHDDSLTFKEDIQKAQVSGQGDSLHEHIANLAGSPAIKKGILQTVKVVDELVKVMGRHKPENIVIEMARENQTTQKGQKNSRERMKRIEEGIKELGSQILKEHPVENTQLQNEKLYLYYLQNGRDMYVDQELDINRLSDYDVDHIVPQSFLKDDSIDNKVLTRSDKARGKSDNVPSEEVVKKMKNYWRQLLNAKLITQRKFDNLTKAERGGLSELDKAGFIKRQLVETRQITKHVAQILDSRMNTKYDENDKLIREVKVITLKSKLVSDFRKDFQFYKVREINNYHHAHDAYLNAVVGTALIKKYPKLESEFVYGDYKVYDVRKMIAKSEQEIGKATAKYFFYSNIMNFFKTEITLANGEIRKRPLIETNGETGEIVWDKGRDFATVRKVLSMPQVNIVKKTEVQTGGFSKESILPKRNSDKLIARKKDWDPKKYGGFDSPTVAYSVLVVAKVEKGKSKKLKSVKELLGITIMERSSFEKNPIDFLEAKGYKEVKKDLIIKLPKYSLFELENGRKRMLASAGELQKGNELALPSKYVNFLYLASHYEKLKGSPEDNEQKQLFVEQHKHYLDEIIEQISEFSKRVILADANLDKVLSAYNKHRDKPIREQAENIIHLFTLTNLGAPAAFKYFDTTIDRKRYTSTKEVLDATLIHQSITGLYETRIDLSQLGGDGGPAPGGGGGSGGTLNIEDEYRLHETSKGPDVPLGSTWLSDFPQAWAETGGMGLAVRQAPLIIPLKATSTPVSIKQYPMSQEARLGIKPHIQRLLDQGILVPCQSPWNTPLLPVKKPGTNDYRPVQDLREVNKRVEDIHPTVPNPYNLLSGLPPSHQWYTVLDLKDAFFCLRLHPTSQSLFAFEWRDPEMGISGQLTWTRLPQGFKNSPTLFNEALHRDLADFRIQHPDLILLQYVDDLLLAATSELDCQQGTRALLQTLGDLGYRASAKKAQICQKQVKYLGYLLKEGQRWLTEARKETVMGQPTPKTPRQLREFLGTAGFCRLWIPGFAEMAAPLYPLTKPGTLFEWGPDQQKAYQEIKQALLTAPALGLPDLTKPFELFVDEKQGYAKGVLTQKLGPWRRPVAYLSKKLDPVAAGWPPCLRMVAAIAVLTKDAGKLTMGQPLVILAPHAVEALVKQPPDRWLSNARMTHYQALLLDTDRVQFGPIVALNPATLLPLPEEGLQHDCLDILAEAHGTRPDLTDQPLPDADHTWYTDGSSFLQEGQRKAGAAVTTETEVVWAKALPAGTSAQRAELIALTQALKMAEGKKLNVYTDSRYAFATAHIHGEIYRRRGWLTSEGKEIKNKDEILALLKALFLPKRLSIIHCPGHQKGNRAEARGNRMADQAAREVATRETPETSTLLAGKRTADGSEFEKRTADGSEFESPKKKAKVE

SEQ ID NO: 2503 - protein, 2093 aa, synthetic construct
MPAAKRVKLDGGDKKYSIGLDIGTNSVGWAVITDEYKVPSKKFKVLGNTDRHSIKKNLIGALLFDSGETAEATRLKRTARRRYTRRKNRICYLQEIFSNEMAKVDDSFFHRLEESFLVEEDKKHERHPIFGNIVDEVAYHEKYPTIYHLRKKLVDSTDKADLRLIYLALAHMIKFRGHFLIEGDLNPDNSDVDKLFIQLVQTYNQLFEENPINASGVDAKAILSARLSKSRRLENLIAQLPGEKKNGLFGNLIALSLGLTPNFKSNFDLAEDAKLQLSKDTYDDDLDNLLAQIGDQYADLFLAAKNLSDAILLSDILRVNTEITKAPLSASMIKRYDEHHQDLTLLKALVRQQLPEKYKEIFFDQSKNGYAGYIDGGASQEEFYKFIKPILEKMDGTEELLVKLNREDLLRKQRTFDNGSIPHQIHLGELHAILRRQEDFYPFLKDNREKIEKILTFRIPYYVGPLARGNSRFAWMTRKSEETITPWNFEEVVDKGASAQSFIERMTNFDKNLPNEKVLPKHSLLYEYFTVYNELTKVKYVTEGMRKPAFLSGEQKKAIVDLLFKTNRKVTVKQLKEDYFKKIECFDSVEISGVEDRFNASLGTYHDLLKIIKDKDFLDNEENEDILEDIVLTLTLFEDREMIEERLKTYAHLFDDKVMKQLKRRRYTGWGRLSRKLINGIRDKQSGKTILDFLKSDGFANRNFMQLIHDDSLTFKEDIQKAQVSGQGDSLHEHIANLAGSPAIKKGILQTVKVVDELVKVMGRHKPENIVIEMARENQTTQKGQKNSRERMKRIEEGIKELGSQILKEHPVENTQLQNEKLYLYYLQNGRDMYVDQELDINRLSDYDVDHIVPQSFLKDDSIDNKVLTRSDKARGKSDNVPSEEVVKKMKNYWRQLLNAKLITQRKFDNLTKAERGGLSELDKAGFIKRQLVETRQITKHVAQILDSRMNTKYDENDKLIREVKVITLKSKLVSDFRKDFQFYKVREINNYHHAHDAYLNAVVGTALIKKYPKLESEFVYGDYKVYDVRKMIAKSEQEIGKATAKYFFYSNIMNFFKTEITLANGEIRKRPLIETNGETGEIVWDKGRDFATVRKVLSMPQVNIVKKTEVQTGGFSKESILPKRNSDKLIARKKDWDPKKYGGFDSPTVAYSVLVVAKVEKGKSKKLKSVKELLGITIMERSSFEKNPIDFLEAKGYKEVKKDLIIKLPKYSLFELENGRKRMLASAGELQKGNELALPSKYVNFLYLASHYEKLKGSPEDNEQKQLFVEQHKHYLDEIIEQISEFSKRVILADANLDKVLSAYNKHRDKPIREQAENIIHLFTLTNLGAPAAFKYFDTTIDRKRYTSTKEVLDATLIHQSITGLYETRIDLSQLGGDGGGSSEAAAKGGTLNIEDEYRLHETSKGPDVPLGSTWLSDFPQAWAETGGMGLAVRQAPLIIPLKATSTPVSIKQYPMSQEARLGIKPHIQRLLDQGILVPCQSPWNTPLLPVKKPGTNDYRPVQDLREVNKRVEDIHPTVPNPYNLLSGLPPSHQWYTVLDLKDAFFCLRLHPTSQSLFAFEWRDPEMGISGQLTWTRLPQGFKNSPTLFNEALHRDLADFRIQHPDLILLQYVDDLLLAATSELDCQQGTRALLQTLGDLGYRASAKKAQICQKQVKYLGYLLKEGQRWLTEARKETVMGQPTPKTPRQLREFLGKAGFCRLFIPGFAEMAAPLYPLTKPGTLFEWGPDQQKAYQEIKQALLTAPALGLPDLTKPFELFVDEKQGYAKGVLTQKLGPWRRPVAYLSKKLDPVAAGWPPCLRMVAAIAVLTKDAGKLTMGQPLVILAPHAVEALVKQPPDRWLSNARMTHYQALLLDTDRVQFGPIVALNPATLLPLPEEGLQHDCLDILAEAHGTRPDLTDQPLPDADHTWYTDGSSFLQEGQRKAGAAVTTETEVVWAKALPAGTSAQRAELIALTQALKMAEGKKLNVYTDSRYAFATAHIHGEIYRRRGWLTSEGKEIKNKDEILALLKALFLPKRLSIIHCPGHQKGNRAEARGNRMADQAAREVATRETPETSTLLAGKRTADGSEFEKRTADGSEFESPKKKAKVE

SEQ ID NO: 2504 - protein, 2090 aa, synthetic construct
MPAAKRVKLDGGDKKYSIGLDIGTNSVGWAVITDEYKVPSKKFKVLGNTDRHSIKKNLIGALLFDSGETAEATRLKRTARRRYTRRKNRICYLQEIFSNEMAKVDDSFFHRLEESFLVEEDKKHERHPIFGNIVDEVAYHEKYPTIYHLRKKLVDSTDKADLRLIYLALAHMIKFRGHFLIEGDLNPDNSDVDKLFIQLVQTYNQLFEENPINASGVDAKAILSARLSKSRRLENLIAQLPGEKKNGLFGNLIALSLGLTPNFKSNFDLAEDAKLQLSKDTYDDDLDNLLAQIGDQYADLFLAAKNLSDAILLSDILRVNTEITKAPLSASMIKRYDEHHQDLTLLKALVRQQLPEKYKEIFFDQSKNGYAGYIDGGASQEEFYKFIKPILEKMDGTEELLVKLNREDLLRKQRTFDNGSIPHQIHLGELHAILRRQEDFYPFLKDNREKIEKILTFRIPYYVGPLARGNSRFAWMTRKSEETITPWNFEEVVDKGASAQSFIERMTNFDKNLPNEKVLPKHSLLYEYFTVYNELTKVKYVTEGMRKPAFLSGEQKKAIVDLLFKTNRKVTVKQLKEDYFKKIECFDSVEISGVEDRFNASLGTYHDLLKIIKDKDFLDNEENEDILEDIVLTLTLFEDREMIEERLKTYAHLFDDKVMKQLKRRRYTGWGRLSRKLINGIRDKQSGKTILDFLKSDGFANRNFMQLIHDDSLTFKEDIQKAQVSGQGDSLHEHIANLAGSPAIKKGILQTVKVVDELVKVMGRHKPENIVIEMARENQTTQKGQKNSRERMKRIEEGIKELGSQILKEHPVENTQLQNEKLYLYYLQNGRDMYVDQELDINRLSDYDVDHIVPQSFLKDDSIDNKVLTRSDKARGKSDNVPSEEVVKKMKNYWRQLLNAKLITQRKFDNLTKAERGGLSELDKAGFIKRQLVETRQITKHVAQILDSRMNTKYDENDKLIREVKVITLKSKLVSDFRKDFQFYKVREINNYHHAHDAYLNAVVGTALIKKYPKLESEFVYGDYKVYDVRKMIAKSEQEIGKATAKYFFYSNIMNFFKTEITLANGEIRKRPLIETNGETGEIVWDKGRDFATVRKVLSMPQVNIVKKTEVQTGGFSKESILPKRNSDKLIARKKDWDPKKYGGFDSPTVAYSVLVVAKVEKGKSKKLKSVKELLGITIMERSSFEKNPIDFLEAKGYKEVKKDLIIKLPKYSLFELENGRKRMLASAGELQKGNELALPSKYVNFLYLASHYEKLKGSPEDNEQKQLFVEQHKHYLDEIIEQISEFSKRVILADANLDKVLSAYNKHRDKPIREQAENIIHLFTLTNLGAPAAFKYFDTTIDRKRYTSTKEVLDATLIHQSITGLYETRIDLSQLGGDGGGGGGSGGTLNIEDEYRLHETSKGPDVPLGSTWLSDFPQAWAETGGMGLAVRQAPLIIPLKATSTPVSIKQYPMSQEARLGIKPHIQRLLDQGILVPCQSPWNTPLLPVKKPGTNDYRPVQDLREVNKRVEDIHPTVPNPYNLLSGLPPSHQWYTVLDLKDAFFCLRLHPTSQSLFAFEWRDPEMGISGQLTWTRLPQGFKNSPTLFNEALHRDLADFRIQHPDLILLQYVDDLLLAATSELDCQQGTRALLQTLGDLGYRASAKKAQICQKQVKYLGYLLKEGQRWLTEARKETVMGQPTPKTPRQLREFLGKAGFCRLFIPGFAEMAAPLYPLTKPGTLFEWGPDQQKAYQEIKQALLTAPALGLPDLTKPFELFVDEKQGYAKGVLTQKLGPWRRPVAYLSKKLDPVAAGWPPCLRMVAAIAVLTKDAGKLTMGQPLVILAPHAVEALVKQPPDRWLSNARMTHYQALLLDTDRVQFGPIVALNPATLLPLPEEGLQHDCLDILAEAHGTRPDLTDQPLPDADHTWYTDGSSFLQEGQRKAGAAVTTETEVVWAKALPAGTSAQRAELIALTQALKMAEGKKLNVYTDSRYAFATAHIHGEIYRRRGWLTSEGKEIKNKDEILALLKALFLPKRLSIIHCPGHQKGNRAEARGNRMADQAAREVATRETPETSTLLAGKRTADGSEFEKRTADGSEFESPKKKAKVE

SEQ ID NO: 2505 - protein, 2093 aa, synthetic construct
MPAAKRVKLDGGDKKYSIGLDIGTNSVGWAVITDEYKVPSKKFKVLGNTDRHSIKKNLIGALLFDSGETAEATRLKRTARRRYTRRKNRICYLQEIFSNEMAKVDDSFFHRLEESFLVEEDKKHERHPIFGNIVDEVAYHEKYPTIYHLRKKLVDSTDKADLRLIYLALAHMIKFRGHFLIEGDLNPDNSDVDKLFIQLVQTYNQLFEENPINASGVDAKAILSARLSKSRRLENLIAQLPGEKKNGLFGNLIALSLGLTPNFKSNFDLAEDAKLQLSKDTYDDDLDNLLAQIGDQYADLFLAAKNLSDAILLSDILRVNTEITKAPLSASMIKRYDEHHQDLTLLKALVRQQLPEKYKEIFFDQSKNGYAGYIDGGASQEEFYKFIKPILEKMDGTEELLVKLNREDLLRKQRTFDNGSIPHQIHLGELHAILRRQEDFYPFLKDNREKIEKILTFRIPYYVGPLARGNSRFAWMTRKSEETITPWNFEEVVDKGASAQSFIERMTNFDKNLPNEKVLPKHSLLYEYFTVYNELTKVKYVTEGMRKPAFLSGEQKKAIVDLLFKTNRKVTVKQLKEDYFKKIECFDSVEISGVEDRFNASLGTYHDLLKIIKDKDFLDNEENEDILEDIVLTLTLFEDREMIEERLKTYAHLFDDKVMKQLKRRRYTGWGRLSRKLINGIRDKQSGKTILDFLKSDGFANRNFMQLIHDDSLTFKEDIQKAQVSGQGDSLHEHIANLAGSPAIKKGILQTVKVVDELVKVMGRHKPENIVIEMARENQTTQKGQKNSRERMKRIEEGIKELGSQILKEHPVENTQLQNEKLYLYYLQNGRDMYVDQELDINRLSDYDVDHIVPQSFLKDDSIDNKVLTRSDKARGKSDNVPSEEVVKKMKNYWRQLLNAKLITQRKFDNLTKAERGGLSELDKAGFIKRQLVETRQITKHVAQILDSRMNTKYDENDKLIREVKVITLKSKLVSDFRKDFQFYKVREINNYHHAHDAYLNAVVGTALIKKYPKLESEFVYGDYKVYDVRKMIAKSEQEIGKATAKYFFYSNIMNFFKTEITLANGEIRKRPLIETNGETGEIVWDKGRDFATVRKVLSMPQVNIVKKTEVQTGGFSKESILPKRNSDKLIARKKDWDPKKYGGFDSPTVAYSVLVVAKVEKGKSKKLKSVKELLGITIMERSSFEKNPIDFLEAKGYKEVKKDLIIKLPKYSLFELENGRKRMLASAGELQKGNELALPSKYVNFLYLASHYEKLKGSPEDNEQKQLFVEQHKHYLDEIIEQISEFSKRVILADANLDKVLSAYNKHRDKPIREQAENIIHLFTLTNLGAPAAFKYFDTTIDRKRYTSTKEVLDATLIHQSITGLYETRIDLSQLGGDGGPAPEAAAKGGTLNIEDEYRLHETSKGPDVPLGSTWLSDFPQAWAETGGMGLAVRQAPLIIPLKATSTPVSIKQYPMSQEARLGIKPHIQRLLDQGILVPCQSPWNTPLLPVKKPGTNDYRPVQDLREVNKRVEDIHPTVPNPYNLLSGLPPSHQWYTVLDLKDAFFCLRLHPTSQSLFAFEWRDPEMGISGQLTWTRLPQGFKNSPTLFNEALHRDLADFRIQHPDLILLQYVDDLLLAATSELDCQQGTRALLQTLGDLGYRASAKKAQICQKQVKYLGYLLKEGQRWLTEARKETVMGQPTPKTPRQLREFLGKAGFCRLFIPGFAEMAAPLYPLTKPGTLFEWGPDQQKAYQEIKQALLTAPALGLPDLTKPFELFVDEKQGYAKGVLTQKLGPWRRPVAYLSKKLDPVAAGWPPCLRMVAAIAVLTKDAGKLTMGQPLVILAPHAVEALVKQPPDRWLSNARMTHYQALLLDTDRVQFGPIVALNPATLLPLPEEGLQHDCLDILAEAHGTRPDLTDQPLPDADHTWYTDGSSFLQEGQRKAGAAVTTETEVVWAKALPAGTSAQRAELIALTQALKMAEGKKLNVYTDSRYAFATAHIHGEIYRRRGWLTSEGKEIKNKDEILALLKALFLPKRLSIIHCPGHQKGNRAEARGNRMADQAAREVATRETPETSTLLAGKRTADGSEFEKRTADGSEFESPKKKAKVE

SEQ ID NO: 2506 - protein, 2096 aa, synthetic construct
MPAAKRVKLDGGDKKYSIGLDIGTNSVGWAVITDEYKVPSKKFKVLGNTDRHSIKKNLIGALLFDSGETAEATRLKRTARRRYTRRKNRICYLQEIFSNEMAKVDDSFFHRLEESFLVEEDKKHERHPIFGNIVDEVAYHEKYPTIYHLRKKLVDSTDKADLRLIYLALAHMIKFRGHFLIEGDLNPDNSDVDKLFIQLVQTYNQLFEENPINASGVDAKAILSARLSKSRRLENLIAQLPGEKKNGLFGNLIALSLGLTPNFKSNFDLAEDAKLQLSKDTYDDDLDNLLAQIGDQYADLFLAAKNLSDAILLSDILRVNTEITKAPLSASMIKRYDEHHQDLTLLKALVRQQLPEKYKEIFFDQSKNGYAGYIDGGASQEEFYKFIKPILEKMDGTEELLVKLNREDLLRKQRTFDNGSIPHQIHLGELHAILRRQEDFYPFLKDNREKIEKILTFRIPYYVGPLARGNSRFAWMTRKSEETITPWNFEEVVDKGASAQSFIERMTNFDKNLPNEKVLPKHSLLYEYFTVYNELTKVKYVTEGMRKPAFLSGEQKKAIVDLLFKTNRKVTVKQLKEDYFKKIECFDSVEISGVEDRFNASLGTYHDLLKIIKDKDFLDNEENEDILEDIVLTLTLFEDREMIEERLKTYAHLFDDKVMKQLKRRRYTGWGRLSRKLINGIRDKQSGKTILDFLKSDGFANRNFMQLIHDDSLTFKEDIQKAQVSGQGDSLHEHIANLAGSPAIKKGILQTVKVVDELVKVMGRHKPENIVIEMARENQTTQKGQKNSRERMKRIEEGIKELGSQILKEHPVENTQLQNEKLYLYYLQNGRDMYVDQELDINRLSDYDVDHIVPQSFLKDDSIDNKVLTRSDKARGKSDNVPSEEVVKKMKNYWRQLLNAKLITQRKFDNLTKAERGGLSELDKAGFIKRQLVETRQITKHVAQILDSRMNTKYDENDKLIREVKVITLKSKLVSDFRKDFQFYKVREINNYHHAHDAYLNAVVGTALIKKYPKLESEFVYGDYKVYDVRKMIAKSEQEIGKATAKYFFYSNIMNFFKTEITLANGEIRKRPLIETNGETGEIVWDKGRDFATVRKVLSMPQVNIVKKTEVQTGGFSKESILPKRNSDKLIARKKDWDPKKYGGFDSPTVAYSVLVVAKVEKGKSKKLKSVKELLGITIMERSSFEKNPIDFLEAKGYKEVKKDLIIKLPKYSLFELENGRKRMLASAGELQKGNELALPSKYVNFLYLASHYEKLKGSPEDNEQKQLFVEQHKHYLDEIIEQISEFSKRVILADANLDKVLSAYNKHRDKPIREQAENIIHLFTLTNLGAPAAFKYFDTTIDRKRYTSTKEVLDATLIHQSITGLYETRIDLSQLGGDGGEAAAKPAPGGGGGTLNIEDEYRLHETSKGPDVPLGSTWLSDFPQAWAETGGMGLAVRQAPLIIPLKATSTPVSIKQYPMSQEARLGIKPHIQRLLDQGILVPCQSPWNTPLLPVKKPGTNDYRPVQDLREVNKRVEDIHPTVPNPYNLLSGLPPSHQWYTVLDLKDAFFCLRLHPTSQSLFAFEWRDPEMGISGQLTWTRLPQGFKNSPTLFNEALHRDLADFRIQHPDLILLQYVDDLLLAATSELDCQQGTRALLQTLGDLGYRASAKKAQICQKQVKYLGYLLKEGQRWLTEARKETVMGQPTPKTPRQLREFLGKAGFCRLFIPGFAEMAAPLYPLTKPGTLFEWGPDQQKAYQEIKQALLTAPALGLPDLTKPFELFVDEKQGYAKGVLTQKLGPWRRPVAYLSKKLDPVAAGWPPCLRMVAAIAVLTKDAGKLTMGQPLVILAPHAVEALVKQPPDRWLSNARMTHYQALLLDTDRVQFGPIVALNPATLLPLPEEGLQHDCLDILAEAHGTRPDLTDQPLPDADHTWYTDGSSFLQEGQRKAGAAVTTETEVVWAKALPAGTSAQRAELIALTQALKMAEGKKLNVYTDSRYAFATAHIHGEIYRRRGWLTSEGKEIKNKDEILALLKALFLPKRLSIIHCPGHQKGNRAEARGNRMADQAAREVATRETPETSTLLAGKRTADGSEFEKRTADGSEFESPKKKAKVE

SEQ ID NO: 2507 - protein, 2100 aa, synthetic construct
MPAAKRVKLDGGDKKYSIGLDIGTNSVGWAVITDEYKVPSKKFKVLGNTDRHSIKKNLIGALLFDSGETAEATRLKRTARRRYTRRKNRICYLQEIFSNEMAKVDDSFFHRLEESFLVEEDKKHERHPIFGNIVDEVAYHEKYPTIYHLRKKLVDSTDKADLRLIYLALAHMIKFRGHFLIEGDLNPDNSDVDKLFIQLVQTYNQLFEENPINASGVDAKAILSARLSKSRRLENLIAQLPGEKKNGLFGNLIALSLGLTPNFKSNFDLAEDAKLQLSKDTYDDDLDNLLAQIGDQYADLFLAAKNLSDAILLSDILRVNTEITKAPLSASMIKRYDEHHQDLTLLKALVRQQLPEKYKEIFFDQSKNGYAGYIDGGASQEEFYKFIKPILEKMDGTEELLVKLNREDLLRKQRTFDNGSIPHQIHLGELHAILRRQEDFYPFLKDNREKIEKILTFRIPYYVGPLARGNSRFAWMTRKSEETITPWNFEEVVDKGASAQSFIERMTNFDKNLPNEKVLPKHSLLYEYFTVYNELTKVKYVTEGMRKPAFLSGEQKKAIVDLLFKTNRKVTVKQLKEDYFKKIECFDSVEISGVEDRFNASLGTYHDLLKIIKDKDFLDNEENEDILEDIVLTLTLFEDREMIEERLKTYAHLFDDKVMKQLKRRRYTGWGRLSRKLINGIRDKQSGKTILDFLKSDGFANRNFMQLIHDDSLTFKEDIQKAQVSGQGDSLHEHIANLAGSPAIKKGILQTVKVVDELVKVMGRHKPENIVIEMARENQTTQKGQKNSRERMKRIEEGIKELGSQILKEHPVENTQLQNEKLYLYYLQNGRDMYVDQELDINRLSDYDVDHIVPQSFLKDDSIDNKVLTRSDKARGKSDNVPSEEVVKKMKNYWRQLLNAKLITQRKFDNLTKAERGGLSELDKAGFIKRQLVETRQITKHVAQILDSRMNTKYDENDKLIREVKVITLKSKLVSDFRKDFQFYKVREINNYHHAHDAYLNAVVGTALIKKYPKLESEFVYGDYKVYDVRKMIAKSEQEIGKATAKYFFYSNIMNFFKTEITLANGEIRKRPLIETNGETGEIVWDKGRDFATVRKVLSMPQVNIVKKTEVQTGGFSKESILPKRNSDKLIARKKDWDPKKYGGFDSPTVAYSVLVVAKVEKGKSKKLKSVKELLGITIMERSSFEKNPIDFLEAKGYKEVKKDLIIKLPKYSLFELENGRKRMLASAGELQKGNELALPSKYVNFLYLASHYEKLKGSPEDNEQKQLFVEQHKHYLDEIIEQISEFSKRVILADANLDKVLSAYNKHRDKPIREQAENIIHLFTLTNLGAPAAFKYFDTTIDRKRYTSTKEVLDATLIHQSITGLYETRIDLSQLGGDGGEAAAKEAAAKEAAAKGGTLNIEDEYRLHETSKGPDVPLGSTWLSDFPQAWAETGGMGLAVRQAPLIIPLKATSTPVSIKQYPMSQEARLGIKPHIQRLLDQGILVPCQSPWNTPLLPVKKPGTNDYRPVQDLREVNKRVEDIHPTVPNPYNLLSGLPPSHQWYTVLDLKDAFFCLRLHPTSQSLFAFEWRDPEMGISGQLTWTRLPQGFKNSPTLFNEALHRDLADFRIQHPDLILLQYVDDLLLAATSELDCQQGTRALLQTLGDLGYRASAKKAQICQKQVKYLGYLLKEGQRWLTEARKETVMGQPTPKTPRQLREFLGKAGFCRLFIPGFAEMAAPLYPLTKPGTLFEWGPDQQKAYQEIKQALLTAPALGLPDLTKPFELFVDEKQGYAKGVLTQKLGPWRRPVAYLSKKLDPVAAGWPPCLRMVAAIAVLTKDAGKLTMGQPLVILAPHAVEALVKQPPDRWLSNARMTHYQALLLDTDRVQFGPIVALNPATLLPLPEEGLQHDCLDILAEAHGTRPDLTDQPLPDADHTWYTDGSSFLQEGQRKAGAAVTTETEVVWAKALPAGTSAQRAELIALTQALKMAEGKKLNVYTDSRYAFATAHIHGEIYRRRGWLTSEGKEIKNKDEILALLKALFLPKRLSIIHCPGHQKGNRAEARGNRMADQAAREVATRETPETSTLLAGKRTADGSEFEKRTADGSEFESPKKKAKVE

SEQ ID NO: 2508 - protein, 2088 aa, synthetic construct
MPAAKRVKLDGGDKKYSIGLDIGTNSVGWAVITDEYKVPSKKFKVLGNTDRHSIKKNLIGALLFDSGETAEATRLKRTARRRYTRRKNRICYLQEIFSNEMAKVDDSFFHRLEESFLVEEDKKHERHPIFGNIVDEVAYHEKYPTIYHLRKKLVDSTDKADLRLIYLALAHMIKFRGHFLIEGDLNPDNSDVDKLFIQLVQTYNQLFEENPINASGVDAKAILSARLSKSRRLENLIAQLPGEKKNGLFGNLIALSLGLTPNFKSNFDLAEDAKLQLSKDTYDDDLDNLLAQIGDQYADLFLAAKNLSDAILLSDILRVNTEITKAPLSASMIKRYDEHHQDLTLLKALVRQQLPEKYKEIFFDQSKNGYAGYIDGGASQEEFYKFIKPILEKMDGTEELLVKLNREDLLRKQRTFDNGSIPHQIHLGELHAILRRQEDFYPFLKDNREKIEKILTFRIPYYVGPLARGNSRFAWMTRKSEETITPWNFEEVVDKGASAQSFIERMTNFDKNLPNEKVLPKHSLLYEYFTVYNELTKVKYVTEGMRKPAFLSGEQKKAIVDLLFKTNRKVTVKQLKEDYFKKIECFDSVEISGVEDRFNASLGTYHDLLKIIKDKDFLDNEENEDILEDIVLTLTLFEDREMIEERLKTYAHLFDDKVMKQLKRRRYTGWGRLSRKLINGIRDKQSGKTILDFLKSDGFANRNFMQLIHDDSLTFKEDIQKAQVSGQGDSLHEHIANLAGSPAIKKGILQTVKVVDELVKVMGRHKPENIVIEMARENQTTQKGQKNSRERMKRIEEGIKELGSQILKEHPVENTQLQNEKLYLYYLQNGRDMYVDQELDINRLSDYDVDHIVPQSFLKDDSIDNKVLTRSDKARGKSDNVPSEEVVKKMKNYWRQLLNAKLITQRKFDNLTKAERGGLSELDKAGFIKRQLVETRQITKHVAQILDSRMNTKYDENDKLIREVKVITLKSKLVSDFRKDFQFYKVREINNYHHAHDAYLNAVVGTALIKKYPKLESEFVYGDYKVYDVRKMIAKSEQEIGKATAKYFFYSNIMNFFKTEITLANGEIRKRPLIETNGETGEIVWDKGRDFATVRKVLSMPQVNIVKKTEVQTGGFSKESILPKRNSDKLIARKKDWDPKKYGGFDSPTVAYSVLVVAKVEKGKSKKLKSVKELLGITIMERSSFEKNPIDFLEAKGYKEVKKDLIIKLPKYSLFELENGRKRMLASAGELQKGNELALPSKYVNFLYLASHYEKLKGSPEDNEQKQLFVEQHKHYLDEIIEQISEFSKRVILADANLDKVLSAYNKHRDKPIREQAENIIHLFTLTNLGAPAAFKYFDTTIDRKRYTSTKEVLDATLIHQSITGLYETRIDLSQLGGDGGGSSGGTLNIEDEYRLHETSKGPDVPLGSTWLSDFPQAWAETGGMGLAVRQAPLIIPLKATSTPVSIKQYPMSQEARLGIKPHIQRLLDQGILVPCQSPWNTPLLPVKKPGTNDYRPVQDLREVNKRVEDIHPTVPNPYNLLSGLPPSHQWYTVLDLKDAFFCLRLHPTSQSLFAFEWRDPEMGISGQLTWTRLPQGFKNSPTLFNEALHRDLADFRIQHPDLILLQYVDDLLLAATSELDCQQGTRALLQTLGDLGYRASAKKAQICQKQVKYLGYLLKEGQRWLTEARKETVMGQPTPKTPRQLREFLGKAGFCRLFIPGFAEMAAPLYPLTKPGTLFEWGPDQQKAYQEIKQALLTAPALGLPDLTKPFELFVDEKQGYAKGVLTQKLGPWRRPVAYLSKKLDPVAAGWPPCLRMVAAIAVLTKDAGKLTMGQPLVILAPHAVEALVKQPPDRWLSNARMTHYQALLLDTDRVQFGPIVALNPATLLPLPEEGLQHDCLDILAEAHGTRPDLTDQPLPDADHTWYTDGSSFLQEGQRKAGAAVTTETEVVWAKALPAGTSAQRAELIALTQALKMAEGKKLNVYTDSRYAFATAHIHGEIYRRRGWLTSEGKEIKNKDEILALLKALFLPKRLSIIHCPGHQKGNRAEARGNRMADQAAREVATRETPETSTLLAGKRTADGSEFEKRTADGSEFESPKKKAKVE

SEQ ID NO: 2509 - protein, 2096 aa, synthetic construct
MPAAKRVKLDGGDKKYSIGLDIGTNSVGWAVITDEYKVPSKKFKVLGNTDRHSIKKNLIGALLFDSGETAEATRLKRTARRRYTRRKNRICYLQEIFSNEMAKVDDSFFHRLEESFLVEEDKKHERHPIFGNIVDEVAYHEKYPTIYHLRKKLVDSTDKADLRLIYLALAHMIKFRGHFLIEGDLNPDNSDVDKLFIQLVQTYNQLFEENPINASGVDAKAILSARLSKSRRLENLIAQLPGEKKNGLFGNLIALSLGLTPNFKSNFDLAEDAKLQLSKDTYDDDLDNLLAQIGDQYADLFLAAKNLSDAILLSDILRVNTEITKAPLSASMIKRYDEHHQDLTLLKALVRQQLPEKYKEIFFDQSKNGYAGYIDGGASQEEFYKFIKPILEKMDGTEELLVKLNREDLLRKQRTFDNGSIPHQIHLGELHAILRRQEDFYPFLKDNREKIEKILTFRIPYYVGPLARGNSRFAWMTRKSEETITPWNFEEVVDKGASAQSFIERMTNFDKNLPNEKVLPKHSLLYEYFTVYNELTKVKYVTEGMRKPAFLSGEQKKAIVDLLFKTNRKVTVKQLKEDYFKKIECFDSVEISGVEDRFNASLGTYHDLLKIIKDKDFLDNEENEDILEDIVLTLTLFEDREMIEERLKTYAHLFDDKVMKQLKRRRYTGWGRLSRKLINGIRDKQSGKTILDFLKSDGFANRNFMQLIHDDSLTFKEDIQKAQVSGQGDSLHEHIANLAGSPAIKKGILQTVKVVDELVKVMGRHKPENIVIEMARENQTTQKGQKNSRERMKRIEEGIKELGSQILKEHPVENTQLQNEKLYLYYLQNGRDMYVDQELDINRLSDYDVDHIVPQSFLKDDSIDNKVLTRSDKARGKSDNVPSEEVVKKMKNYWRQLLNAKLITQRKFDNLTKAERGGLSELDKAGFIKRQLVETRQITKHVAQILDSRMNTKYDENDKLIREVKVITLKSKLVSDFRKDFQFYKVREINNYHHAHDAYLNAVVGTALIKKYPKLESEFVYGDYKVYDVRKMIAKSEQEIGKATAKYFFYSNIMNFFKTEITLANGEIRKRPLIETNGETGEIVWDKGRDFATVRKVLSMPQVNIVKKTEVQTGGFSKESILPKRNSDKLIARKKDWDPKKYGGFDSPTVAYSVLVVAKVEKGKSKKLKSVKELLGITIMERSSFEKNPIDFLEAKGYKEVKKDLIIKLPKYSLFELENGRKRMLASAGELQKGNELALPSKYVNFLYLASHYEKLKGSPEDNEQKQLFVEQHKHYLDEIIEQISEFSKRVILADANLDKVLSAYNKHRDKPIREQAENIIHLFTLTNLGAPAAFKYFDTTIDRKRYTSTKEVLDATLIHQSITGLYETRIDLSQLGGDGGEAAAKGSSPAPGGTLNIEDEYRLHETSKGPDVPLGSTWLSDFPQAWAETGGMGLAVRQAPLIIPLKATSTPVSIKQYPMSQEARLGIKPHIQRLLDQGILVPCQSPWNTPLLPVKKPGTNDYRPVQDLREVNKRVEDIHPTVPNPYNLLSGLPPSHQWYTVLDLKDAFFCLRLHPTSQSLFAFEWRDPEMGISGQLTWTRLPQGFKNSPTLFNEALHRDLADFRIQHPDLILLQYVDDLLLAATSELDCQQGTRALLQTLGDLGYRASAKKAQICQKQVKYLGYLLKEGQRWLTEARKETVMGQPTPKTPRQLREFLGKAGFCRLFIPGFAEMAAPLYPLTKPGTLFEWGPDQQKAYQEIKQALLTAPALGLPDLTKPFELFVDEKQGYAKGVLTQKLGPWRRPVAYLSKKLDPVAAGWPPCLRMVAAIAVLTKDAGKLTMGQPLVILAPHAVEALVKQPPDRWLSNARMTHYQALLLDTDRVQFGPIVALNPATLLPLPEEGLQHDCLDILAEAHGTRPDLTDQPLPDADHTWYTDGSSFLQEGQRKAGAAVTTETEVVWAKALPAGTSAQRAELIALTQALKMAEGKKLNVYTDSRYAFATAHIHGEIYRRRGWLTSEGKEIKNKDEILALLKALFLPKRLSIIHCPGHQKGNRAEARGNRMADQAAREVATRETPETSTLLAGKRTADGSEFEKRTADGSEFESPKKKAKVE

SEQ ID NO: 2510 - protein, 2096 aa, synthetic construct
MPAAKRVKLDGGDKKYSIGLDIGTNSVGWAVITDEYKVPSKKFKVLGNTDRHSIKKNLIGALLFDSGETAEATRLKRTARRRYTRRKNRICYLQEIFSNEMAKVDDSFFHRLEESFLVEEDKKHERHPIFGNIVDEVAYHEKYPTIYHLRKKLVDSTDKADLRLIYLALAHMIKFRGHFLIEGDLNPDNSDVDKLFIQLVQTYNQLFEENPINASGVDAKAILSARLSKSRRLENLIAQLPGEKKNGLFGNLIALSLGLTPNFKSNFDLAEDAKLQLSKDTYDDDLDNLLAQIGDQYADLFLAAKNLSDAILLSDILRVNTEITKAPLSASMIKRYDEHHQDLTLLKALVRQQLPEKYKEIFFDQSKNGYAGYIDGGASQEEFYKFIKPILEKMDGTEELLVKLNREDLLRKQRTFDNGSIPHQIHLGELHAILRRQEDFYPFLKDNREKIEKILTFRIPYYVGPLARGNSRFAWMTRKSEETITPWNFEEVVDKGASAQSFIERMTNFDKNLPNEKVLPKHSLLYEYFTVYNELTKVKYVTEGMRKPAFLSGEQKKAIVDLLFKTNRKVTVKQLKEDYFKKIECFDSVEISGVEDRFNASLGTYHDLLKIIKDKDFLDNEENEDILEDIVLTLTLFEDREMIEERLKTYAHLFDDKVMKQLKRRRYTGWGRLSRKLINGIRDKQSGKTILDFLKSDGFANRNFMQLIHDDSLTFKEDIQKAQVSGQGDSLHEHIANLAGSPAIKKGILQTVKVVDELVKVMGRHKPENIVIEMARENQTTQKGQKNSRERMKRIEEGIKELGSQILKEHPVENTQLQNEKLYLYYLQNGRDMYVDQELDINRLSDYDVDHIVPQSFLKDDSIDNKVLTRSDKARGKSDNVPSEEVVKKMKNYWRQLLNAKLITQRKFDNLTKAERGGLSELDKAGFIKRQLVETRQITKHVAQILDSRMNTKYDENDKLIREVKVITLKSKLVSDFRKDFQFYKVREINNYHHAHDAYLNAVVGTALIKKYPKLESEFVYGDYKVYDVRKMIAKSEQEIGKATAKYFFYSNIMNFFKTEITLANGEIRKRPLIETNGETGEIVWDKGRDFATVRKVLSMPQVNIVKKTEVQTGGFSKESILPKRNSDKLIARKKDWDPKKYGGFDSPTVAYSVLVVAKVEKGKSKKLKSVKELLGITIMERSSFEKNPIDFLEAKGYKEVKKDLIIKLPKYSLFELENGRKRMLASAGELQKGNELALPSKYVNFLYLASHYEKLKGSPEDNEQKQLFVEQHKHYLDEIIEQISEFSKRVILADANLDKVLSAYNKHRDKPIREQAENIIHLFTLTNLGAPAAFKYFDTTIDRKRYTSTKEVLDATLIHQSITGLYETRIDLSQLGGDGGPAPAPAPAPAPGGTLNIEDEYRLHETSKGPDVPLGSTWLSDFPQAWAETGGMGLAVRQAPLIIPLKATSTPVSIKQYPMSQEARLGIKPHIQRLLDQGILVPCQSPWNTPLLPVKKPGTNDYRPVQDLREVNKRVEDIHPTVPNPYNLLSGLPPSHQWYTVLDLKDAFFCLRLHPTSQSLFAFEWRDPEMGISGQLTWTRLPQGFKNSPTLFNEALHRDLADFRIQHPDLILLQYVDDLLLAATSELDCQQGTRALLQTLGDLGYRASAKKAQICQKQVKYLGYLLKEGQRWLTEARKETVMGQPTPKTPRQLREFLGKAGFCRLFIPGFAEMAAPLYPLTKPGTLFEWGPDQQKAYQEIKQALLTAPALGLPDLTKPFELFVDEKQGYAKGVLTQKLGPWRRPVAYLSKKLDPVAAGWPPCLRMVAAIAVLTKDAGKLTMGQPLVILAPHAVEALVKQPPDRWLSNARMTHYQALLLDTDRVQFGPIVALNPATLLPLPEEGLQHDCLDILAEAHGTRPDLTDQPLPDADHTWYTDGSSFLQEGQRKAGAAVTTETEVVWAKALPAGTSAQRAELIALTQALKMAEGKKLNVYTDSRYAFATAHIHGEIYRRRGWLTSEGKEIKNKDEILALLKALFLPKRLSIIHCPGHQKGNRAEARGNRMADQAAREVATRETPETSTLLAGKRTADGSEFEKRTADGSEFESPKKKAKVE

SEQ ID NO: 2511 - protein, 2095 aa, synthetic construct
MPAAKRVKLDGGDKKYSIGLDIGTNSVGWAVITDEYKVPSKKFKVLGNTDRHSIKKNLIGALLFDSGETAEATRLKRTARRRYTRRKNRICYLQEIFSNEMAKVDDSFFHRLEESFLVEEDKKHERHPIFGNIVDEVAYHEKYPTIYHLRKKLVDSTDKADLRLIYLALAHMIKFRGHFLIEGDLNPDNSDVDKLFIQLVQTYNQLFEENPINASGVDAKAILSARLSKSRRLENLIAQLPGEKKNGLFGNLIALSLGLTPNFKSNFDLAEDAKLQLSKDTYDDDLDNLLAQIGDQYADLFLAAKNLSDAILLSDILRVNTEITKAPLSASMIKRYDEHHQDLTLLKALVRQQLPEKYKEIFFDQSKNGYAGYIDGGASQEEFYKFIKPILEKMDGTEELLVKLNREDLLRKQRTFDNGSIPHQIHLGELHAILRRQEDFYPFLKDNREKIEKILTFRIPYYVGPLARGNSRFAWMTRKSEETITPWNFEEVVDKGASAQSFIERMTNFDKNLPNEKVLPKHSLLYEYFTVYNELTKVKYVTEGMRKPAFLSGEQKKAIVDLLFKTNRKVTVKQLKEDYFKKIECFDSVEISGVEDRFNASLGTYHDLLKIIKDKDFLDNEENEDILEDIVLTLTLFEDREMIEERLKTYAHLFDDKVMKQLKRRRYTGWGRLSRKLINGIRDKQSGKTILDFLKSDGFANRNFMQLIHDDSLTFKEDIQKAQVSGQGDSLHEHIANLAGSPAIKKGILQTVKVVDELVKVMGRHKPENIVIEMARENQTTQKGQKNSRERMKRIEEGIKELGSQILKEHPVENTQLQNEKLYLYYLQNGRDMYVDQELDINRLSDYDVDHIVPQSFLKDDSIDNKVLTRSDKARGKSDNVPSEEVVKKMKNYWRQLLNAKLITQRKFDNLTKAERGGLSELDKAGFIKRQLVETRQITKHVAQILDSRMNTKYDENDKLIREVKVITLKSKLVSDFRKDFQFYKVREINNYHHAHDAYLNAVVGTALIKKYPKLESEFVYGDYKVYDVRKMIAKSEQEIGKATAKYFFYSNIMNFFKTEITLANGEIRKRPLIETNGETGEIVWDKGRDFATVRKVLSMPQVNIVKKTEVQTGGFSKESILPKRNSDKLIARKKDWDPKKYGGFDSPTVAYSVLVVAKVEKGKSKKLKSVKELLGITIMERSSFEKNPIDFLEAKGYKEVKKDLIIKLPKYSLFELENGRKRMLASAGELQKGNELALPSKYVNFLYLASHYEKLKGSPEDNEQKQLFVEQHKHYLDEIIEQISEFSKRVILADANLDKVLSAYNKHRDKPIREQAENIIHLFTLTNLGAPAAFKYFDTTIDRKRYTSTKEVLDATLIHQSITGLYETRIDLSQLGGDGGGGGGSGGGGSGGTLNIEDEYRLHETSKGPDVPLGSTWLSDFPQAWAETGGMGLAVRQAPLIIPLKATSTPVSIKQYPMSQEARLGIKPHIQRLLDQGILVPCQSPWNTPLLPVKKPGTNDYRPVQDLREVNKRVEDIHPTVPNPYNLLSGLPPSHQWYTVLDLKDAFFCLRLHPTSQSLFAFEWRDPEMGISGQLTWTRLPQGFKNSPTLFNEALHRDLADFRIQHPDLILLQYVDDLLLAATSELDCQQGTRALLQTLGDLGYRASAKKAQICQKQVKYLGYLLKEGQRWLTEARKETVMGQPTPKTPRQLREFLGKAGFCRLFIPGFAEMAAPLYPLTKPGTLFEWGPDQQKAYQEIKQALLTAPALGLPDLTKPFELFVDEKQGYAKGVLTQKLGPWRRPVAYLSKKLDPVAAGWPPCLRMVAAIAVLTKDAGKLTMGQPLVILAPHAVEALVKQPPDRWLSNARMTHYQALLLDTDRVQFGPIVALNPATLLPLPEEGLQHDCLDILAEAHGTRPDLTDQPLPDADHTWYTDGSSFLQEGQRKAGAAVTTETEVVWAKALPAGTSAQRAELIALTQALKMAEGKKLNVYTDSRYAFATAHIHGEIYRRRGWLTSEGKEIKNKDEILALLKALFLPKRLSIIHCPGHQKGNRAEARGNRMADQAAREVATRETPETSTLLAGKRTADGSEFEKRTADGSEFESPKKKAKVE

SEQ ID NO: 2512 - protein, 2096 aa, synthetic construct
MPAAKRVKLDGGDKKYSIGLDIGTNSVGWAVITDEYKVPSKKFKVLGNTDRHSIKKNLIGALLFDSGETAEATRLKRTARRRYTRRKNRICYLQEIFSNEMAKVDDSFFHRLEESFLVEEDKKHERHPIFGNIVDEVAYHEKYPTIYHLRKKLVDSTDKADLRLIYLALAHMIKFRGHFLIEGDLNPDNSDVDKLFIQLVQTYNQLFEENPINASGVDAKAILSARLSKSRRLENLIAQLPGEKKNGLFGNLIALSLGLTPNFKSNFDLAEDAKLQLSKDTYDDDLDNLLAQIGDQYADLFLAAKNLSDAILLSDILRVNTEITKAPLSASMIKRYDEHHQDLTLLKALVRQQLPEKYKEIFFDQSKNGYAGYIDGGASQEEFYKFIKPILEKMDGTEELLVKLNREDLLRKQRTFDNGSIPHQIHLGELHAILRRQEDFYPFLKDNREKIEKILTFRIPYYVGPLARGNSRFAWMTRKSEETITPWNFEEVVDKGASAQSFIERMTNFDKNLPNEKVLPKHSLLYEYFTVYNELTKVKYVTEGMRKPAFLSGEQKKAIVDLLFKTNRKVTVKQLKEDYFKKIECFDSVEISGVEDRFNASLGTYHDLLKIIKDKDFLDNEENEDILEDIVLTLTLFEDREMIEERLKTYAHLFDDKVMKQLKRRRYTGWGRLSRKLINGIRDKQSGKTILDFLKSDGFANRNFMQLIHDDSLTFKEDIQKAQVSGQGDSLHEHIANLAGSPAIKKGILQTVKVVDELVKVMGRHKPENIVIEMARENQTTQKGQKNSRERMKRIEEGIKELGSQILKEHPVENTQLQNEKLYLYYLQNGRDMYVDQELDINRLSDYDVDHIVPQSFLKDDSIDNKVLTRSDKARGKSDNVPSEEVVKKMKNYWRQLLNAKLITQRKFDNLTKAERGGLSELDKAGFIKRQLVETRQITKHVAQILDSRMNTKYDENDKLIREVKVITLKSKLVSDFRKDFQFYKVREINNYHHAHDAYLNAVVGTALIKKYPKLESEFVYGDYKVYDVRKMIAKSEQEIGKATAKYFFYSNIMNFFKTEITLANGEIRKRPLIETNGETGEIVWDKGRDFATVRKVLSMPQVNIVKKTEVQTGGFSKESILPKRNSDKLIARKKDWDPKKYGGFDSPTVAYSVLVVAKVEKGKSKKLKSVKELLGITIMERSSFEKNPIDFLEAKGYKEVKKDLIIKLPKYSLFELENGRKRMLASAGELQKGNELALPSKYVNFLYLASHYEKLKGSPEDNEQKQLFVEQHKHYLDEIIEQISEFSKRVILADANLDKVLSAYNKHRDKPIREQAENIIHLFTLTNLGAPAAFKYFDTTIDRKRYTSTKEVLDATLIHQSITGLYETRIDLSQLGGDGGEAAAKPAPGGSGGTLNIEDEYRLHETSKGPDVPLGSTWLSDFPQAWAETGGMGLAVRQAPLIIPLKATSTPVSIKQYPMSQEARLGIKPHIQRLLDQGILVPCQSPWNTPLLPVKKPGTNDYRPVQDLREVNKRVEDIHPTVPNPYNLLSGLPPSHQWYTVLDLKDAFFCLRLHPTSQSLFAFEWRDPEMGISGQLTWTRLPQGFKNSPTLFNEALHRDLADFRIQHPDLILLQYVDDLLLAATSELDCQQGTRALLQTLGDLGYRASAKKAQICQKQVKYLGYLLKEGQRWLTEARKETVMGQPTPKTPRQLREFLGKAGFCRLFIPGFAEMAAPLYPLTKPGTLFEWGPDQQKAYQEIKQALLTAPALGLPDLTKPFELFVDEKQGYAKGVLTQKLGPWRRPVAYLSKKLDPVAAGWPPCLRMVAAIAVLTKDAGKLTMGQPLVILAPHAVEALVKQPPDRWLSNARMTHYQALLLDTDRVQFGPIVALNPATLLPLPEEGLQHDCLDILAEAHGTRPDLTDQPLPDADHTWYTDGSSFLQEGQRKAGAAVTTETEVVWAKALPAGTSAQRAELIALTQALKMAEGKKLNVYTDSRYAFATAHIHGEIYRRRGWLTSEGKEIKNKDEILALLKALFLPKRLSIIHCPGHQKGNRAEARGNRMADQAAREVATRETPETSTLLAGKRTADGSEFEKRTADGSEFESPKKKAKVE

SEQ ID NO: 2513 - protein, 2103 aa, synthetic construct
MPAAKRVKLDGGDKKYSIGLDIGTNSVGWAVITDEYKVPSKKFKVLGNTDRHSIKKNLIGALLFDSGETAEATRLKRTARRRYTRRKNRICYLQEIFSNEMAKVDDSFFHRLEESFLVEEDKKHERHPIFGNIVDEVAYHEKYPTIYHLRKKLVDSTDKADLRLIYLALAHMIKFRGHFLIEGDLNPDNSDVDKLFIQLVQTYNQLFEENPINASGVDAKAILSARLSKSRRLENLIAQLPGEKKNGLFGNLIALSLGLTPNFKSNFDLAEDAKLQLSKDTYDDDLDNLLAQIGDQYADLFLAAKNLSDAILLSDILRVNTEITKAPLSASMIKRYDEHHQDLTLLKALVRQQLPEKYKEIFFDQSKNGYAGYIDGGASQEEFYKFIKPILEKMDGTEELLVKLNREDLLRKQRTFDNGSIPHQIHLGELHAILRRQEDFYPFLKDNREKIEKILTFRIPYYVGPLARGNSRFAWMTRKSEETITPWNFEEVVDKGASAQSFIERMTNFDKNLPNEKVLPKHSLLYEYFTVYNELTKVKYVTEGMRKPAFLSGEQKKAIVDLLFKTNRKVTVKQLKEDYFKKIECFDSVEISGVEDRFNASLGTYHDLLKIIKDKDFLDNEENEDILEDIVLTLTLFEDREMIEERLKTYAHLFDDKVMKQLKRRRYTGWGRLSRKLINGIRDKQSGKTILDFLKSDGFANRNFMQLIHDDSLTFKEDIQKAQVSGQGDSLHEHIANLAGSPAIKKGILQTVKVVDELVKVMGRHKPENIVIEMARENQTTQKGQKNSRERMKRIEEGIKELGSQILKEHPVENTQLQNEKLYLYYLQNGRDMYVDQELDINRLSDYDVDHIVPQSFLKDDSIDNKVLTRSDKARGKSDNVPSEEVVKKMKNYWRQLLNAKLITQRKFDNLTKAERGGLSELDKAGFIKRQLVETRQITKHVAQILDSRMNTKYDENDKLIREVKVITLKSKLVSDFRKDFQFYKVREINNYHHAHDAYLNAVVGTALIKKYPKLESEFVYGDYKVYDVRKMIAKSEQEIGKATAKYFFYSNIMNFFKTEITLANGEIRKRPLIETNGETGEIVWDKGRDFATVRKVLSMPQVNIVKKTEVQTGGFSKESILPKRNSDKLIARKKDWDPKKYGGFDSPTVAYSVLVVAKVEKGKSKKLKSVKELLGITIMERSSFEKNPIDFLEAKGYKEVKKDLIIKLPKYSLFELENGRKRMLASAGELQKGNELALPSKYVNFLYLASHYEKLKGSPEDNEQKQLFVEQHKHYLDEIIEQISEFSKRVILADANLDKVLSAYNKHRDKPIREQAENIIHLFTLTNLGAPAAFKYFDTTIDRKRYTSTKEVLDATLIHQSITGLYETRIDLSQLGGDGGGGSGGSGGSGGSGGSGGSGGTLNIEDEYRLHETSKGPDVPLGSTWLSDFPQAWAETGGMGLAVRQAPLIIPLKATSTPVSIKQYPMSQEARLGIKPHIQRLLDQGILVPCQSPWNTPLLPVKKPGTNDYRPVQDLREVNKRVEDIHPTVPNPYNLLSGLPPSHQWYTVLDLKDAFFCLRLHPTSQSLFAFEWRDPEMGISGQLTWTRLPQGFKNSPTLFNEALHRDLADFRIQHPDLILLQYVDDLLLAATSELDCQQGTRALLQTLGDLGYRASAKKAQICQKQVKYLGYLLKEGQRWLTEARKETVMGQPTPKTPRQLREFLGKAGFCRLFIPGFAEMAAPLYPLTKPGTLFEWGPDQQKAYQEIKQALLTAPALGLPDLTKPFELFVDEKQGYAKGVLTQKLGPWRRPVAYLSKKLDPVAAGWPPCLRMVAAIAVLTKDAGKLTMGQPLVILAPHAVEALVKQPPDRWLSNARMTHYQALLLDTDRVQFGPIVALNPATLLPLPEEGLQHDCLDILAEAHGTRPDLTDQPLPDADHTWYTDGSSFLQEGQRKAGAAVTTETEVVWAKALPAGTSAQRAELIALTQALKMAEGKKLNVYTDSRYAFATAHIHGEIYRRRGWLTSEGKEIKNKDEILALLKALFLPKRLSIIHCPGHQKGNRAEARGNRMADQAAREVATRETPETSTLLAGKRTADGSEFEKRTADGSEFESPKKKAKVE

SEQ ID NO: 2514 - protein, 2096 aa, synthetic construct
MPAAKRVKLDGGDKKYSIGLDIGTNSVGWAVITDEYKVPSKKFKVLGNTDRHSIKKNLIGALLFDSGETAEATRLKRTARRRYTRRKNRICYLQEIFSNEMAKVDDSFFHRLEESFLVEEDKKHERHPIFGNIVDEVAYHEKYPTIYHLRKKLVDSTDKADLRLIYLALAHMIKFRGHFLIEGDLNPDNSDVDKLFIQLVQTYNQLFEENPINASGVDAKAILSARLSKSRRLENLIAQLPGEKKNGLFGNLIALSLGLTPNFKSNFDLAEDAKLQLSKDTYDDDLDNLLAQIGDQYADLFLAAKNLSDAILLSDILRVNTEITKAPLSASMIKRYDEHHQDLTLLKALVRQQLPEKYKEIFFDQSKNGYAGYIDGGASQEEFYKFIKPILEKMDGTEELLVKLNREDLLRKQRTFDNGSIPHQIHLGELHAILRRQEDFYPFLKDNREKIEKILTFRIPYYVGPLARGNSRFAWMTRKSEETITPWNFEEVVDKGASAQSFIERMTNFDKNLPNEKVLPKHSLLYEYFTVYNELTKVKYVTEGMRKPAFLSGEQKKAIVDLLFKTNRKVTVKQLKEDYFKKIECFDSVEISGVEDRFNASLGTYHDLLKIIKDKDFLDNEENEDILEDIVLTLTLFEDREMIEERLKTYAHLFDDKVMKQLKRRRYTGWGRLSRKLINGIRDKQSGKTILDFLKSDGFANRNFMQLIHDDSLTFKEDIQKAQVSGQGDSLHEHIANLAGSPAIKKGILQTVKVVDELVKVMGRHKPENIVIEMARENQTTQKGQKNSRERMKRIEEGIKELGSQILKEHPVENTQLQNEKLYLYYLQNGRDMYVDQELDINRLSDYDVDHIVPQSFLKDDSIDNKVLTRSDKARGKSDNVPSEEVVKKMKNYWRQLLNAKLITQRKFDNLTKAERGGLSELDKAGFIKRQLVETRQITKHVAQILDSRMNTKYDENDKLIREVKVITLKSKLVSDFRKDFQFYKVREINNYHHAHDAYLNAVVGTALIKKYPKLESEFVYGDYKVYDVRKMIAKSEQEIGKATAKYFFYSNIMNFFKTEITLANGEIRKRPLIETNGETGEIVWDKGRDFATVRKVLSMPQVNIVKKTEVQTGGFSKESILPKRNSDKLIARKKDWDPKKYGGFDSPTVAYSVLVVAKVEKGKSKKLKSVKELLGITIMERSSFEKNPIDFLEAKGYKEVKKDLIIKLPKYSLFELENGRKRMLASAGELQKGNELALPSKYVNFLYLASHYEKLKGSPEDNEQKQLFVEQHKHYLDEIIEQISEFSKRVILADANLDKVLSAYNKHRDKPIREQAENIIHLFTLTNLGAPAAFKYFDTTIDRKRYTSTKEVLDATLIHQSITGLYETRIDLSQLGGDGGPAPEAAAKGSSGGTLNIEDEYRLHETSKGPDVPLGSTWLSDFPQAWAETGGMGLAVRQAPLIIPLKATSTPVSIKQYPMSQEARLGIKPHIQRLLDQGILVPCQSPWNTPLLPVKKPGTNDYRPVQDLREVNKRVEDIHPTVPNPYNLLSGLPPSHQWYTVLDLKDAFFCLRLHPTSQSLFAFEWRDPEMGISGQLTWTRLPQGFKNSPTLFNEALHRDLADFRIQHPDLILLQYVDDLLLAATSELDCQQGTRALLQTLGDLGYRASAKKAQICQKQVKYLGYLLKEGQRWLTEARKETVMGQPTPKTPRQLREFLGKAGFCRLFIPGFAEMAAPLYPLTKPGTLFEWGPDQQKAYQEIKQALLTAPALGLPDLTKPFELFVDEKQGYAKGVLTQKLGPWRRPVAYLSKKLDPVAAGWPPCLRMVAAIAVLTKDAGKLTMGQPLVILAPHAVEALVKQPPDRWLSNARMTHYQALLLDTDRVQFGPIVALNPATLLPLPEEGLQHDCLDILAEAHGTRPDLTDQPLPDADHTWYTDGSSFLQEGQRKAGAAVTTETEVVWAKALPAGTSAQRAELIALTQALKMAEGKKLNVYTDSRYAFATAHIHGEIYRRRGWLTSEGKEIKNKDEILALLKALFLPKRLSIIHCPGHQKGNRAEARGNRMADQAAREVATRETPETSTLLAGKRTADGSEFEKRTADGSEFESPKKKAKVE

SEQ ID NO: 2515 - protein, 2096 aa, synthetic construct
MPAAKRVKLDGGDKKYSIGLDIGTNSVGWAVITDEYKVPSKKFKVLGNTDRHSIKKNLIGALLFDSGETAEATRLKRTARRRYTRRKNRICYLQEIFSNEMAKVDDSFFHRLEESFLVEEDKKHERHPIFGNIVDEVAYHEKYPTIYHLRKKLVDSTDKADLRLIYLALAHMIKFRGHFLIEGDLNPDNSDVDKLFIQLVQTYNQLFEENPINASGVDAKAILSARLSKSRRLENLIAQLPGEKKNGLFGNLIALSLGLTPNFKSNFDLAEDAKLQLSKDTYDDDLDNLLAQIGDQYADLFLAAKNLSDAILLSDILRVNTEITKAPLSASMIKRYDEHHQDLTLLKALVRQQLPEKYKEIFFDQSKNGYAGYIDGGASQEEFYKFIKPILEKMDGTEELLVKLNREDLLRKQRTFDNGSIPHQIHLGELHAILRRQEDFYPFLKDNREKIEKILTFRIPYYVGPLARGNSRFAWMTRKSEETITPWNFEEVVDKGASAQSFIERMTNFDKNLPNEKVLPKHSLLYEYFTVYNELTKVKYVTEGMRKPAFLSGEQKKAIVDLLFKTNRKVTVKQLKEDYFKKIECFDSVEISGVEDRFNASLGTYHDLLKIIKDKDFLDNEENEDILEDIVLTLTLFEDREMIEERLKTYAHLFDDKVMKQLKRRRYTGWGRLSRKLINGIRDKQSGKTILDFLKSDGFANRNFMQLIHDDSLTFKEDIQKAQVSGQGDSLHEHIANLAGSPAIKKGILQTVKVVDELVKVMGRHKPENIVIEMARENQTTQKGQKNSRERMKRIEEGIKELGSQILKEHPVENTQLQNEKLYLYYLQNGRDMYVDQELDINRLSDYDVDHIVPQSFLKDDSIDNKVLTRSDKARGKSDNVPSEEVVKKMKNYWRQLLNAKLITQRKFDNLTKAERGGLSELDKAGFIKRQLVETRQITKHVAQILDSRMNTKYDENDKLIREVKVITLKSKLVSDFRKDFQFYKVREINNYHHAHDAYLNAVVGTALIKKYPKLESEFVYGDYKVYDVRKMIAKSEQEIGKATAKYFFYSNIMNFFKTEITLANGEIRKRPLIETNGETGEIVWDKGRDFATVRKVLSMPQVNIVKKTEVQTGGFSKESILPKRNSDKLIARKKDWDPKKYGGFDSPTVAYSVLVVAKVEKGKSKKLKSVKELLGITIMERSSFEKNPIDFLEAKGYKEVKKDLIIKLPKYSLFELENGRKRMLASAGELQKGNELALPSKYVNFLYLASHYEKLKGSPEDNEQKQLFVEQHKHYLDEIIEQISEFSKRVILADANLDKVLSAYNKHRDKPIREQAENIIHLFTLTNLGAPAAFKYFDTTIDRKRYTSTKEVLDATLIHQSITGLYETRIDLSQLGGDGGGSSGGGEAAAKGGTLNIEDEYRLHETSKGPDVPLGSTWLSDFPQAWAETGGMGLAVRQAPLIIPLKATSTPVSIKQYPMSQEARLGIKPHIQRLLDQGILVPCQSPWNTPLLPVKKPGTNDYRPVQDLREVNKRVEDIHPTVPNPYNLLSGLPPSHQWYTVLDLKDAFFCLRLHPTSQSLFAFEWRDPEMGISGQLTWTRLPQGFKNSPTLFNEALHRDLADFRIQHPDLILLQYVDDLLLAATSELDCQQGTRALLQTLGDLGYRASAKKAQICQKQVKYLGYLLKEGQRWLTEARKETVMGQPTPKTPRQLREFLGKAGFCRLFIPGFAEMAAPLYPLTKPGTLFEWGPDQQKAYQEIKQALLTAPALGLPDLTKPFELFVDEKQGYAKGVLTQKLGPWRRPVAYLSKKLDPVAAGWPPCLRMVAAIAVLTKDAGKLTMGQPLVILAPHAVEALVKQPPDRWLSNARMTHYQALLLDTDRVQFGPIVALNPATLLPLPEEGLQHDCLDILAEAHGTRPDLTDQPLPDADHTWYTDGSSFLQEGQRKAGAAVTTETEVVWAKALPAGTSAQRAELIALTQALKMAEGKKLNVYTDSRYAFATAHIHGEIYRRRGWLTSEGKEIKNKDEILALLKALFLPKRLSIIHCPGHQKGNRAEARGNRMADQAAREVATRETPETSTLLAGKRTADGSEFEKRTADGSEFESPKKKAKVE

SEQ ID NO: 2516 - protein, 2100 aa, synthetic construct
MPAAKRVKLDGGDKKYSIGLDIGTNSVGWAVITDEYKVPSKKFKVLGNTDRHSIKKNLIGALLFDSGETAEATRLKRTARRRYTRRKNRICYLQEIFSNEMAKVDDSFFHRLEESFLVEEDKKHERHPIFGNIVDEVAYHEKYPTIYHLRKKLVDSTDKADLRLIYLALAHMIKFRGHFLIEGDLNPDNSDVDKLFIQLVQTYNQLFEENPINASGVDAKAILSARLSKSRRLENLIAQLPGEKKNGLFGNLIALSLGLTPNFKSNFDLAEDAKLQLSKDTYDDDLDNLLAQIGDQYADLFLAAKNLSDAILLSDILRVNTEITKAPLSASMIKRYDEHHQDLTLLKALVRQQLPEKYKEIFFDQSKNGYAGYIDGGASQEEFYKFIKPILEKMDGTEELLVKLNREDLLRKQRTFDNGSIPHQIHLGELHAILRRQEDFYPFLKDNREKIEKILTFRIPYYVGPLARGNSRFAWMTRKSEETITPWNFEEVVDKGASAQSFIERMTNFDKNLPNEKVLPKHSLLYEYFTVYNELTKVKYVTEGMRKPAFLSGEQKKAIVDLLFKTNRKVTVKQLKEDYFKKIECFDSVEISGVEDRFNASLGTYHDLLKIIKDKDFLDNEENEDILEDIVLTLTLFEDREMIEERLKTYAHLFDDKVMKQLKRRRYTGWGRLSRKLINGIRDKQSGKTILDFLKSDGFANRNFMQLIHDDSLTFKEDIQKAQVSGQGDSLHEHIANLAGSPAIKKGILQTVKVVDELVKVMGRHKPENIVIEMARENQTTQKGQKNSRERMKRIEEGIKELGSQILKEHPVENTQLQNEKLYLYYLQNGRDMYVDQELDINRLSDYDVDHIVPQSFLKDDSIDNKVLTRSDKARGKSDNVPSEEVVKKMKNYWRQLLNAKLITQRKFDNLTKAERGGLSELDKAGFIKRQLVETRQITKHVAQILDSRMNTKYDENDKLIREVKVITLKSKLVSDFRKDFQFYKVREINNYHHAHDAYLNAVVGTALIKKYPKLESEFVYGDYKVYDVRKMIAKSEQEIGKATAKYFFYSNIMNFFKTEITLANGEIRKRPLIETNGETGEIVWDKGRDFATVRKVLSMPQVNIVKKTEVQTGGFSKESILPKRNSDKLIARKKDWDPKKYGGFDSPTVAYSVLVVAKVEKGKSKKLKSVKELLGITIMERSSFEKNPIDFLEAKGYKEVKKDLIIKLPKYSLFELENGRKRMLASAGELQKGNELALPSKYVNFLYLASHYEKLKGSPEDNEQKQLFVEQHKHYLDEIIEQISEFSKRVILADANLDKVLSAYNKHRDKPIREQAENIIHLFTLTNLGAPAAFKYFDTTIDRKRYTSTKEVLDATLIHQSITGLYETRIDLSQLGGDGGGGGGSGGGGSGGGGSGGTLNIEDEYRLHETSKGPDVPLGSTWLSDFPQAWAETGGMGLAVRQAPLIIPLKATSTPVSIKQYPMSQEARLGIKPHIQRLLDQGILVPCQSPWNTPLLPVKKPGTNDYRPVQDLREVNKRVEDIHPTVPNPYNLLSGLPPSHQWYTVLDLKDAFFCLRLHPTSQSLFAFEWRDPEMGISGQLTWTRLPQGFKNSPTLFNEALHRDLADFRIQHPDLILLQYVDDLLLAATSELDCQQGTRALLQTLGDLGYRASAKKAQICQKQVKYLGYLLKEGQRWLTEARKETVMGQPTPKTPRQLREFLGKAGFCRLFIPGFAEMAAPLYPLTKPGTLFEWGPDQQKAYQEIKQALLTAPALGLPDLTKPFELFVDEKQGYAKGVLTQKLGPWRRPVAYLSKKLDPVAAGWPPCLRMVAAIAVLTKDAGKLTMGQPLVILAPHAVEALVKQPPDRWLSNARMTHYQALLLDTDRVQFGPIVALNPATLLPLPEEGLQHDCLDILAEAHGTRPDLTDQPLPDADHTWYTDGSSFLQEGQRKAGAAVTTETEVVWAKALPAGTSAQRAELIALTQALKMAEGKKLNVYTDSRYAFATAHIHGEIYRRRGWLTSEGKEIKNKDEILALLKALFLPKRLSIIHCPGHQKGNRAEARGNRMADQAAREVATRETPETSTLLAGKRTADGSEFEKRTADGSEFESPKKKAKVE

SEQ ID NO: 2517 - protein, 2093 aa, synthetic construct
MPAAKRVKLDGGDKKYSIGLDIGTNSVGWAVITDEYKVPSKKFKVLGNTDRHSIKKNLIGALLFDSGETAEATRLKRTARRRYTRRKNRICYLQEIFSNEMAKVDDSFFHRLEESFLVEEDKKHERHPIFGNIVDEVAYHEKYPTIYHLRKKLVDSTDKADLRLIYLALAHMIKFRGHFLIEGDLNPDNSDVDKLFIQLVQTYNQLFEENPINASGVDAKAILSARLSKSRRLENLIAQLPGEKKNGLFGNLIALSLGLTPNFKSNFDLAEDAKLQLSKDTYDDDLDNLLAQIGDQYADLFLAAKNLSDAILLSDILRVNTEITKAPLSASMIKRYDEHHQDLTLLKALVRQQLPEKYKEIFFDQSKNGYAGYIDGGASQEEFYKFIKPILEKMDGTEELLVKLNREDLLRKQRTFDNGSIPHQIHLGELHAILRRQEDFYPFLKDNREKIEKILTFRIPYYVGPLARGNSRFAWMTRKSEETITPWNFEEVVDKGASAQSFIERMTNFDKNLPNEKVLPKHSLLYEYFTVYNELTKVKYVTEGMRKPAFLSGEQKKAIVDLLFKTNRKVTVKQLKEDYFKKIECFDSVEISGVEDRFNASLGTYHDLLKIIKDKDFLDNEENEDILEDIVLTLTLFEDREMIEERLKTYAHLFDDKVMKQLKRRRYTGWGRLSRKLINGIRDKQSGKTILDFLKSDGFANRNFMQLIHDDSLTFKEDIQKAQVSGQGDSLHEHIANLAGSPAIKKGILQTVKVVDELVKVMGRHKPENIVIEMARENQTTQKGQKNSRERMKRIEEGIKELGSQILKEHPVENTQLQNEKLYLYYLQNGRDMYVDQELDINRLSDYDVDHIVPQSFLKDDSIDNKVLTRSDKARGKSDNVPSEEVVKKMKNYWRQLLNAKLITQRKFDNLTKAERGGLSELDKAGFIKRQLVETRQITKHVAQILDSRMNTKYDENDKLIREVKVITLKSKLVSDFRKDFQFYKVREINNYHHAHDAYLNAVVGTALIKKYPKLESEFVYGDYKVYDVRKMIAKSEQEIGKATAKYFFYSNIMNFFKTEITLANGEIRKRPLIETNGETGEIVWDKGRDFATVRKVLSMPQVNIVKKTEVQTGGFSKESILPKRNSDKLIARKKDWDPKKYGGFDSPTVAYSVLVVAKVEKGKSKKLKSVKELLGITIMERSSFEKNPIDFLEAKGYKEVKKDLIIKLPKYSLFELENGRKRMLASAGELQKGNELALPSKYVNFLYLASHYEKLKGSPEDNEQKQLFVEQHKHYLDEIIEQISEFSKRVILADANLDKVLSAYNKHRDKPIREQAENIIHLFTLTNLGAPAAFKYFDTTIDRKRYTSTKEVLDATLIHQSITGLYETRIDLSQLGGDGGEAAAKGGGGGTLNIEDEYRLHETSKGPDVPLGSTWLSDFPQAWAETGGMGLAVRQAPLIIPLKATSTPVSIKQYPMSQEARLGIKPHIQRLLDQGILVPCQSPWNTPLLPVKKPGTNDYRPVQDLREVNKRVEDIHPTVPNPYNLLSGLPPSHQWYTVLDLKDAFFCLRLHPTSQSLFAFEWRDPEMGISGQLTWTRLPQGFKNSPTLFNEALHRDLADFRIQHPDLILLQYVDDLLLAATSELDCQQGTRALLQTLGDLGYRASAKKAQICQKQVKYLGYLLKEGQRWLTEARKETVMGQPTPKTPRQLREFLGKAGFCRLFIPGFAEMAAPLYPLTKPGTLFEWGPDQQKAYQEIKQALLTAPALGLPDLTKPFELFVDEKQGYAKGVLTQKLGPWRRPVAYLSKKLDPVAAGWPPCLRMVAAIAVLTKDAGKLTMGQPLVILAPHAVEALVKQPPDRWLSNARMTHYQALLLDTDRVQFGPIVALNPATLLPLPEEGLQHDCLDILAEAHGTRPDLTDQPLPDADHTWYTDGSSFLQEGQRKAGAAVTTETEVVWAKALPAGTSAQRAELIALTQALKMAEGKKLNVYTDSRYAFATAHIHGEIYRRRGWLTSEGKEIKNKDEILALLKALFLPKRLSIIHCPGHQKGNRAEARGNRMADQAAREVATRETPETSTLLAGKRTADGSEFEKRTADGSEFESPKKKAKVE

SEQ ID NO: 2518 - protein, 2101 aa, synthetic construct
MPAAKRVKLDGGDKKYSIGLDIGTNSVGWAVITDEYKVPSKKFKVLGNTDRHSIKKNLIGALLFDSGETAEATRLKRTARRRYTRRKNRICYLQEIFSNEMAKVDDSFFHRLEESFLVEEDKKHERHPIFGNIVDEVAYHEKYPTIYHLRKKLVDSTDKADLRLIYLALAHMIKFRGHFLIEGDLNPDNSDVDKLFIQLVQTYNQLFEENPINASGVDAKAILSARLSKSRRLENLIAQLPGEKKNGLFGNLIALSLGLTPNFKSNFDLAEDAKLQLSKDTYDDDLDNLLAQIGDQYADLFLAAKNLSDAILLSDILRVNTEITKAPLSASMIKRYDEHHQDLTLLKALVRQQLPEKYKEIFFDQSKNGYAGYIDGGASQEEFYKFIKPILEKMDGTEELLVKLNREDLLRKQRTFDNGSIPHQIHLGELHAILRRQEDFYPFLKDNREKIEKILTFRIPYYVGPLARGNSRFAWMTRKSEETITPWNFEEVVDKGASAQSFIERMTNFDKNLPNEKVLPKHSLLYEYFTVYNELTKVKYVTEGMRKPAFLSGEQKKAIVDLLFKTNRKVTVKQLKEDYFKKIECFDSVEISGVEDRFNASLGTYHDLLKIIKDKDFLDNEENEDILEDIVLTLTLFEDREMIEERLKTYAHLFDDKVMKQLKRRRYTGWGRLSRKLINGIRDKQSGKTILDFLKSDGFANRNFMQLIHDDSLTFKEDIQKAQVSGQGDSLHEHIANLAGSPAIKKGILQTVKVVDELVKVMGRHKPENIVIEMARENQTTQKGQKNSRERMKRIEEGIKELGSQILKEHPVENTQLQNEKLYLYYLQNGRDMYVDQELDINRLSDYDVDHIVPQSFLKDDSIDNKVLTRSDKARGKSDNVPSEEVVKKMKNYWRQLLNAKLITQRKFDNLTKAERGGLSELDKAGFIKRQLVETRQITKHVAQILDSRMNTKYDENDKLIREVKVITLKSKLVSDFRKDFQFYKVREINNYHHAHDAYLNAVVGTALIKKYPKLESEFVYGDYKVYDVRKMIAKSEQEIGKATAKYFFYSNIMNFFKTEITLANGEIRKRPLIETNGETGEIVWDKGRDFATVRKVLSMPQVNIVKKTEVQTGGFSKESILPKRNSDKLIARKKDWDPKKYGGFDSPTVAYSVLVVAKVEKGKSKKLKSVKELLGITIMERSSFEKNPIDFLEAKGYKEVKKDLIIKLPKYSLFELENGRKRMLASAGELQKGNELALPSKYVNFLYLASHYEKLKGSPEDNEQKQLFVEQHKHYLDEIIEQISEFSKRVILADANLDKVLSAYNKHRDKPIREQAENIIHLFTLTNLGAPAAFKYFDTTIDRKRYTSTKEVLDATLIHQSITGLYETRIDLSQLGGDGGSGSETPGTSESATPESGGTLNIEDEYRLHETSKGPDVPLGSTWLSDFPQAWAETGGMGLAVRQAPLIIPLKATSTPVSIKQYPMSQEARLGIKPHIQRLLDQGILVPCQSPWNTPLLPVKKPGTNDYRPVQDLREVNKRVEDIHPTVPNPYNLLSGLPPSHQWYTVLDLKDAFFCLRLHPTSQSLFAFEWRDPEMGISGQLTWTRLPQGFKNSPTLFNEALHRDLADFRIQHPDLILLQYVDDLLLAATSELDCQQGTRALLQTLGDLGYRASAKKAQICQKQVKYLGYLLKEGQRWLTEARKETVMGQPTPKTPRQLREFLGKAGFCRLFIPGFAEMAAPLYPLTKPGTLFEWGPDQQKAYQEIKQALLTAPALGLPDLTKPFELFVDEKQGYAKGVLTQKLGPWRRPVAYLSKKLDPVAAGWPPCLRMVAAIAVLTKDAGKLTMGQPLVILAPHAVEALVKQPPDRWLSNARMTHYQALLLDTDRVQFGPIVALNPATLLPLPEEGLQHDCLDILAEAHGTRPDLTDQPLPDADHTWYTDGSSFLQEGQRKAGAAVTTETEVVWAKALPAGTSAQRAELIALTQALKMAEGKKLNVYTDSRYAFATAHIHGEIYRRRGWLTSEGKEIKNKDEILALLKALFLPKRLSIIHCPGHQKGNRAEARGNRMADQAAREVATRETPETSTLLAGKRTADGSEFEKRTADGSEFESPKKKAKVE

SEQ ID NO: 2519 - protein, 2096 aa, synthetic construct
MPAAKRVKLDGGDKKYSIGLDIGTNSVGWAVITDEYKVPSKKFKVLGNTDRHSIKKNLIGALLFDSGETAEATRLKRTARRRYTRRKNRICYLQEIFSNEMAKVDDSFFHRLEESFLVEEDKKHERHPIFGNIVDEVAYHEKYPTIYHLRKKLVDSTDKADLRLIYLALAHMIKFRGHFLIEGDLNPDNSDVDKLFIQLVQTYNQLFEENPINASGVDAKAILSARLSKSRRLENLIAQLPGEKKNGLFGNLIALSLGLTPNFKSNFDLAEDAKLQLSKDTYDDDLDNLLAQIGDQYADLFLAAKNLSDAILLSDILRVNTEITKAPLSASMIKRYDEHHQDLTLLKALVRQQLPEKYKEIFFDQSKNGYAGYIDGGASQEEFYKFIKPILEKMDGTEELLVKLNREDLLRKQRTFDNGSIPHQIHLGELHAILRRQEDFYPFLKDNREKIEKILTFRIPYYVGPLARGNSRFAWMTRKSEETITPWNFEEVVDKGASAQSFIERMTNFDKNLPNEKVLPKHSLLYEYFTVYNELTKVKYVTEGMRKPAFLSGEQKKAIVDLLFKTNRKVTVKQLKEDYFKKIECFDSVEISGVEDRFNASLGTYHDLLKIIKDKDFLDNEENEDILEDIVLTLTLFEDREMIEERLKTYAHLFDDKVMKQLKRRRYTGWGRLSRKLINGIRDKQSGKTILDFLKSDGFANRNFMQLIHDDSLTFKEDIQKAQVSGQGDSLHEHIANLAGSPAIKKGILQTVKVVDELVKVMGRHKPENIVIEMARENQTTQKGQKNSRERMKRIEEGIKELGSQILKEHPVENTQLQNEKLYLYYLQNGRDMYVDQELDINRLSDYDVDHIVPQSFLKDDSIDNKVLTRSDKARGKSDNVPSEEVVKKMKNYWRQLLNAKLITQRKFDNLTKAERGGLSELDKAGFIKRQLVETRQITKHVAQILDSRMNTKYDENDKLIREVKVITLKSKLVSDFRKDFQFYKVREINNYHHAHDAYLNAVVGTALIKKYPKLESEFVYGDYKVYDVRKMIAKSEQEIGKATAKYFFYSNIMNFFKTEITLANGEIRKRPLIETNGETGEIVWDKGRDFATVRKVLSMPQVNIVKKTEVQTGGFSKESILPKRNSDKLIARKKDWDPKKYGGFDSPTVAYSVLVVAKVEKGKSKKLKSVKELLGITIMERSSFEKNPIDFLEAKGYKEVKKDLIIKLPKYSLFELENGRKRMLASAGELQKGNELALPSKYVNFLYLASHYEKLKGSPEDNEQKQLFVEQHKHYLDEIIEQISEFSKRVILADANLDKVLSAYNKHRDKPIREQAENIIHLFTLTNLGAPAAFKYFDTTIDRKRYTSTKEVLDATLIHQSITGLYETRIDLSQLGGDGGEAAAKPAPGSSGGTLNIEDEYRLHETSKGPDVPLGSTWLSDFPQAWAETGGMGLAVRQAPLIIPLKATSTPVSIKQYPMSQEARLGIKPHIQRLLDQGILVPCQSPWNTPLLPVKKPGTNDYRPVQDLREVNKRVEDIHPTVPNPYNLLSGLPPSHQWYTVLDLKDAFFCLRLHPTSQSLFAFEWRDPEMGISGQLTWTRLPQGFKNSPTLFNEALHRDLADFRIQHPDLILLQYVDDLLLAATSELDCQQGTRALLQTLGDLGYRASAKKAQICQKQVKYLGYLLKEGQRWLTEARKETVMGQPTPKTPRQLREFLGKAGFCRLFIPGFAEMAAPLYPLTKPGTLFEWGPDQQKAYQEIKQALLTAPALGLPDLTKPFELFVDEKQGYAKGVLTQKLGPWRRPVAYLSKKLDPVAAGWPPCLRMVAAIAVLTKDAGKLTMGQPLVILAPHAVEALVKQPPDRWLSNARMTHYQALLLDTDRVQFGPIVALNPATLLPLPEEGLQHDCLDILAEAHGTRPDLTDQPLPDADHTWYTDGSSFLQEGQRKAGAAVTTETEVVWAKALPAGTSAQRAELIALTQALKMAEGKKLNVYTDSRYAFATAHIHGEIYRRRGWLTSEGKEIKNKDEILALLKALFLPKRLSIIHCPGHQKGNRAEARGNRMADQAAREVATRETPETSTLLAGKRTADGSEFEKRTADGSEFESPKKKAKVE

SEQ ID NO: 2520 - protein, 2091 aa, synthetic construct
MPAAKRVKLDGGDKKYSIGLDIGTNSVGWAVITDEYKVPSKKFKVLGNTDRHSIKKNLIGALLFDSGETAEATRLKRTARRRYTRRKNRICYLQEIFSNEMAKVDDSFFHRLEESFLVEEDKKHERHPIFGNIVDEVAYHEKYPTIYHLRKKLVDSTDKADLRLIYLALAHMIKFRGHFLIEGDLNPDNSDVDKLFIQLVQTYNQLFEENPINASGVDAKAILSARLSKSRRLENLIAQLPGEKKNGLFGNLIALSLGLTPNFKSNFDLAEDAKLQLSKDTYDDDLDNLLAQIGDQYADLFLAAKNLSDAILLSDILRVNTEITKAPLSASMIKRYDEHHQDLTLLKALVRQQLPEKYKEIFFDQSKNGYAGYIDGGASQEEFYKFIKPILEKMDGTEELLVKLNREDLLRKQRTFDNGSIPHQIHLGELHAILRRQEDFYPFLKDNREKIEKILTFRIPYYVGPLARGNSRFAWMTRKSEETITPWNFEEVVDKGASAQSFIERMTNFDKNLPNEKVLPKHSLLYEYFTVYNELTKVKYVTEGMRKPAFLSGEQKKAIVDLLFKTNRKVTVKQLKEDYFKKIECFDSVEISGVEDRFNASLGTYHDLLKIIKDKDFLDNEENEDILEDIVLTLTLFEDREMIEERLKTYAHLFDDKVMKQLKRRRYTGWGRLSRKLINGIRDKQSGKTILDFLKSDGFANRNFMQLIHDDSLTFKEDIQKAQVSGQGDSLHEHIANLAGSPAIKKGILQTVKVVDELVKVMGRHKPENIVIEMARENQTTQKGQKNSRERMKRIEEGIKELGSQILKEHPVENTQLQNEKLYLYYLQNGRDMYVDQELDINRLSDYDVDHIVPQSFLKDDSIDNKVLTRSDKARGKSDNVPSEEVVKKMKNYWRQLLNAKLITQRKFDNLTKAERGGLSELDKAGFIKRQLVETRQITKHVAQILDSRMNTKYDENDKLIREVKVITLKSKLVSDFRKDFQFYKVREINNYHHAHDAYLNAVVGTALIKKYPKLESEFVYGDYKVYDVRKMIAKSEQEIGKATAKYFFYSNIMNFFKTEITLANGEIRKRPLIETNGETGEIVWDKGRDFATVRKVLSMPQVNIVKKTEVQTGGFSKESILPKRNSDKLIARKKDWDPKKYGGFDSPTVAYSVLVVAKVEKGKSKKLKSVKELLGITIMERSSFEKNPIDFLEAKGYKEVKKDLIIKLPKYSLFELENGRKRMLASAGELQKGNELALPSKYVNFLYLASHYEKLKGSPEDNEQKQLFVEQHKHYLDEIIEQISEFSKRVILADANLDKVLSAYNKHRDKPIREQAENIIHLFTLTNLGAPAAFKYFDTTIDRKRYTSTKEVLDATLIHQSITGLYETRIDLSQLGGDGGGSSGSSGGTLNIEDEYRLHETSKGPDVPLGSTWLSDFPQAWAETGGMGLAVRQAPLIIPLKATSTPVSIKQYPMSQEARLGIKPHIQRLLDQGILVPCQSPWNTPLLPVKKPGTNDYRPVQDLREVNKRVEDIHPTVPNPYNLLSGLPPSHQWYTVLDLKDAFFCLRLHPTSQSLFAFEWRDPEMGISGQLTWTRLPQGFKNSPTLFNEALHRDLADFRIQHPDLILLQYVDDLLLAATSELDCQQGTRALLQTLGDLGYRASAKKAQICQKQVKYLGYLLKEGQRWLTEARKETVMGQPTPKTPRQLREFLGKAGFCRLFIPGFAEMAAPLYPLTKPGTLFEWGPDQQKAYQEIKQALLTAPALGLPDLTKPFELFVDEKQGYAKGVLTQKLGPWRRPVAYLSKKLDPVAAGWPPCLRMVAAIAVLTKDAGKLTMGQPLVILAPHAVEALVKQPPDRWLSNARMTHYQALLLDTDRVQFGPIVALNPATLLPLPEEGLQHDCLDILAEAHGTRPDLTDQPLPDADHTWYTDGSSFLQEGQRKAGAAVTTETEVVWAKALPAGTSAQRAELIALTQALKMAEGKKLNVYTDSRYAFATAHIHGEIYRRRGWLTSEGKEIKNKDEILALLKALFLPKRLSIIHCPGHQKGNRAEARGNRMADQAAREVATRETPETSTLLAGKRTADGSEFEKRTADGSEFESPKKKAKVE

SEQ ID NO: 2521 - protein, 2096 aa, synthetic construct
MPAAKRVKLDGGDKKYSIGLDIGTNSVGWAVITDEYKVPSKKFKVLGNTDRHSIKKNLIGALLFDSGETAEATRLKRTARRRYTRRKNRICYLQEIFSNEMAKVDDSFFHRLEESFLVEEDKKHERHPIFGNIVDEVAYHEKYPTIYHLRKKLVDSTDKADLRLIYLALAHMIKFRGHFLIEGDLNPDNSDVDKLFIQLVQTYNQLFEENPINASGVDAKAILSARLSKSRRLENLIAQLPGEKKNGLFGNLIALSLGLTPNFKSNFDLAEDAKLQLSKDTYDDDLDNLLAQIGDQYADLFLAAKNLSDAILLSDILRVNTEITKAPLSASMIKRYDEHHQDLTLLKALVRQQLPEKYKEIFFDQSKNGYAGYIDGGASQEEFYKFIKPILEKMDGTEELLVKLNREDLLRKQRTFDNGSIPHQIHLGELHAILRRQEDFYPFLKDNREKIEKILTFRIPYYVGPLARGNSRFAWMTRKSEETITPWNFEEVVDKGASAQSFIERMTNFDKNLPNEKVLPKHSLLYEYFTVYNELTKVKYVTEGMRKPAFLSGEQKKAIVDLLFKTNRKVTVKQLKEDYFKKIECFDSVEISGVEDRFNASLGTYHDLLKIIKDKDFLDNEENEDILEDIVLTLTLFEDREMIEERLKTYAHLFDDKVMKQLKRRRYTGWGRLSRKLINGIRDKQSGKTILDFLKSDGFANRNFMQLIHDDSLTFKEDIQKAQVSGQGDSLHEHIANLAGSPAIKKGILQTVKVVDELVKVMGRHKPENIVIEMARENQTTQKGQKNSRERMKRIEEGIKELGSQILKEHPVENTQLQNEKLYLYYLQNGRDMYVDQELDINRLSDYDVDHIVPQSFLKDDSIDNKVLTRSDKARGKSDNVPSEEVVKKMKNYWRQLLNAKLITQRKFDNLTKAERGGLSELDKAGFIKRQLVETRQITKHVAQILDSRMNTKYDENDKLIREVKVITLKSKLVSDFRKDFQFYKVREINNYHHAHDAYLNAVVGTALIKKYPKLESEFVYGDYKVYDVRKMIAKSEQEIGKATAKYFFYSNIMNFFKTEITLANGEIRKRPLIETNGETGEIVWDKGRDFATVRKVLSMPQVNIVKKTEVQTGGFSKESILPKRNSDKLIARKKDWDPKKYGGFDSPTVAYSVLVVAKVEKGKSKKLKSVKELLGITIMERSSFEKNPIDFLEAKGYKEVKKDLIIKLPKYSLFELENGRKRMLASAGELQKGNELALPSKYVNFLYLASHYEKLKGSPEDNEQKQLFVEQHKHYLDEIIEQISEFSKRVILADANLDKVLSAYNKHRDKPIREQAENIIHLFTLTNLGAPAAFKYFDTTIDRKRYTSTKEVLDATLIHQSITGLYETRIDLSQLGGDGGGGGEAAAKGGSGGTLNIEDEYRLHETSKGPDVPLGSTWLSDFPQAWAETGGMGLAVRQAPLIIPLKATSTPVSIKQYPMSQEARLGIKPHIQRLLDQGILVPCQSPWNTPLLPVKKPGTNDYRPVQDLREVNKRVEDIHPTVPNPYNLLSGLPPSHQWYTVLDLKDAFFCLRLHPTSQSLFAFEWRDPEMGISGQLTWTRLPQGFKNSPTLFNEALHRDLADFRIQHPDLILLQYVDDLLLAATSELDCQQGTRALLQTLGDLGYRASAKKAQICQKQVKYLGYLLKEGQRWLTEARKETVMGQPTPKTPRQLREFLGKAGFCRLFIPGFAEMAAPLYPLTKPGTLFEWGPDQQKAYQEIKQALLTAPALGLPDLTKPFELFVDEKQGYAKGVLTQKLGPWRRPVAYLSKKLDPVAAGWPPCLRMVAAIAVLTKDAGKLTMGQPLVILAPHAVEALVKQPPDRWLSNARMTHYQALLLDTDRVQFGPIVALNPATLLPLPEEGLQHDCLDILAEAHGTRPDLTDQPLPDADHTWYTDGSSFLQEGQRKAGAAVTTETEVVWAKALPAGTSAQRAELIALTQALKMAEGKKLNVYTDSRYAFATAHIHGEIYRRRGWLTSEGKEIKNKDEILALLKALFLPKRLSIIHCPGHQKGNRAEARGNRMADQAAREVATRETPETSTLLAGKRTADGSEFEKRTADGSEFESPKKKAKVE

SEQ ID NO: 2522 - protein, 2105 aa, synthetic construct
MPAAKRVKLDGGDKKYSIGLDIGTNSVGWAVITDEYKVPSKKFKVLGNTDRHSIKKNLIGALLFDSGETAEATRLKRTARRRYTRRKNRICYLQEIFSNEMAKVDDSFFHRLEESFLVEEDKKHERHPIFGNIVDEVAYHEKYPTIYHLRKKLVDSTDKADLRLIYLALAHMIKFRGHFLIEGDLNPDNSDVDKLFIQLVQTYNQLFEENPINASGVDAKAILSARLSKSRRLENLIAQLPGEKKNGLFGNLIALSLGLTPNFKSNFDLAEDAKLQLSKDTYDDDLDNLLAQIGDQYADLFLAAKNLSDAILLSDILRVNTEITKAPLSASMIKRYDEHHQDLTLLKALVRQQLPEKYKEIFFDQSKNGYAGYIDGGASQEEFYKFIKPILEKMDGTEELLVKLNREDLLRKQRTFDNGSIPHQIHLGELHAILRRQEDFYPFLKDNREKIEKILTFRIPYYVGPLARGNSRFAWMTRKSEETITPWNFEEVVDKGASAQSFIERMTNFDKNLPNEKVLPKHSLLYEYFTVYNELTKVKYVTEGMRKPAFLSGEQKKAIVDLLFKTNRKVTVKQLKEDYFKKIECFDSVEISGVEDRFNASLGTYHDLLKIIKDKDFLDNEENEDILEDIVLTLTLFEDREMIEERLKTYAHLFDDKVMKQLKRRRYTGWGRLSRKLINGIRDKQSGKTILDFLKSDGFANRNFMQLIHDDSLTFKEDIQKAQVSGQGDSLHEHIANLAGSPAIKKGILQTVKVVDELVKVMGRHKPENIVIEMARENQTTQKGQKNSRERMKRIEEGIKELGSQILKEHPVENTQLQNEKLYLYYLQNGRDMYVDQELDINRLSDYDVDHIVPQSFLKDDSIDNKVLTRSDKARGKSDNVPSEEVVKKMKNYWRQLLNAKLITQRKFDNLTKAERGGLSELDKAGFIKRQLVETRQITKHVAQILDSRMNTKYDENDKLIREVKVITLKSKLVSDFRKDFQFYKVREINNYHHAHDAYLNAVVGTALIKKYPKLESEFVYGDYKVYDVRKMIAKSEQEIGKATAKYFFYSNIMNFFKTEITLANGEIRKRPLIETNGETGEIVWDKGRDFATVRKVLSMPQVNIVKKTEVQTGGFSKESILPKRNSDKLIARKKDWDPKKYGGFDSPTVAYSVLVVAKVEKGKSKKLKSVKELLGITIMERSSFEKNPIDFLEAKGYKEVKKDLIIKLPKYSLFELENGRKRMLASAGELQKGNELALPSKYVNFLYLASHYEKLKGSPEDNEQKQLFVEQHKHYLDEIIEQISEFSKRVILADANLDKVLSAYNKHRDKPIREQAENIIHLFTLTNLGAPAAFKYFDTTIDRKRYTSTKEVLDATLIHQSITGLYETRIDLSQLGGDGGEAAAKEAAAKEAAAKEAAAKGGTLNIEDEYRLHETSKGPDVPLGSTWLSDFPQAWAETGGMGLAVRQAPLIIPLKATSTPVSIKQYPMSQEARLGIKPHIQRLLDQGILVPCQSPWNTPLLPVKKPGTNDYRPVQDLREVNKRVEDIHPTVPNPYNLLSGLPPSHQWYTVLDLKDAFFCLRLHPTSQSLFAFEWRDPEMGISGQLTWTRLPQGFKNSPTLFNEALHRDLADFRIQHPDLILLQYVDDLLLAATSELDCQQGTRALLQTLGDLGYRASAKKAQICQKQVKYLGYLLKEGQRWLTEARKETVMGQPTPKTPRQLREFLGKAGFCRLFIPGFAEMAAPLYPLTKPGTLFEWGPDQQKAYQEIKQALLTAPALGLPDLTKPFELFVDEKQGYAKGVLTQKLGPWRRPVAYLSKKLDPVAAGWPPCLRMVAAIAVLTKDAGKLTMGQPLVILAPHAVEALVKQPPDRWLSNARMTHYQALLLDTDRVQFGPIVALNPATLLPLPEEGLQHDCLDILAEAHGTRPDLTDQPLPDADHTWYTDGSSFLQEGQRKAGAAVTTETEVVWAKALPAGTSAQRAELIALTQALKMAEGKKLNVYTDSRYAFATAHIHGEIYRRRGWLTSEGKEIKNKDEILALLKALFLPKRLSIIHCPGHQKGNRAEARGNRMADQAAREVATRETPETSTLLAGKRTADGSEFEKRTADGSEFESPKKKAKVE

SEQ ID NO: 2523 - protein, 2094 aa, synthetic construct
MPAAKRVKLDGGDKKYSIGLDIGTNSVGWAVITDEYKVPSKKFKVLGNTDRHSIKKNLIGALLFDSGETAEATRLKRTARRRYTRRKNRICYLQEIFSNEMAKVDDSFFHRLEESFLVEEDKKHERHPIFGNIVDEVAYHEKYPTIYHLRKKLVDSTDKADLRLIYLALAHMIKFRGHFLIEGDLNPDNSDVDKLFIQLVQTYNQLFEENPINASGVDAKAILSARLSKSRRLENLIAQLPGEKKNGLFGNLIALSLGLTPNFKSNFDLAEDAKLQLSKDTYDDDLDNLLAQIGDQYADLFLAAKNLSDAILLSDILRVNTEITKAPLSASMIKRYDEHHQDLTLLKALVRQQLPEKYKEIFFDQSKNGYAGYIDGGASQEEFYKFIKPILEKMDGTEELLVKLNREDLLRKQRTFDNGSIPHQIHLGELHAILRRQEDFYPFLKDNREKIEKILTFRIPYYVGPLARGNSRFAWMTRKSEETITPWNFEEVVDKGASAQSFIERMTNFDKNLPNEKVLPKHSLLYEYFTVYNELTKVKYVTEGMRKPAFLSGEQKKAIVDLLFKTNRKVTVKQLKEDYFKKIECFDSVEISGVEDRFNASLGTYHDLLKIIKDKDFLDNEENEDILEDIVLTLTLFEDREMIEERLKTYAHLFDDKVMKQLKRRRYTGWGRLSRKLINGIRDKQSGKTILDFLKSDGFANRNFMQLIHDDSLTFKEDIQKAQVSGQGDSLHEHIANLAGSPAIKKGILQTVKVVDELVKVMGRHKPENIVIEMARENQTTQKGQKNSRERMKRIEEGIKELGSQILKEHPVENTQLQNEKLYLYYLQNGRDMYVDQELDINRLSDYDVDHIVPQSFLKDDSIDNKVLTRSDKARGKSDNVPSEEVVKKMKNYWRQLLNAKLITQRKFDNLTKAERGGLSELDKAGFIKRQLVETRQITKHVAQILDSRMNTKYDENDKLIREVKVITLKSKLVSDFRKDFQFYKVREINNYHHAHDAYLNAVVGTALIKKYPKLESEFVYGDYKVYDVRKMIAKSEQEIGKATAKYFFYSNIMNFFKTEITLANGEIRKRPLIETNGETGEIVWDKGRDFATVRKVLSMPQVNIVKKTEVQTGGFSKESILPKRNSDKLIARKKDWDPKKYGGFDSPTVAYSVLVVAKVEKGKSKKLKSVKELLGITIMERSSFEKNPIDFLEAKGYKEVKKDLIIKLPKYSLFELENGRKRMLASAGELQKGNELALPSKYVNFLYLASHYEKLKGSPEDNEQKQLFVEQHKHYLDEIIEQISEFSKRVILADANLDKVLSAYNKHRDKPIREQAENIIHLFTLTNLGAPAAFKYFDTTIDRKRYTSTKEVLDATLIHQSITGLYETRIDLSQLGGDGGGGSGGSGGSGGTLNIEDEYRLHETSKGPDVPLGSTWLSDFPQAWAETGGMGLAVRQAPLIIPLKATSTPVSIKQYPMSQEARLGIKPHIQRLLDQGILVPCQSPWNTPLLPVKKPGTNDYRPVQDLREVNKRVEDIHPTVPNPYNLLSGLPPSHQWYTVLDLKDAFFCLRLHPTSQSLFAFEWRDPEMGISGQLTWTRLPQGFKNSPTLFNEALHRDLADFRIQHPDLILLQYVDDLLLAATSELDCQQGTRALLQTLGDLGYRASAKKAQICQKQVKYLGYLLKEGQRWLTEARKETVMGQPTPKTPRQLREFLGKAGFCRLFIPGFAEMAAPLYPLTKPGTLFEWGPDQQKAYQEIKQALLTAPALGLPDLTKPFELFVDEKQGYAKGVLTQKLGPWRRPVAYLSKKLDPVAAGWPPCLRMVAAIAVLTKDAGKLTMGQPLVILAPHAVEALVKQPPDRWLSNARMTHYQALLLDTDRVQFGPIVALNPATLLPLPEEGLQHDCLDILAEAHGTRPDLTDQPLPDADHTWYTDGSSFLQEGQRKAGAAVTTETEVVWAKALPAGTSAQRAELIALTQALKMAEGKKLNVYTDSRYAFATAHIHGEIYRRRGWLTSEGKEIKNKDEILALLKALFLPKRLSIIHCPGHQKGNRAEARGNRMADQAAREVATRETPETSTLLAGKRTADGSEFEKRTADGSEFESPKKKAKVE

SEQ ID NO: 2524 - protein, 2088 aa, synthetic construct
MPAAKRVKLDGGDKKYSIGLDIGTNSVGWAVITDEYKVPSKKFKVLGNTDRHSIKKNLIGALLFDSGETAEATRLKRTARRRYTRRKNRICYLQEIFSNEMAKVDDSFFHRLEESFLVEEDKKHERHPIFGNIVDEVAYHEKYPTIYHLRKKLVDSTDKADLRLIYLALAHMIKFRGHFLIEGDLNPDNSDVDKLFIQLVQTYNQLFEENPINASGVDAKAILSARLSKSRRLENLIAQLPGEKKNGLFGNLIALSLGLTPNFKSNFDLAEDAKLQLSKDTYDDDLDNLLAQIGDQYADLFLAAKNLSDAILLSDILRVNTEITKAPLSASMIKRYDEHHQDLTLLKALVRQQLPEKYKEIFFDQSKNGYAGYIDGGASQEEFYKFIKPILEKMDGTEELLVKLNREDLLRKQRTFDNGSIPHQIHLGELHAILRRQEDFYPFLKDNREKIEKILTFRIPYYVGPLARGNSRFAWMTRKSEETITPWNFEEVVDKGASAQSFIERMTNFDKNLPNEKVLPKHSLLYEYFTVYNELTKVKYVTEGMRKPAFLSGEQKKAIVDLLFKTNRKVTVKQLKEDYFKKIECFDSVEISGVEDRFNASLGTYHDLLKIIKDKDFLDNEENEDILEDIVLTLTLFEDREMIEERLKTYAHLFDDKVMKQLKRRRYTGWGRLSRKLINGIRDKQSGKTILDFLKSDGFANRNFMQLIHDDSLTFKEDIQKAQVSGQGDSLHEHIANLAGSPAIKKGILQTVKVVDELVKVMGRHKPENIVIEMARENQTTQKGQKNSRERMKRIEEGIKELGSQILKEHPVENTQLQNEKLYLYYLQNGRDMYVDQELDINRLSDYDVDHIVPQSFLKDDSIDNKVLTRSDKARGKSDNVPSEEVVKKMKNYWRQLLNAKLITQRKFDNLTKAERGGLSELDKAGFIKRQLVETRQITKHVAQILDSRMNTKYDENDKLIREVKVITLKSKLVSDFRKDFQFYKVREINNYHHAHDAYLNAVVGTALIKKYPKLESEFVYGDYKVYDVRKMIAKSEQEIGKATAKYFFYSNIMNFFKTEITLANGEIRKRPLIETNGETGEIVWDKGRDFATVRKVLSMPQVNIVKKTEVQTGGFSKESILPKRNSDKLIARKKDWDPKKYGGFDSPTVAYSVLVVAKVEKGKSKKLKSVKELLGITIMERSSFEKNPIDFLEAKGYKEVKKDLIIKLPKYSLFELENGRKRMLASAGELQKGNELALPSKYVNFLYLASHYEKLKGSPEDNEQKQLFVEQHKHYLDEIIEQISEFSKRVILADANLDKVLSAYNKHRDKPIREQAENIIHLFTLTNLGAPAAFKYFDTTIDRKRYTSTKEVLDATLIHQSITGLYETRIDLSQLGGDGGPAPGGTLNIEDEYRLHETSKGPDVPLGSTWLSDFPQAWAETGGMGLAVRQAPLIIPLKATSTPVSIKQYPMSQEARLGIKPHIQRLLDQGILVPCQSPWNTPLLPVKKPGTNDYRPVQDLREVNKRVEDIHPTVPNPYNLLSGLPPSHQWYTVLDLKDAFFCLRLHPTSQSLFAFEWRDPEMGISGQLTWTRLPQGFKNSPTLFNEALHRDLADFRIQHPDLILLQYVDDLLLAATSELDCQQGTRALLQTLGDLGYRASAKKAQICQKQVKYLGYLLKEGQRWLTEARKETVMGQPTPKTPRQLREFLGKAGFCRLFIPGFAEMAAPLYPLTKPGTLFEWGPDQQKAYQEIKQALLTAPALGLPDLTKPFELFVDEKQGYAKGVLTQKLGPWRRPVAYLSKKLDPVAAGWPPCLRMVAAIAVLTKDAGKLTMGQPLVILAPHAVEALVKQPPDRWLSNARMTHYQALLLDTDRVQFGPIVALNPATLLPLPEEGLQHDCLDILAEAHGTRPDLTDQPLPDADHTWYTDGSSFLQEGQRKAGAAVTTETEVVWAKALPAGTSAQRAELIALTQALKMAEGKKLNVYTDSRYAFATAHIHGEIYRRRGWLTSEGKEIKNKDEILALLKALFLPKRLSIIHCPGHQKGNRAEARGNRMADQAAREVATRETPETSTLLAGKRTADGSEFEKRTADGSEFESPKKKAKVE

SEQ ID NO: 2525 - protein, 2094 aa, synthetic construct
MPAAKRVKLDGGDKKYSIGLDIGTNSVGWAVITDEYKVPSKKFKVLGNTDRHSIKKNLIGALLFDSGETAEATRLKRTARRRYTRRKNRICYLQEIFSNEMAKVDDSFFHRLEESFLVEEDKKHERHPIFGNIVDEVAYHEKYPTIYHLRKKLVDSTDKADLRLIYLALAHMIKFRGHFLIEGDLNPDNSDVDKLFIQLVQTYNQLFEENPINASGVDAKAILSARLSKSRRLENLIAQLPGEKKNGLFGNLIALSLGLTPNFKSNFDLAEDAKLQLSKDTYDDDLDNLLAQIGDQYADLFLAAKNLSDAILLSDILRVNTEITKAPLSASMIKRYDEHHQDLTLLKALVRQQLPEKYKEIFFDQSKNGYAGYIDGGASQEEFYKFIKPILEKMDGTEELLVKLNREDLLRKQRTFDNGSIPHQIHLGELHAILRRQEDFYPFLKDNREKIEKILTFRIPYYVGPLARGNSRFAWMTRKSEETITPWNFEEVVDKGASAQSFIERMTNFDKNLPNEKVLPKHSLLYEYFTVYNELTKVKYVTEGMRKPAFLSGEQKKAIVDLLFKTNRKVTVKQLKEDYFKKIECFDSVEISGVEDRFNASLGTYHDLLKIIKDKDFLDNEENEDILEDIVLTLTLFEDREMIEERLKTYAHLFDDKVMKQLKRRRYTGWGRLSRKLINGIRDKQSGKTILDFLKSDGFANRNFMQLIHDDSLTFKEDIQKAQVSGQGDSLHEHIANLAGSPAIKKGILQTVKVVDELVKVMGRHKPENIVIEMARENQTTQKGQKNSRERMKRIEEGIKELGSQILKEHPVENTQLQNEKLYLYYLQNGRDMYVDQELDINRLSDYDVDHIVPQSFLKDDSIDNKVLTRSDKARGKSDNVPSEEVVKKMKNYWRQLLNAKLITQRKFDNLTKAERGGLSELDKAGFIKRQLVETRQITKHVAQILDSRMNTKYDENDKLIREVKVITLKSKLVSDFRKDFQFYKVREINNYHHAHDAYLNAVVGTALIKKYPKLESEFVYGDYKVYDVRKMIAKSEQEIGKATAKYFFYSNIMNFFKTEITLANGEIRKRPLIETNGETGEIVWDKGRDFATVRKVLSMPQVNIVKKTEVQTGGFSKESILPKRNSDKLIARKKDWDPKKYGGFDSPTVAYSVLVVAKVEKGKSKKLKSVKELLGITIMERSSFEKNPIDFLEAKGYKEVKKDLIIKLPKYSLFELENGRKRMLASAGELQKGNELALPSKYVNFLYLASHYEKLKGSPEDNEQKQLFVEQHKHYLDEIIEQISEFSKRVILADANLDKVLSAYNKHRDKPIREQAENIIHLFTLTNLGAPAAFKYFDTTIDRKRYTSTKEVLDATLIHQSITGLYETRIDLSQLGGDGGPAPAPAPAPGGTLNIEDEYRLHETSKGPDVPLGSTWLSDFPQAWAETGGMGLAVRQAPLIIPLKATSTPVSIKQYPMSQEARLGIKPHIQRLLDQGILVPCQSPWNTPLLPVKKPGTNDYRPVQDLREVNKRVEDIHPTVPNPYNLLSGLPPSHQWYTVLDLKDAFFCLRLHPTSQSLFAFEWRDPEMGISGQLTWTRLPQGFKNSPTLFNEALHRDLADFRIQHPDLILLQYVDDLLLAATSELDCQQGTRALLQTLGDLGYRASAKKAQICQKQVKYLGYLLKEGQRWLTEARKETVMGQPTPKTPRQLREFLGKAGFCRLFIPGFAEMAAPLYPLTKPGTLFEWGPDQQKAYQEIKQALLTAPALGLPDLTKPFELFVDEKQGYAKGVLTQKLGPWRRPVAYLSKKLDPVAAGWPPCLRMVAAIAVLTKDAGKLTMGQPLVILAPHAVEALVKQPPDRWLSNARMTHYQALLLDTDRVQFGPIVALNPATLLPLPEEGLQHDCLDILAEAHGTRPDLTDQPLPDADHTWYTDGSSFLQEGQRKAGAAVTTETEVVWAKALPAGTSAQRAELIALTQALKMAEGKKLNVYTDSRYAFATAHIHGEIYRRRGWLTSEGKEIKNKDEILALLKALFLPKRLSIIHCPGHQKGNRAEARGNRMADQAAREVATRETPETSTLLAGKRTADGSEFEKRTADGSEFESPKKKAKVE

SEQ ID NO: 2526 - protein, 2096 aa, synthetic construct
MPAAKRVKLDGGDKKYSIGLDIGTNSVGWAVITDEYKVPSKKFKVLGNTDRHSIKKNLIGALLFDSGETAEATRLKRTARRRYTRRKNRICYLQEIFSNEMAKVDDSFFHRLEESFLVEEDKKHERHPIFGNIVDEVAYHEKYPTIYHLRKKLVDSTDKADLRLIYLALAHMIKFRGHFLIEGDLNPDNSDVDKLFIQLVQTYNQLFEENPINASGVDAKAILSARLSKSRRLENLIAQLPGEKKNGLFGNLIALSLGLTPNFKSNFDLAEDAKLQLSKDTYDDDLDNLLAQIGDQYADLFLAAKNLSDAILLSDILRVNTEITKAPLSASMIKRYDEHHQDLTLLKALVRQQLPEKYKEIFFDQSKNGYAGYIDGGASQEEFYKFIKPILEKMDGTEELLVKLNREDLLRKQRTFDNGSIPHQIHLGELHAILRRQEDFYPFLKDNREKIEKILTFRIPYYVGPLARGNSRFAWMTRKSEETITPWNFEEVVDKGASAQSFIERMTNFDKNLPNEKVLPKHSLLYEYFTVYNELTKVKYVTEGMRKPAFLSGEQKKAIVDLLFKTNRKVTVKQLKEDYFKKIECFDSVEISGVEDRFNASLGTYHDLLKIIKDKDFLDNEENEDILEDIVLTLTLFEDREMIEERLKTYAHLFDDKVMKQLKRRRYTGWGRLSRKLINGIRDKQSGKTILDFLKSDGFANRNFMQLIHDDSLTFKEDIQKAQVSGQGDSLHEHIANLAGSPAIKKGILQTVKVVDELVKVMGRHKPENIVIEMARENQTTQKGQKNSRERMKRIEEGIKELGSQILKEHPVENTQLQNEKLYLYYLQNGRDMYVDQELDINRLSDYDVDHIVPQSFLKDDSIDNKVLTRSDKARGKSDNVPSEEVVKKMKNYWRQLLNAKLITQRKFDNLTKAERGGLSELDKAGFIKRQLVETRQITKHVAQILDSRMNTKYDENDKLIREVKVITLKSKLVSDFRKDFQFYKVREINNYHHAHDAYLNAVVGTALIKKYPKLESEFVYGDYKVYDVRKMIAKSEQEIGKATAKYFFYSNIMNFFKTEITLANGEIRKRPLIETNGETGEIVWDKGRDFATVRKVLSMPQVNIVKKTEVQTGGFSKESILPKRNSDKLIARKKDWDPKKYGGFDSPTVAYSVLVVAKVEKGKSKKLKSVKELLGITIMERSSFEKNPIDFLEAKGYKEVKKDLIIKLPKYSLFELENGRKRMLASAGELQKGNELALPSKYVNFLYLASHYEKLKGSPEDNEQKQLFVEQHKHYLDEIIEQISEFSKRVILADANLDKVLSAYNKHRDKPIREQAENIIHLFTLTNLGAPAAFKYFDTTIDRKRYTSTKEVLDATLIHQSITGLYETRIDLSQLGGDGGGGGEAAAKPAPGGTLNIEDEYRLHETSKGPDVPLGSTWLSDFPQAWAETGGMGLAVRQAPLIIPLKATSTPVSIKQYPMSQEARLGIKPHIQRLLDQGILVPCQSPWNTPLLPVKKPGTNDYRPVQDLREVNKRVEDIHPTVPNPYNLLSGLPPSHQWYTVLDLKDAFFCLRLHPTSQSLFAFEWRDPEMGISGQLTWTRLPQGFKNSPTLFNEALHRDLADFRIQHPDLILLQYVDDLLLAATSELDCQQGTRALLQTLGDLGYRASAKKAQICQKQVKYLGYLLKEGQRWLTEARKETVMGQPTPKTPRQLREFLGKAGFCRLFIPGFAEMAAPLYPLTKPGTLFEWGPDQQKAYQEIKQALLTAPALGLPDLTKPFELFVDEKQGYAKGVLTQKLGPWRRPVAYLSKKLDPVAAGWPPCLRMVAAIAVLTKDAGKLTMGQPLVILAPHAVEALVKQPPDRWLSNARMTHYQALLLDTDRVQFGPIVALNPATLLPLPEEGLQHDCLDILAEAHGTRPDLTDQPLPDADHTWYTDGSSFLQEGQRKAGAAVTTETEVVWAKALPAGTSAQRAELIALTQALKMAEGKKLNVYTDSRYAFATAHIHGEIYRRRGWLTSEGKEIKNKDEILALLKALFLPKRLSIIHCPGHQKGNRAEARGNRMADQAAREVATRETPETSTLLAGKRTADGSEFEKRTADGSEFESPKKKAKVE

SEQ ID NO: 2527 - protein, 2096 aa, synthetic construct
MPAAKRVKLDGGDKKYSIGLDIGTNSVGWAVITDEYKVPSKKFKVLGNTDRHSIKKNLIGALLFDSGETAEATRLKRTARRRYTRRKNRICYLQEIFSNEMAKVDDSFFHRLEESFLVEEDKKHERHPIFGNIVDEVAYHEKYPTIYHLRKKLVDSTDKADLRLIYLALAHMIKFRGHFLIEGDLNPDNSDVDKLFIQLVQTYNQLFEENPINASGVDAKAILSARLSKSRRLENLIAQLPGEKKNGLFGNLIALSLGLTPNFKSNFDLAEDAKLQLSKDTYDDDLDNLLAQIGDQYADLFLAAKNLSDAILLSDILRVNTEITKAPLSASMIKRYDEHHQDLTLLKALVRQQLPEKYKEIFFDQSKNGYAGYIDGGASQEEFYKFIKPILEKMDGTEELLVKLNREDLLRKQRTFDNGSIPHQIHLGELHAILRRQEDFYPFLKDNREKIEKILTFRIPYYVGPLARGNSRFAWMTRKSEETITPWNFEEVVDKGASAQSFIERMTNFDKNLPNEKVLPKHSLLYEYFTVYNELTKVKYVTEGMRKPAFLSGEQKKAIVDLLFKTNRKVTVKQLKEDYFKKIECFDSVEISGVEDRFNASLGTYHDLLKIIKDKDFLDNEENEDILEDIVLTLTLFEDREMIEERLKTYAHLFDDKVMKQLKRRRYTGWGRLSRKLINGIRDKQSGKTILDFLKSDGFANRNFMQLIHDDSLTFKEDIQKAQVSGQGDSLHEHIANLAGSPAIKKGILQTVKVVDELVKVMGRHKPENIVIEMARENQTTQKGQKNSRERMKRIEEGIKELGSQILKEHPVENTQLQNEKLYLYYLQNGRDMYVDQELDINRLSDYDVDHIVPQSFLKDDSIDNKVLTRSDKARGKSDNVPSEEVVKKMKNYWRQLLNAKLITQRKFDNLTKAERGGLSELDKAGFIKRQLVETRQITKHVAQILDSRMNTKYDENDKLIREVKVITLKSKLVSDFRKDFQFYKVREINNYHHAHDAYLNAVVGTALIKKYPKLESEFVYGDYKVYDVRKMIAKSEQEIGKATAKYFFYSNIMNFFKTEITLANGEIRKRPLIETNGETGEIVWDKGRDFATVRKVLSMPQVNIVKKTEVQTGGFSKESILPKRNSDKLIARKKDWDPKKYGGFDSPTVAYSVLVVAKVEKGKSKKLKSVKELLGITIMERSSFEKNPIDFLEAKGYKEVKKDLIIKLPKYSLFELENGRKRMLASAGELQKGNELALPSKYVNFLYLASHYEKLKGSPEDNEQKQLFVEQHKHYLDEIIEQISEFSKRVILADANLDKVLSAYNKHRDKPIREQAENIIHLFTLTNLGAPAAFKYFDTTIDRKRYTSTKEVLDATLIHQSITGLYETRIDLSQLGGDGGGGSPAPEAAAKGGTLNIEDEYRLHETSKGPDVPLGSTWLSDFPQAWAETGGMGLAVRQAPLIIPLKATSTPVSIKQYPMSQEARLGIKPHIQRLLDQGILVPCQSPWNTPLLPVKKPGTNDYRPVQDLREVNKRVEDIHPTVPNPYNLLSGLPPSHQWYTVLDLKDAFFCLRLHPTSQSLFAFEWRDPEMGISGQLTWTRLPQGFKNSPTLFNEALHRDLADFRIQHPDLILLQYVDDLLLAATSELDCQQGTRALLQTLGDLGYRASAKKAQICQKQVKYLGYLLKEGQRWLTEARKETVMGQPTPKTPRQLREFLGKAGFCRLFIPGFAEMAAPLYPLTKPGTLFEWGPDQQKAYQEIKQALLTAPALGLPDLTKPFELFVDEKQGYAKGVLTQKLGPWRRPVAYLSKKLDPVAAGWPPCLRMVAAIAVLTKDAGKLTMGQPLVILAPHAVEALVKQPPDRWLSNARMTHYQALLLDTDRVQFGPIVALNPATLLPLPEEGLQHDCLDILAEAHGTRPDLTDQPLPDADHTWYTDGSSFLQEGQRKAGAAVTTETEVVWAKALPAGTSAQRAELIALTQALKMAEGKKLNVYTDSRYAFATAHIHGEIYRRRGWLTSEGKEIKNKDEILALLKALFLPKRLSIIHCPGHQKGNRAEARGNRMADQAAREVATRETPETSTLLAGKRTADGSEFEKRTADGSEFESPKKKAKVE

SEQ ID NO: 2528 - protein, 2100 aa, synthetic construct
MPAAKRVKLDGGDKKYSIGLDIGTNSVGWAVITDEYKVPSKKFKVLGNTDRHSIKKNLIGALLFDSGETAEATRLKRTARRRYTRRKNRICYLQEIFSNEMAKVDDSFFHRLEESFLVEEDKKHERHPIFGNIVDEVAYHEKYPTIYHLRKKLVDSTDKADLRLIYLALAHMIKFRGHFLIEGDLNPDNSDVDKLFIQLVQTYNQLFEENPINASGVDAKAILSARLSKSRRLENLIAQLPGEKKNGLFGNLIALSLGLTPNFKSNFDLAEDAKLQLSKDTYDDDLDNLLAQIGDQYADLFLAAKNLSDAILLSDILRVNTEITKAPLSASMIKRYDEHHQDLTLLKALVRQQLPEKYKEIFFDQSKNGYAGYIDGGASQEEFYKFIKPILEKMDGTEELLVKLNREDLLRKQRTFDNGSIPHQIHLGELHAILRRQEDFYPFLKDNREKIEKILTFRIPYYVGPLARGNSRFAWMTRKSEETITPWNFEEVVDKGASAQSFIERMTNFDKNLPNEKVLPKHSLLYEYFTVYNELTKVKYVTEGMRKPAFLSGEQKKAIVDLLFKTNRKVTVKQLKEDYFKKIECFDSVEISGVEDRFNASLGTYHDLLKIIKDKDFLDNEENEDILEDIVLTLTLFEDREMIEERLKTYAHLFDDKVMKQLKRRRYTGWGRLSRKLINGIRDKQSGKTILDFLKSDGFANRNFMQLIHDDSLTFKEDIQKAQVSGQGDSLHEHIANLAGSPAIKKGILQTVKVVDELVKVMGRHKPENIVIEMARENQTTQKGQKNSRERMKRIEEGIKELGSQILKEHPVENTQLQNEKLYLYYLQNGRDMYVDQELDINRLSDYDVDHIVPQSFLKDDSIDNKVLTRSDKARGKSDNVPSEEVVKKMKNYWRQLLNAKLITQRKFDNLTKAERGGLSELDKAGFIKRQLVETRQITKHVAQILDSRMNTKYDENDKLIREVKVITLKSKLVSDFRKDFQFYKVREINNYHHAHDAYLNAVVGTALIKKYPKLESEFVYGDYKVYDVRKMIAKSEQEIGKATAKYFFYSNIMNFFKTEITLANGEIRKRPLIETNGETGEIVWDKGRDFATVRKVLSMPQVNIVKKTEVQTGGFSKESILPKRNSDKLIARKKDWDPKKYGGFDSPTVAYSVLVVAKVEKGKSKKLKSVKELLGITIMERSSFEKNPIDFLEAKGYKEVKKDLIIKLPKYSLFELENGRKRMLASAGELQKGNELALPSKYVNFLYLASHYEKLKGSPEDNEQKQLFVEQHKHYLDEIIEQISEFSKRVILADANLDKVLSAYNKHRDKPIREQAENIIHLFTLTNLGAPAAFKYFDTTIDRKRYTSTKEVLDATLIHQSITGLYETRIDLSQLGGDGGGGGGSEAAAKGGGGSGGTLNIEDEYRLHETSKGPDVPLGSTWLSDFPQAWAETGGMGLAVRQAPLIIPLKATSTPVSIKQYPMSQEARLGIKPHIQRLLDQGILVPCQSPWNTPLLPVKKPGTNDYRPVQDLREVNKRVEDIHPTVPNPYNLLSGLPPSHQWYTVLDLKDAFFCLRLHPTSQSLFAFEWRDPEMGISGQLTWTRLPQGFKNSPTLFNEALHRDLADFRIQHPDLILLQYVDDLLLAATSELDCQQGTRALLQTLGDLGYRASAKKAQICQKQVKYLGYLLKEGQRWLTEARKETVMGQPTPKTPRQLREFLGKAGFCRLFIPGFAEMAAPLYPLTKPGTLFEWGPDQQKAYQEIKQALLTAPALGLPDLTKPFELFVDEKQGYAKGVLTQKLGPWRRPVAYLSKKLDPVAAGWPPCLRMVAAIAVLTKDAGKLTMGQPLVILAPHAVEALVKQPPDRWLSNARMTHYQALLLDTDRVQFGPIVALNPATLLPLPEEGLQHDCLDILAEAHGTRPDLTDQPLPDADHTWYTDGSSFLQEGQRKAGAAVTTETEVVWAKALPAGTSAQRAELIALTQALKMAEGKKLNVYTDSRYAFATAHIHGEIYRRRGWLTSEGKEIKNKDEILALLKALFLPKRLSIIHCPGHQKGNRAEARGNRMADQAAREVATRETPETSTLLAGKRTADGSEFEKRTADGSEFESPKKKAKVE

SEQ ID NO: 2529 - protein, 2131 aa, synthetic construct
MPAAKRVKLDGGDKKYSIGLDIGTNSVGWAVITDEYKVPSKKFKVLGNTDRHSIKKNLIGALLFDSGETAEATRLKRTARRRYTRRKNRICYLQEIFSNEMAKVDDSFFHRLEESFLVEEDKKHERHPIFGNIVDEVAYHEKYPTIYHLRKKLVDSTDKADLRLIYLALAHMIKFRGHFLIEGDLNPDNSDVDKLFIQLVQTYNQLFEENPINASGVDAKAILSARLSKSRRLENLIAQLPGEKKNGLFGNLIALSLGLTPNFKSNFDLAEDAKLQLSKDTYDDDLDNLLAQIGDQYADLFLAAKNLSDAILLSDILRVNTEITKAPLSASMIKRYDEHHQDLTLLKALVRQQLPEKYKEIFFDQSKNGYAGYIDGGASQEEFYKFIKPILEKMDGTEELLVKLNREDLLRKQRTFDNGSIPHQIHLGELHAILRRQEDFYPFLKDNREKIEKILTFRIPYYVGPLARGNSRFAWMTRKSEETITPWNFEEVVDKGASAQSFIERMTNFDKNLPNEKVLPKHSLLYEYFTVYNELTKVKYVTEGMRKPAFLSGEQKKAIVDLLFKTNRKVTVKQLKEDYFKKIECFDSVEISGVEDRFNASLGTYHDLLKIIKDKDFLDNEENEDILEDIVLTLTLFEDREMIEERLKTYAHLFDDKVMKQLKRRRYTGWGRLSRKLINGIRDKQSGKTILDFLKSDGFANRNFMQLIHDDSLTFKEDIQKAQVSGQGDSLHEHIANLAGSPAIKKGILQTVKVVDELVKVMGRHKPENIVIEMARENQTTQKGQKNSRERMKRIEEGIKELGSQILKEHPVENTQLQNEKLYLYYLQNGRDMYVDQELDINRLSDYDVDHIVPQSFLKDDSIDNKVLTRSDKARGKSDNVPSEEVVKKMKNYWRQLLNAKLITQRKFDNLTKAERGGLSELDKAGFIKRQLVETRQITKHVAQILDSRMNTKYDENDKLIREVKVITLKSKLVSDFRKDFQFYKVREINNYHHAHDAYLNAVVGTALIKKYPKLESEFVYGDYKVYDVRKMIAKSEQEIGKATAKYFFYSNIMNFFKTEITLANGEIRKRPLIETNGETGEIVWDKGRDFATVRKVLSMPQVNIVKKTEVQTGGFSKESILPKRNSDKLIARKKDWDPKKYGGFDSPTVAYSVLVVAKVEKGKSKKLKSVKELLGITIMERSSFEKNPIDFLEAKGYKEVKKDLIIKLPKYSLFELENGRKRMLASAGELQKGNELALPSKYVNFLYLASHYEKLKGSPEDNEQKQLFVEQHKHYLDEIIEQISEFSKRVILADANLDKVLSAYNKHRDKPIREQAENIIHLFTLTNLGAPAAFKYFDTTIDRKRYTSTKEVLDATLIHQSITGLYETRIDLSQLGGDGGAEAAAKEAAAKEAAAKEAAAKALEAEAAAKEAAAKEAAAKEAAAKAGGTLNIEDEYRLHETSKGPDVPLGSTWLSDFPQAWAETGGMGLAVRQAPLIIPLKATSTPVSIKQYPMSQEARLGIKPHIQRLLDQGILVPCQSPWNTPLLPVKKPGTNDYRPVQDLREVNKRVEDIHPTVPNPYNLLSGLPPSHQWYTVLDLKDAFFCLRLHPTSQSLFAFEWRDPEMGISGQLTWTRLPQGFKNSPTLFNEALHRDLADFRIQHPDLILLQYVDDLLLAATSELDCQQGTRALLQTLGDLGYRASAKKAQICQKQVKYLGYLLKEGQRWLTEARKETVMGQPTPKTPRQLREFLGKAGFCRLFIPGFAEMAAPLYPLTKPGTLFEWGPDQQKAYQEIKQALLTAPALGLPDLTKPFELFVDEKQGYAKGVLTQKLGPWRRPVAYLSKKLDPVAAGWPPCLRMVAAIAVLTKDAGKLTMGQPLVILAPHAVEALVKQPPDRWLSNARMTHYQALLLDTDRVQFGPIVALNPATLLPLPEEGLQHDCLDILAEAHGTRPDLTDQPLPDADHTWYTDGSSFLQEGQRKAGAAVTTETEVVWAKALPAGTSAQRAELIALTQALKMAEGKKLNVYTDSRYAFATAHIHGEIYRRRGWLTSEGKEIKNKDEILALLKALFLPKRLSIIHCPGHQKGNRAEARGNRMADQAAREVATRETPETSTLLAGKRTADGSEFEKRTADGSEFESPKKKAKVE

SEQ ID NO: 2530 - protein, 2096 aa, synthetic construct
MPAAKRVKLDGGDKKYSIGLDIGTNSVGWAVITDEYKVPSKKFKVLGNTDRHSIKKNLIGALLFDSGETAEATRLKRTARRRYTRRKNRICYLQEIFSNEMAKVDDSFFHRLEESFLVEEDKKHERHPIFGNIVDEVAYHEKYPTIYHLRKKLVDSTDKADLRLIYLALAHMIKFRGHFLIEGDLNPDNSDVDKLFIQLVQTYNQLFEENPINASGVDAKAILSARLSKSRRLENLIAQLPGEKKNGLFGNLIALSLGLTPNFKSNFDLAEDAKLQLSKDTYDDDLDNLLAQIGDQYADLFLAAKNLSDAILLSDILRVNTEITKAPLSASMIKRYDEHHQDLTLLKALVRQQLPEKYKEIFFDQSKNGYAGYIDGGASQEEFYKFIKPILEKMDGTEELLVKLNREDLLRKQRTFDNGSIPHQIHLGELHAILRRQEDFYPFLKDNREKIEKILTFRIPYYVGPLARGNSRFAWMTRKSEETITPWNFEEVVDKGASAQSFIERMTNFDKNLPNEKVLPKHSLLYEYFTVYNELTKVKYVTEGMRKPAFLSGEQKKAIVDLLFKTNRKVTVKQLKEDYFKKIECFDSVEISGVEDRFNASLGTYHDLLKIIKDKDFLDNEENEDILEDIVLTLTLFEDREMIEERLKTYAHLFDDKVMKQLKRRRYTGWGRLSRKLINGIRDKQSGKTILDFLKSDGFANRNFMQLIHDDSLTFKEDIQKAQVSGQGDSLHEHIANLAGSPAIKKGILQTVKVVDELVKVMGRHKPENIVIEMARENQTTQKGQKNSRERMKRIEEGIKELGSQILKEHPVENTQLQNEKLYLYYLQNGRDMYVDQELDINRLSDYDVDHIVPQSFLKDDSIDNKVLTRSDKARGKSDNVPSEEVVKKMKNYWRQLLNAKLITQRKFDNLTKAERGGLSELDKAGFIKRQLVETRQITKHVAQILDSRMNTKYDENDKLIREVKVITLKSKLVSDFRKDFQFYKVREINNYHHAHDAYLNAVVGTALIKKYPKLESEFVYGDYKVYDVRKMIAKSEQEIGKATAKYFFYSNIMNFFKTEITLANGEIRKRPLIETNGETGEIVWDKGRDFATVRKVLSMPQVNIVKKTEVQTGGFSKESILPKRNSDKLIARKKDWDPKKYGGFDSPTVAYSVLVVAKVEKGKSKKLKSVKELLGITIMERSSFEKNPIDFLEAKGYKEVKKDLIIKLPKYSLFELENGRKRMLASAGELQKGNELALPSKYVNFLYLASHYEKLKGSPEDNEQKQLFVEQHKHYLDEIIEQISEFSKRVILADANLDKVLSAYNKHRDKPIREQAENIIHLFTLTNLGAPAAFKYFDTTIDRKRYTSTKEVLDATLIHQSITGLYETRIDLSQLGGDGGGGSEAAAKPAPGGTLNIEDEYRLHETSKGPDVPLGSTWLSDFPQAWAETGGMGLAVRQAPLIIPLKATSTPVSIKQYPMSQEARLGIKPHIQRLLDQGILVPCQSPWNTPLLPVKKPGTNDYRPVQDLREVNKRVEDIHPTVPNPYNLLSGLPPSHQWYTVLDLKDAFFCLRLHPTSQSLFAFEWRDPEMGISGQLTWTRLPQGFKNSPTLFNEALHRDLADFRIQHPDLILLQYVDDLLLAATSELDCQQGTRALLQTLGDLGYRASAKKAQICQKQVKYLGYLLKEGQRWLTEARKETVMGQPTPKTPRQLREFLGKAGFCRLFIPGFAEMAAPLYPLTKPGTLFEWGPDQQKAYQEIKQALLTAPALGLPDLTKPFELFVDEKQGYAKGVLTQKLGPWRRPVAYLSKKLDPVAAGWPPCLRMVAAIAVLTKDAGKLTMGQPLVILAPHAVEALVKQPPDRWLSNARMTHYQALLLDTDRVQFGPIVALNPATLLPLPEEGLQHDCLDILAEAHGTRPDLTDQPLPDADHTWYTDGSSFLQEGQRKAGAAVTTETEVVWAKALPAGTSAQRAELIALTQALKMAEGKKLNVYTDSRYAFATAHIHGEIYRRRGWLTSEGKEIKNKDEILALLKALFLPKRLSIIHCPGHQKGNRAEARGNRMADQAAREVATRETPETSTLLAGKRTADGSEFEKRTADGSEFESPKKKAKVE

SEQ ID NO: 2531 - protein, 2094 aa, synthetic construct
MPAAKRVKLDGGDKKYSIGLDIGTNSVGWAVITDEYKVPSKKFKVLGNTDRHSIKKNLIGALLFDSGETAEATRLKRTARRRYTRRKNRICYLQEIFSNEMAKVDDSFFHRLEESFLVEEDKKHERHPIFGNIVDEVAYHEKYPTIYHLRKKLVDSTDKADLRLIYLALAHMIKFRGHFLIEGDLNPDNSDVDKLFIQLVQTYNQLFEENPINASGVDAKAILSARLSKSRRLENLIAQLPGEKKNGLFGNLIALSLGLTPNFKSNFDLAEDAKLQLSKDTYDDDLDNLLAQIGDQYADLFLAAKNLSDAILLSDILRVNTEITKAPLSASMIKRYDEHHQDLTLLKALVRQQLPEKYKEIFFDQSKNGYAGYIDGGASQEEFYKFIKPILEKMDGTEELLVKLNREDLLRKQRTFDNGSIPHQIHLGELHAILRRQEDFYPFLKDNREKIEKILTFRIPYYVGPLARGNSRFAWMTRKSEETITPWNFEEVVDKGASAQSFIERMTNFDKNLPNEKVLPKHSLLYEYFTVYNELTKVKYVTEGMRKPAFLSGEQKKAIVDLLFKTNRKVTVKQLKEDYFKKIECFDSVEISGVEDRFNASLGTYHDLLKIIKDKDFLDNEENEDILEDIVLTLTLFEDREMIEERLKTYAHLFDDKVMKQLKRRRYTGWGRLSRKLINGIRDKQSGKTILDFLKSDGFANRNFMQLIHDDSLTFKEDIQKAQVSGQGDSLHEHIANLAGSPAIKKGILQTVKVVDELVKVMGRHKPENIVIEMARENQTTQKGQKNSRERMKRIEEGIKELGSQILKEHPVENTQLQNEKLYLYYLQNGRDMYVDQELDINRLSDYDVDHIVPQSFLKDDSIDNKVLTRSDKARGKSDNVPSEEVVKKMKNYWRQLLNAKLITQRKFDNLTKAERGGLSELDKAGFIKRQLVETRQITKHVAQILDSRMNTKYDENDKLIREVKVITLKSKLVSDFRKDFQFYKVREINNYHHAHDAYLNAVVGTALIKKYPKLESEFVYGDYKVYDVRKMIAKSEQEIGKATAKYFFYSNIMNFFKTEITLANGEIRKRPLIETNGETGEIVWDKGRDFATVRKVLSMPQVNIVKKTEVQTGGFSKESILPKRNSDKLIARKKDWDPKKYGGFDSPTVAYSVLVVAKVEKGKSKKLKSVKELLGITIMERSSFEKNPIDFLEAKGYKEVKKDLIIKLPKYSLFELENGRKRMLASAGELQKGNELALPSKYVNFLYLASHYEKLKGSPEDNEQKQLFVEQHKHYLDEIIEQISEFSKRVILADANLDKVLSAYNKHRDKPIREQAENIIHLFTLTNLGAPAAFKYFDTTIDRKRYTSTKEVLDATLIHQSITGLYETRIDLSQLGGDGGPAPGSSGGGGGTLNIEDEYRLHETSKGPDVPLGSTWLSDFPQAWAETGGMGLAVRQAPLIIPLKATSTPVSIKQYPMSQEARLGIKPHIQRLLDQGILVPCQSPWNTPLLPVKKPGTNDYRPVQDLREVNKRVEDIHPTVPNPYNLLSGLPPSHQWYTVLDLKDAFFCLRLHPTSQSLFAFEWRDPEMGISGQLTWTRLPQGFKNSPTLFNEALHRDLADFRIQHPDLILLQYVDDLLLAATSELDCQQGTRALLQTLGDLGYRASAKKAQICQKQVKYLGYLLKEGQRWLTEARKETVMGQPTPKTPRQLREFLGKAGFCRLFIPGFAEMAAPLYPLTKPGTLFEWGPDQQKAYQEIKQALLTAPALGLPDLTKPFELFVDEKQGYAKGVLTQKLGPWRRPVAYLSKKLDPVAAGWPPCLRMVAAIAVLTKDAGKLTMGQPLVILAPHAVEALVKQPPDRWLSNARMTHYQALLLDTDRVQFGPIVALNPATLLPLPEEGLQHDCLDILAEAHGTRPDLTDQPLPDADHTWYTDGSSFLQEGQRKAGAAVTTETEVVWAKALPAGTSAQRAELIALTQALKMAEGKKLNVYTDSRYAFATAHIHGEIYRRRGWLTSEGKEIKNKDEILALLKALFLPKRLSIIHCPGHQKGNRAEARGNRMADQAAREVATRETPETSTLLAGKRTADGSEFEKRTADGSEFESPKKKAKVE

SEQ ID NO: 2532 - protein, 2100 aa, synthetic construct
MPAAKRVKLDGGDKKYSIGLDIGTNSVGWAVITDEYKVPSKKFKVLGNTDRHSIKKNLIGALLFDSGETAEATRLKRTARRRYTRRKNRICYLQEIFSNEMAKVDDSFFHRLEESFLVEEDKKHERHPIFGNIVDEVAYHEKYPTIYHLRKKLVDSTDKADLRLIYLALAHMIKFRGHFLIEGDLNPDNSDVDKLFIQLVQTYNQLFEENPINASGVDAKAILSARLSKSRRLENLIAQLPGEKKNGLFGNLIALSLGLTPNFKSNFDLAEDAKLQLSKDTYDDDLDNLLAQIGDQYADLFLAAKNLSDAILLSDILRVNTEITKAPLSASMIKRYDEHHQDLTLLKALVRQQLPEKYKEIFFDQSKNGYAGYIDGGASQEEFYKFIKPILEKMDGTEELLVKLNREDLLRKQRTFDNGSIPHQIHLGELHAILRRQEDFYPFLKDNREKIEKILTFRIPYYVGPLARGNSRFAWMTRKSEETITPWNFEEVVDKGASAQSFIERMTNFDKNLPNEKVLPKHSLLYEYFTVYNELTKVKYVTEGMRKPAFLSGEQKKAIVDLLFKTNRKVTVKQLKEDYFKKIECFDSVEISGVEDRFNASLGTYHDLLKIIKDKDFLDNEENEDILEDIVLTLTLFEDREMIEERLKTYAHLFDDKVMKQLKRRRYTGWGRLSRKLINGIRDKQSGKTILDFLKSDGFANRNFMQLIHDDSLTFKEDIQKAQVSGQGDSLHEHIANLAGSPAIKKGILQTVKVVDELVKVMGRHKPENIVIEMARENQTTQKGQKNSRERMKRIEEGIKELGSQILKEHPVENTQLQNEKLYLYYLQNGRDMYVDQELDINRLSDYDVDHIVPQSFLKDDSIDNKVLTRSDKARGKSDNVPSEEVVKKMKNYWRQLLNAKLITQRKFDNLTKAERGGLSELDKAGFIKRQLVETRQITKHVAQILDSRMNTKYDENDKLIREVKVITLKSKLVSDFRKDFQFYKVREINNYHHAHDAYLNAVVGTALIKKYPKLESEFVYGDYKVYDVRKMIAKSEQEIGKATAKYFFYSNIMNFFKTEITLANGEIRKRPLIETNGETGEIVWDKGRDFATVRKVLSMPQVNIVKKTEVQTGGFSKESILPKRNSDKLIARKKDWDPKKYGGFDSPTVAYSVLVVAKVEKGKSKKLKSVKELLGITIMERSSFEKNPIDFLEAKGYKEVKKDLIIKLPKYSLFELENGRKRMLASAGELQKGNELALPSKYVNFLYLASHYEKLKGSPEDNEQKQLFVEQHKHYLDEIIEQISEFSKRVILADANLDKVLSAYNKHRDKPIREQAENIIHLFTLTNLGAPAAFKYFDTTIDRKRYTSTKEVLDATLIHQSITGLYETRIDLSQLGGDGGGSSGSSGSSGSSGSSGGTLNIEDEYRLHETSKGPDVPLGSTWLSDFPQAWAETGGMGLAVRQAPLIIPLKATSTPVSIKQYPMSQEARLGIKPHIQRLLDQGILVPCQSPWNTPLLPVKKPGTNDYRPVQDLREVNKRVEDIHPTVPNPYNLLSGLPPSHQWYTVLDLKDAFFCLRLHPTSQSLFAFEWRDPEMGISGQLTWTRLPQGFKNSPTLFNEALHRDLADFRIQHPDLILLQYVDDLLLAATSELDCQQGTRALLQTLGDLGYRASAKKAQICQKQVKYLGYLLKEGQRWLTEARKETVMGQPTPKTPRQLREFLGKAGFCRLFIPGFAEMAAPLYPLTKPGTLFEWGPDQQKAYQEIKQALLTAPALGLPDLTKPFELFVDEKQGYAKGVLTQKLGPWRRPVAYLSKKLDPVAAGWPPCLRMVAAIAVLTKDAGKLTMGQPLVILAPHAVEALVKQPPDRWLSNARMTHYQALLLDTDRVQFGPIVALNPATLLPLPEEGLQHDCLDILAEAHGTRPDLTDQPLPDADHTWYTDGSSFLQEGQRKAGAAVTTETEVVWAKALPAGTSAQRAELIALTQALKMAEGKKLNVYTDSRYAFATAHIHGEIYRRRGWLTSEGKEIKNKDEILALLKALFLPKRLSIIHCPGHQKGNRAEARGNRMADQAAREVATRETPETSTLLAGKRTADGSEFEKRTADGSEFESPKKKAKVE

SEQ ID NO: 2533 - protein, 2094 aa, synthetic construct
MPAAKRVKLDGGDKKYSIGLDIGTNSVGWAVITDEYKVPSKKFKVLGNTDRHSIKKNLIGALLFDSGETAEATRLKRTARRRYTRRKNRICYLQEIFSNEMAKVDDSFFHRLEESFLVEEDKKHERHPIFGNIVDEVAYHEKYPTIYHLRKKLVDSTDKADLRLIYLALAHMIKFRGHFLIEGDLNPDNSDVDKLFIQLVQTYNQLFEENPINASGVDAKAILSARLSKSRRLENLIAQLPGEKKNGLFGNLIALSLGLTPNFKSNFDLAEDAKLQLSKDTYDDDLDNLLAQIGDQYADLFLAAKNLSDAILLSDILRVNTEITKAPLSASMIKRYDEHHQDLTLLKALVRQQLPEKYKEIFFDQSKNGYAGYIDGGASQEEFYKFIKPILEKMDGTEELLVKLNREDLLRKQRTFDNGSIPHQIHLGELHAILRRQEDFYPFLKDNREKIEKILTFRIPYYVGPLARGNSRFAWMTRKSEETITPWNFEEVVDKGASAQSFIERMTNFDKNLPNEKVLPKHSLLYEYFTVYNELTKVKYVTEGMRKPAFLSGEQKKAIVDLLFKTNRKVTVKQLKEDYFKKIECFDSVEISGVEDRFNASLGTYHDLLKIIKDKDFLDNEENEDILEDIVLTLTLFEDREMIEERLKTYAHLFDDKVMKQLKRRRYTGWGRLSRKLINGIRDKQSGKTILDFLKSDGFANRNFMQLIHDDSLTFKEDIQKAQVSGQGDSLHEHIANLAGSPAIKKGILQTVKVVDELVKVMGRHKPENIVIEMARENQTTQKGQKNSRERMKRIEEGIKELGSQILKEHPVENTQLQNEKLYLYYLQNGRDMYVDQELDINRLSDYDVDHIVPQSFLKDDSIDNKVLTRSDKARGKSDNVPSEEVVKKMKNYWRQLLNAKLITQRKFDNLTKAERGGLSELDKAGFIKRQLVETRQITKHVAQILDSRMNTKYDENDKLIREVKVITLKSKLVSDFRKDFQFYKVREINNYHHAHDAYLNAVVGTALIKKYPKLESEFVYGDYKVYDVRKMIAKSEQEIGKATAKYFFYSNIMNFFKTEITLANGEIRKRPLIETNGETGEIVWDKGRDFATVRKVLSMPQVNIVKKTEVQTGGFSKESILPKRNSDKLIARKKDWDPKKYGGFDSPTVAYSVLVVAKVEKGKSKKLKSVKELLGITIMERSSFEKNPIDFLEAKGYKEVKKDLIIKLPKYSLFELENGRKRMLASAGELQKGNELALPSKYVNFLYLASHYEKLKGSPEDNEQKQLFVEQHKHYLDEIIEQISEFSKRVILADANLDKVLSAYNKHRDKPIREQAENIIHLFTLTNLGAPAAFKYFDTTIDRKRYTSTKEVLDATLIHQSITGLYETRIDLSQLGGDGGPAPGGSGSSGGTLNIEDEYRLHETSKGPDVPLGSTWLSDFPQAWAETGGMGLAVRQAPLIIPLKATSTPVSIKQYPMSQEARLGIKPHIQRLLDQGILVPCQSPWNTPLLPVKKPGTNDYRPVQDLREVNKRVEDIHPTVPNPYNLLSGLPPSHQWYTVLDLKDAFFCLRLHPTSQSLFAFEWRDPEMGISGQLTWTRLPQGFKNSPTLFNEALHRDLADFRIQHPDLILLQYVDDLLLAATSELDCQQGTRALLQTLGDLGYRASAKKAQICQKQVKYLGYLLKEGQRWLTEARKETVMGQPTPKTPRQLREFLGKAGFCRLFIPGFAEMAAPLYPLTKPGTLFEWGPDQQKAYQEIKQALLTAPALGLPDLTKPFELFVDEKQGYAKGVLTQKLGPWRRPVAYLSKKLDPVAAGWPPCLRMVAAIAVLTKDAGKLTMGQPLVILAPHAVEALVKQPPDRWLSNARMTHYQALLLDTDRVQFGPIVALNPATLLPLPEEGLQHDCLDILAEAHGTRPDLTDQPLPDADHTWYTDGSSFLQEGQRKAGAAVTTETEVVWAKALPAGTSAQRAELIALTQALKMAEGKKLNVYTDSRYAFATAHIHGEIYRRRGWLTSEGKEIKNKDEILALLKALFLPKRLSIIHCPGHQKGNRAEARGNRMADQAAREVATRETPETSTLLAGKRTADGSEFEKRTADGSEFESPKKKAKVE

SEQ ID NO: 2534 - protein, 2098 aa, synthetic construct
MPAAKRVKLDGGDKKYSIGLDIGTNSVGWAVITDEYKVPSKKFKVLGNTDRHSIKKNLIGALLFDSGETAEATRLKRTARRRYTRRKNRICYLQEIFSNEMAKVDDSFFHRLEESFLVEEDKKHERHPIFGNIVDEVAYHEKYPTIYHLRKKLVDSTDKADLRLIYLALAHMIKFRGHFLIEGDLNPDNSDVDKLFIQLVQTYNQLFEENPINASGVDAKAILSARLSKSRRLENLIAQLPGEKKNGLFGNLIALSLGLTPNFKSNFDLAEDAKLQLSKDTYDDDLDNLLAQIGDQYADLFLAAKNLSDAILLSDILRVNTEITKAPLSASMIKRYDEHHQDLTLLKALVRQQLPEKYKEIFFDQSKNGYAGYIDGGASQEEFYKFIKPILEKMDGTEELLVKLNREDLLRKQRTFDNGSIPHQIHLGELHAILRRQEDFYPFLKDNREKIEKILTFRIPYYVGPLARGNSRFAWMTRKSEETITPWNFEEVVDKGASAQSFIERMTNFDKNLPNEKVLPKHSLLYEYFTVYNELTKVKYVTEGMRKPAFLSGEQKKAIVDLLFKTNRKVTVKQLKEDYFKKIECFDSVEISGVEDRFNASLGTYHDLLKIIKDKDFLDNEENEDILEDIVLTLTLFEDREMIEERLKTYAHLFDDKVMKQLKRRRYTGWGRLSRKLINGIRDKQSGKTILDFLKSDGFANRNFMQLIHDDSLTFKEDIQKAQVSGQGDSLHEHIANLAGSPAIKKGILQTVKVVDELVKVMGRHKPENIVIEMARENQTTQKGQKNSRERMKRIEEGIKELGSQILKEHPVENTQLQNEKLYLYYLQNGRDMYVDQELDINRLSDYDVDHIVPQSFLKDDSIDNKVLTRSDKARGKSDNVPSEEVVKKMKNYWRQLLNAKLITQRKFDNLTKAERGGLSELDKAGFIKRQLVETRQITKHVAQILDSRMNTKYDENDKLIREVKVITLKSKLVSDFRKDFQFYKVREINNYHHAHDAYLNAVVGTALIKKYPKLESEFVYGDYKVYDVRKMIAKSEQEIGKATAKYFFYSNIMNFFKTEITLANGEIRKRPLIETNGETGEIVWDKGRDFATVRKVLSMPQVNIVKKTEVQTGGFSKESILPKRNSDKLIARKKDWDPKKYGGFDSPTVAYSVLVVAKVEKGKSKKLKSVKELLGITIMERSSFEKNPIDFLEAKGYKEVKKDLIIKLPKYSLFELENGRKRMLASAGELQKGNELALPSKYVNFLYLASHYEKLKGSPEDNEQKQLFVEQHKHYLDEIIEQISEFSKRVILADANLDKVLSAYNKHRDKPIREQAENIIHLFTLTNLGAPAAFKYFDTTIDRKRYTSTKEVLDATLIHQSITGLYETRIDLSQLGGDGGPAPAPAPAPAPAPGGTLNIEDEYRLHETSKGPDVPLGSTWLSDFPQAWAETGGMGLAVRQAPLIIPLKATSTPVSIKQYPMSQEARLGIKPHIQRLLDQGILVPCQSPWNTPLLPVKKPGTNDYRPVQDLREVNKRVEDIHPTVPNPYNLLSGLPPSHQWYTVLDLKDAFFCLRLHPTSQSLFAFEWRDPEMGISGQLTWTRLPQGFKNSPTLFNEALHRDLADFRIQHPDLILLQYVDDLLLAATSELDCQQGTRALLQTLGDLGYRASAKKAQICQKQVKYLGYLLKEGQRWLTEARKETVMGQPTPKTPRQLREFLGKAGFCRLFIPGFAEMAAPLYPLTKPGTLFEWGPDQQKAYQEIKQALLTAPALGLPDLTKPFELFVDEKQGYAKGVLTQKLGPWRRPVAYLSKKLDPVAAGWPPCLRMVAAIAVLTKDAGKLTMGQPLVILAPHAVEALVKQPPDRWLSNARMTHYQALLLDTDRVQFGPIVALNPATLLPLPEEGLQHDCLDILAEAHGTRPDLTDQPLPDADHTWYTDGSSFLQEGQRKAGAAVTTETEVVWAKALPAGTSAQRAELIALTQALKMAEGKKLNVYTDSRYAFATAHIHGEIYRRRGWLTSEGKEIKNKDEILALLKALFLPKRLSIIHCPGHQKGNRAEARGNRMADQAAREVATRETPETSTLLAGKRTADGSEFEKRTADGSEFESPKKKAKVE

SEQ ID NO: 2535 - protein, 2096 aa, synthetic construct
MPAAKRVKLDGGDKKYSIGLDIGTNSVGWAVITDEYKVPSKKFKVLGNTDRHSIKKNLIGALLFDSGETAEATRLKRTARRRYTRRKNRICYLQEIFSNEMAKVDDSFFHRLEESFLVEEDKKHERHPIFGNIVDEVAYHEKYPTIYHLRKKLVDSTDKADLRLIYLALAHMIKFRGHFLIEGDLNPDNSDVDKLFIQLVQTYNQLFEENPINASGVDAKAILSARLSKSRRLENLIAQLPGEKKNGLFGNLIALSLGLTPNFKSNFDLAEDAKLQLSKDTYDDDLDNLLAQIGDQYADLFLAAKNLSDAILLSDILRVNTEITKAPLSASMIKRYDEHHQDLTLLKALVRQQLPEKYKEIFFDQSKNGYAGYIDGGASQEEFYKFIKPILEKMDGTEELLVKLNREDLLRKQRTFDNGSIPHQIHLGELHAILRRQEDFYPFLKDNREKIEKILTFRIPYYVGPLARGNSRFAWMTRKSEETITPWNFEEVVDKGASAQSFIERMTNFDKNLPNEKVLPKHSLLYEYFTVYNELTKVKYVTEGMRKPAFLSGEQKKAIVDLLFKTNRKVTVKQLKEDYFKKIECFDSVEISGVEDRFNASLGTYHDLLKIIKDKDFLDNEENEDILEDIVLTLTLFEDREMIEERLKTYAHLFDDKVMKQLKRRRYTGWGRLSRKLINGIRDKQSGKTILDFLKSDGFANRNFMQLIHDDSLTFKEDIQKAQVSGQGDSLHEHIANLAGSPAIKKGILQTVKVVDELVKVMGRHKPENIVIEMARENQTTQKGQKNSRERMKRIEEGIKELGSQILKEHPVENTQLQNEKLYLYYLQNGRDMYVDQELDINRLSDYDVDHIVPQSFLKDDSIDNKVLTRSDKARGKSDNVPSEEVVKKMKNYWRQLLNAKLITQRKFDNLTKAERGGLSELDKAGFIKRQLVETRQITKHVAQILDSRMNTKYDENDKLIREVKVITLKSKLVSDFRKDFQFYKVREINNYHHAHDAYLNAVVGTALIKKYPKLESEFVYGDYKVYDVRKMIAKSEQEIGKATAKYFFYSNIMNFFKTEITLANGEIRKRPLIETNGETGEIVWDKGRDFATVRKVLSMPQVNIVKKTEVQTGGFSKESILPKRNSDKLIARKKDWDPKKYGGFDSPTVAYSVLVVAKVEKGKSKKLKSVKELLGITIMERSSFEKNPIDFLEAKGYKEVKKDLIIKLPKYSLFELENGRKRMLASAGELQKGNELALPSKYVNFLYLASHYEKLKGSPEDNEQKQLFVEQHKHYLDEIIEQISEFSKRVILADANLDKVLSAYNKHRDKPIREQAENIIHLFTLTNLGAPAAFKYFDTTIDRKRYTSTKEVLDATLIHQSITGLYETRIDLSQLGGDGGGSSEAAAKPAPGGTLNIEDEYRLHETSKGPDVPLGSTWLSDFPQAWAETGGMGLAVRQAPLIIPLKATSTPVSIKQYPMSQEARLGIKPHIQRLLDQGILVPCQSPWNTPLLPVKKPGTNDYRPVQDLREVNKRVEDIHPTVPNPYNLLSGLPPSHQWYTVLDLKDAFFCLRLHPTSQSLFAFEWRDPEMGISGQLTWTRLPQGFKNSPTLFNEALHRDLADFRIQHPDLILLQYVDDLLLAATSELDCQQGTRALLQTLGDLGYRASAKKAQICQKQVKYLGYLLKEGQRWLTEARKETVMGQPTPKTPRQLREFLGKAGFCRLFIPGFAEMAAPLYPLTKPGTLFEWGPDQQKAYQEIKQALLTAPALGLPDLTKPFELFVDEKQGYAKGVLTQKLGPWRRPVAYLSKKLDPVAAGWPPCLRMVAAIAVLTKDAGKLTMGQPLVILAPHAVEALVKQPPDRWLSNARMTHYQALLLDTDRVQFGPIVALNPATLLPLPEEGLQHDCLDILAEAHGTRPDLTDQPLPDADHTWYTDGSSFLQEGQRKAGAAVTTETEVVWAKALPAGTSAQRAELIALTQALKMAEGKKLNVYTDSRYAFATAHIHGEIYRRRGWLTSEGKEIKNKDEILALLKALFLPKRLSIIHCPGHQKGNRAEARGNRMADQAAREVATRETPETSTLLAGKRTADGSEFEKRTADGSEFESPKKKAKVE

SEQ ID NO: 2536 - protein, 2110 aa, synthetic construct
MPAAKRVKLDGGDKKYSIGLDIGTNSVGWAVITDEYKVPSKKFKVLGNTDRHSIKKNLIGALLFDSGETAEATRLKRTARRRYTRRKNRICYLQEIFSNEMAKVDDSFFHRLEESFLVEEDKKHERHPIFGNIVDEVAYHEKYPTIYHLRKKLVDSTDKADLRLIYLALAHMIKFRGHFLIEGDLNPDNSDVDKLFIQLVQTYNQLFEENPINASGVDAKAILSARLSKSRRLENLIAQLPGEKKNGLFGNLIALSLGLTPNFKSNFDLAEDAKLQLSKDTYDDDLDNLLAQIGDQYADLFLAAKNLSDAILLSDILRVNTEITKAPLSASMIKRYDEHHQDLTLLKALVRQQLPEKYKEIFFDQSKNGYAGYIDGGASQEEFYKFIKPILEKMDGTEELLVKLNREDLLRKQRTFDNGSIPHQIHLGELHAILRRQEDFYPFLKDNREKIEKILTFRIPYYVGPLARGNSRFAWMTRKSEETITPWNFEEVVDKGASAQSFIERMTNFDKNLPNEKVLPKHSLLYEYFTVYNELTKVKYVTEGMRKPAFLSGEQKKAIVDLLFKTNRKVTVKQLKEDYFKKIECFDSVEISGVEDRFNASLGTYHDLLKIIKDKDFLDNEENEDILEDIVLTLTLFEDREMIEERLKTYAHLFDDKVMKQLKRRRYTGWGRLSRKLINGIRDKQSGKTILDFLKSDGFANRNFMQLIHDDSLTFKEDIQKAQVSGQGDSLHEHIANLAGSPAIKKGILQTVKVVDELVKVMGRHKPENIVIEMARENQTTQKGQKNSRERMKRIEEGIKELGSQILKEHPVENTQLQNEKLYLYYLQNGRDMYVDQELDINRLSDYDVDHIVPQSFLKDDSIDNKVLTRSDKARGKSDNVPSEEVVKKMKNYWRQLLNAKLITQRKFDNLTKAERGGLSELDKAGFIKRQLVETRQITKHVAQILDSRMNTKYDENDKLIREVKVITLKSKLVSDFRKDFQFYKVREINNYHHAHDAYLNAVVGTALIKKYPKLESEFVYGDYKVYDVRKMIAKSEQEIGKATAKYFFYSNIMNFFKTEITLANGEIRKRPLIETNGETGEIVWDKGRDFATVRKVLSMPQVNIVKKTEVQTGGFSKESILPKRNSDKLIARKKDWDPKKYGGFDSPTVAYSVLVVAKVEKGKSKKLKSVKELLGITIMERSSFEKNPIDFLEAKGYKEVKKDLIIKLPKYSLFELENGRKRMLASAGELQKGNELALPSKYVNFLYLASHYEKLKGSPEDNEQKQLFVEQHKHYLDEIIEQISEFSKRVILADANLDKVLSAYNKHRDKPIREQAENIIHLFTLTNLGAPAAFKYFDTTIDRKRYTSTKEVLDATLIHQSITGLYETRIDLSQLGGDGGEAAAKEAAAKEAAAKEAAAKEAAAKGGTLNIEDEYRLHETSKGPDVPLGSTWLSDFPQAWAETGGMGLAVRQAPLIIPLKATSTPVSIKQYPMSQEARLGIKPHIQRLLDQGILVPCQSPWNTPLLPVKKPGTNDYRPVQDLREVNKRVEDIHPTVPNPYNLLSGLPPSHQWYTVLDLKDAFFCLRLHPTSQSLFAFEWRDPEMGISGQLTWTRLPQGFKNSPTLFNEALHRDLADFRIQHPDLILLQYVDDLLLAATSELDCQQGTRALLQTLGDLGYRASAKKAQICQKQVKYLGYLLKEGQRWLTEARKETVMGQPTPKTPRQLREFLGKAGFCRLFIPGFAEMAAPLYPLTKPGTLFEWGPDQQKAYQEIKQALLTAPALGLPDLTKPFELFVDEKQGYAKGVLTQKLGPWRRPVAYLSKKLDPVAAGWPPCLRMVAAIAVLTKDAGKLTMGQPLVILAPHAVEALVKQPPDRWLSNARMTHYQALLLDTDRVQFGPIVALNPATLLPLPEEGLQHDCLDILAEAHGTRPDLTDQPLPDADHTWYTDGSSFLQEGQRKAGAAVTTETEVVWAKALPAGTSAQRAELIALTQALKMAEGKKLNVYTDSRYAFATAHIHGEIYRRRGWLTSEGKEIKNKDEILALLKALFLPKRLSIIHCPGHQKGNRAEARGNRMADQAAREVATRETPETSTLLAGKRTADGSEFEKRTADGSEFESPKKKAKVE

SEQ ID NO: 2537 - protein, 2097 aa, synthetic construct
MPAAKRVKLDGGDKKYSIGLDIGTNSVGWAVITDEYKVPSKKFKVLGNTDRHSIKKNLIGALLFDSGETAEATRLKRTARRRYTRRKNRICYLQEIFSNEMAKVDDSFFHRLEESFLVEEDKKHERHPIFGNIVDEVAYHEKYPTIYHLRKKLVDSTDKADLRLIYLALAHMIKFRGHFLIEGDLNPDNSDVDKLFIQLVQTYNQLFEENPINASGVDAKAILSARLSKSRRLENLIAQLPGEKKNGLFGNLIALSLGLTPNFKSNFDLAEDAKLQLSKDTYDDDLDNLLAQIGDQYADLFLAAKNLSDAILLSDILRVNTEITKAPLSASMIKRYDEHHQDLTLLKALVRQQLPEKYKEIFFDQSKNGYAGYIDGGASQEEFYKFIKPILEKMDGTEELLVKLNREDLLRKQRTFDNGSIPHQIHLGELHAILRRQEDFYPFLKDNREKIEKILTFRIPYYVGPLARGNSRFAWMTRKSEETITPWNFEEVVDKGASAQSFIERMTNFDKNLPNEKVLPKHSLLYEYFTVYNELTKVKYVTEGMRKPAFLSGEQKKAIVDLLFKTNRKVTVKQLKEDYFKKIECFDSVEISGVEDRFNASLGTYHDLLKIIKDKDFLDNEENEDILEDIVLTLTLFEDREMIEERLKTYAHLFDDKVMKQLKRRRYTGWGRLSRKLINGIRDKQSGKTILDFLKSDGFANRNFMQLIHDDSLTFKEDIQKAQVSGQGDSLHEHIANLAGSPAIKKGILQTVKVVDELVKVMGRHKPENIVIEMARENQTTQKGQKNSRERMKRIEEGIKELGSQILKEHPVENTQLQNEKLYLYYLQNGRDMYVDQELDINRLSDYDVDHIVPQSFLKDDSIDNKVLTRSDKARGKSDNVPSEEVVKKMKNYWRQLLNAKLITQRKFDNLTKAERGGLSELDKAGFIKRQLVETRQITKHVAQILDSRMNTKYDENDKLIREVKVITLKSKLVSDFRKDFQFYKVREINNYHHAHDAYLNAVVGTALIKKYPKLESEFVYGDYKVYDVRKMIAKSEQEIGKATAKYFFYSNIMNFFKTEITLANGEIRKRPLIETNGETGEIVWDKGRDFATVRKVLSMPQVNIVKKTEVQTGGFSKESILPKRNSDKLIARKKDWDPKKYGGFDSPTVAYSVLVVAKVEKGKSKKLKSVKELLGITIMERSSFEKNPIDFLEAKGYKEVKKDLIIKLPKYSLFELENGRKRMLASAGELQKGNELALPSKYVNFLYLASHYEKLKGSPEDNEQKQLFVEQHKHYLDEIIEQISEFSKRVILADANLDKVLSAYNKHRDKPIREQAENIIHLFTLTNLGAPAAFKYFDTTIDRKRYTSTKEVLDATLIHQSITGLYETRIDLSQLGGDGGGSSGSSGSSGSSGGTLNIEDEYRLHETSKGPDVPLGSTWLSDFPQAWAETGGMGLAVRQAPLIIPLKATSTPVSIKQYPMSQEARLGIKPHIQRLLDQGILVPCQSPWNTPLLPVKKPGTNDYRPVQDLREVNKRVEDIHPTVPNPYNLLSGLPPSHQWYTVLDLKDAFFCLRLHPTSQSLFAFEWRDPEMGISGQLTWTRLPQGFKNSPTLFNEALHRDLADFRIQHPDLILLQYVDDLLLAATSELDCQQGTRALLQTLGDLGYRASAKKAQICQKQVKYLGYLLKEGQRWLTEARKETVMGQPTPKTPRQLREFLGKAGFCRLFIPGFAEMAAPLYPLTKPGTLFEWGPDQQKAYQEIKQALLTAPALGLPDLTKPFELFVDEKQGYAKGVLTQKLGPWRRPVAYLSKKLDPVAAGWPPCLRMVAAIAVLTKDAGKLTMGQPLVILAPHAVEALVKQPPDRWLSNARMTHYQALLLDTDRVQFGPIVALNPATLLPLPEEGLQHDCLDILAEAHGTRPDLTDQPLPDADHTWYTDGSSFLQEGQRKAGAAVTTETEVVWAKALPAGTSAQRAELIALTQALKMAEGKKLNVYTDSRYAFATAHIHGEIYRRRGWLTSEGKEIKNKDEILALLKALFLPKRLSIIHCPGHQKGNRAEARGNRMADQAAREVATRETPETSTLLAGKRTADGSEFEKRTADGSEFESPKKKAKVE

SEQ ID NO: 2538 - protein, 2096 aa, synthetic construct
MPAAKRVKLDGGDKKYSIGLDIGTNSVGWAVITDEYKVPSKKFKVLGNTDRHSIKKNLIGALLFDSGETAEATRLKRTARRRYTRRKNRICYLQEIFSNEMAKVDDSFFHRLEESFLVEEDKKHERHPIFGNIVDEVAYHEKYPTIYHLRKKLVDSTDKADLRLIYLALAHMIKFRGHFLIEGDLNPDNSDVDKLFIQLVQTYNQLFEENPINASGVDAKAILSARLSKSRRLENLIAQLPGEKKNGLFGNLIALSLGLTPNFKSNFDLAEDAKLQLSKDTYDDDLDNLLAQIGDQYADLFLAAKNLSDAILLSDILRVNTEITKAPLSASMIKRYDEHHQDLTLLKALVRQQLPEKYKEIFFDQSKNGYAGYIDGGASQEEFYKFIKPILEKMDGTEELLVKLNREDLLRKQRTFDNGSIPHQIHLGELHAILRRQEDFYPFLKDNREKIEKILTFRIPYYVGPLARGNSRFAWMTRKSEETITPWNFEEVVDKGASAQSFIERMTNFDKNLPNEKVLPKHSLLYEYFTVYNELTKVKYVTEGMRKPAFLSGEQKKAIVDLLFKTNRKVTVKQLKEDYFKKIECFDSVEISGVEDRFNASLGTYHDLLKIIKDKDFLDNEENEDILEDIVLTLTLFEDREMIEERLKTYAHLFDDKVMKQLKRRRYTGWGRLSRKLINGIRDKQSGKTILDFLKSDGFANRNFMQLIHDDSLTFKEDIQKAQVSGQGDSLHEHIANLAGSPAIKKGILQTVKVVDELVKVMGRHKPENIVIEMARENQTTQKGQKNSRERMKRIEEGIKELGSQILKEHPVENTQLQNEKLYLYYLQNGRDMYVDQELDINRLSDYDVDHIVPQSFLKDDSIDNKVLTRSDKARGKSDNVPSEEVVKKMKNYWRQLLNAKLITQRKFDNLTKAERGGLSELDKAGFIKRQLVETRQITKHVAQILDSRMNTKYDENDKLIREVKVITLKSKLVSDFRKDFQFYKVREINNYHHAHDAYLNAVVGTALIKKYPKLESEFVYGDYKVYDVRKMIAKSEQEIGKATAKYFFYSNIMNFFKTEITLANGEIRKRPLIETNGETGEIVWDKGRDFATVRKVLSMPQVNIVKKTEVQTGGFSKESILPKRNSDKLIARKKDWDPKKYGGFDSPTVAYSVLVVAKVEKGKSKKLKSVKELLGITIMERSSFEKNPIDFLEAKGYKEVKKDLIIKLPKYSLFELENGRKRMLASAGELQKGNELALPSKYVNFLYLASHYEKLKGSPEDNEQKQLFVEQHKHYLDEIIEQISEFSKRVILADANLDKVLSAYNKHRDKPIREQAENIIHLFTLTNLGAPAAFKYFDTTIDRKRYTSTKEVLDATLIHQSITGLYETRIDLSQLGGDGGGGSGSSEAAAKGGTLNIEDEYRLHETSKGPDVPLGSTWLSDFPQAWAETGGMGLAVRQAPLIIPLKATSTPVSIKQYPMSQEARLGIKPHIQRLLDQGILVPCQSPWNTPLLPVKKPGTNDYRPVQDLREVNKRVEDIHPTVPNPYNLLSGLPPSHQWYTVLDLKDAFFCLRLHPTSQSLFAFEWRDPEMGISGQLTWTRLPQGFKNSPTLFNEALHRDLADFRIQHPDLILLQYVDDLLLAATSELDCQQGTRALLQTLGDLGYRASAKKAQICQKQVKYLGYLLKEGQRWLTEARKETVMGQPTPKTPRQLREFLGKAGFCRLFIPGFAEMAAPLYPLTKPGTLFEWGPDQQKAYQEIKQALLTAPALGLPDLTKPFELFVDEKQGYAKGVLTQKLGPWRRPVAYLSKKLDPVAAGWPPCLRMVAAIAVLTKDAGKLTMGQPLVILAPHAVEALVKQPPDRWLSNARMTHYQALLLDTDRVQFGPIVALNPATLLPLPEEGLQHDCLDILAEAHGTRPDLTDQPLPDADHTWYTDGSSFLQEGQRKAGAAVTTETEVVWAKALPAGTSAQRAELIALTQALKMAEGKKLNVYTDSRYAFATAHIHGEIYRRRGWLTSEGKEIKNKDEILALLKALFLPKRLSIIHCPGHQKGNRAEARGNRMADQAAREVATRETPETSTLLAGKRTADGSEFEKRTADGSEFESPKKKAKVE

SEQ ID NO: 2539 - protein, 2090 aa, synthetic construct
MPAAKRVKLDGGDKKYSIGLDIGTNSVGWAVITDEYKVPSKKFKVLGNTDRHSIKKNLIGALLFDSGETAEATRLKRTARRRYTRRKNRICYLQEIFSNEMAKVDDSFFHRLEESFLVEEDKKHERHPIFGNIVDEVAYHEKYPTIYHLRKKLVDSTDKADLRLIYLALAHMIKFRGHFLIEGDLNPDNSDVDKLFIQLVQTYNQLFEENPINASGVDAKAILSARLSKSRRLENLIAQLPGEKKNGLFGNLIALSLGLTPNFKSNFDLAEDAKLQLSKDTYDDDLDNLLAQIGDQYADLFLAAKNLSDAILLSDILRVNTEITKAPLSASMIKRYDEHHQDLTLLKALVRQQLPEKYKEIFFDQSKNGYAGYIDGGASQEEFYKFIKPILEKMDGTEELLVKLNREDLLRKQRTFDNGSIPHQIHLGELHAILRRQEDFYPFLKDNREKIEKILTFRIPYYVGPLARGNSRFAWMTRKSEETITPWNFEEVVDKGASAQSFIERMTNFDKNLPNEKVLPKHSLLYEYFTVYNELTKVKYVTEGMRKPAFLSGEQKKAIVDLLFKTNRKVTVKQLKEDYFKKIECFDSVEISGVEDRFNASLGTYHDLLKIIKDKDFLDNEENEDILEDIVLTLTLFEDREMIEERLKTYAHLFDDKVMKQLKRRRYTGWGRLSRKLINGIRDKQSGKTILDFLKSDGFANRNFMQLIHDDSLTFKEDIQKAQVSGQGDSLHEHIANLAGSPAIKKGILQTVKVVDELVKVMGRHKPENIVIEMARENQTTQKGQKNSRERMKRIEEGIKELGSQILKEHPVENTQLQNEKLYLYYLQNGRDMYVDQELDINRLSDYDVDHIVPQSFLKDDSIDNKVLTRSDKARGKSDNVPSEEVVKKMKNYWRQLLNAKLITQRKFDNLTKAERGGLSELDKAGFIKRQLVETRQITKHVAQILDSRMNTKYDENDKLIREVKVITLKSKLVSDFRKDFQFYKVREINNYHHAHDAYLNAVVGTALIKKYPKLESEFVYGDYKVYDVRKMIAKSEQEIGKATAKYFFYSNIMNFFKTEITLANGEIRKRPLIETNGETGEIVWDKGRDFATVRKVLSMPQVNIVKKTEVQTGGFSKESILPKRNSDKLIARKKDWDPKKYGGFDSPTVAYSVLVVAKVEKGKSKKLKSVKELLGITIMERSSFEKNPIDFLEAKGYKEVKKDLIIKLPKYSLFELENGRKRMLASAGELQKGNELALPSKYVNFLYLASHYEKLKGSPEDNEQKQLFVEQHKHYLDEIIEQISEFSKRVILADANLDKVLSAYNKHRDKPIREQAENIIHLFTLTNLGAPAAFKYFDTTIDRKRYTSTKEVLDATLIHQSITGLYETRIDLSQLGGDGGEAAAKGGTLNIEDEYRLHETSKGPDVPLGSTWLSDFPQAWAETGGMGLAVRQAPLIIPLKATSTPVSIKQYPMSQEARLGIKPHIQRLLDQGILVPCQSPWNTPLLPVKKPGTNDYRPVQDLREVNKRVEDIHPTVPNPYNLLSGLPPSHQWYTVLDLKDAFFCLRLHPTSQSLFAFEWRDPEMGISGQLTWTRLPQGFKNSPTLFNEALHRDLADFRIQHPDLILLQYVDDLLLAATSELDCQQGTRALLQTLGDLGYRASAKKAQICQKQVKYLGYLLKEGQRWLTEARKETVMGQPTPKTPRQLREFLGKAGFCRLFIPGFAEMAAPLYPLTKPGTLFEWGPDQQKAYQEIKQALLTAPALGLPDLTKPFELFVDEKQGYAKGVLTQKLGPWRRPVAYLSKKLDPVAAGWPPCLRMVAAIAVLTKDAGKLTMGQPLVILAPHAVEALVKQPPDRWLSNARMTHYQALLLDTDRVQFGPIVALNPATLLPLPEEGLQHDCLDILAEAHGTRPDLTDQPLPDADHTWYTDGSSFLQEGQRKAGAAVTTETEVVWAKALPAGTSAQRAELIALTQALKMAEGKKLNVYTDSRYAFATAHIHGEIYRRRGWLTSEGKEIKNKDEILALLKALFLPKRLSIIHCPGHQKGNRAEARGNRMADQAAREVATRETPETSTLLAGKRTADGSEFEKRTADGSEFESPKKKAKVE

SEQ ID NO: 2540 - protein, 2091 aa, synthetic construct
MPAAKRVKLDGGDKKYSIGLDIGTNSVGWAVITDEYKVPSKKFKVLGNTDRHSIKKNLIGALLFDSGETAEATRLKRTARRRYTRRKNRICYLQEIFSNEMAKVDDSFFHRLEESFLVEEDKKHERHPIFGNIVDEVAYHEKYPTIYHLRKKLVDSTDKADLRLIYLALAHMIKFRGHFLIEGDLNPDNSDVDKLFIQLVQTYNQLFEENPINASGVDAKAILSARLSKSRRLENLIAQLPGEKKNGLFGNLIALSLGLTPNFKSNFDLAEDAKLQLSKDTYDDDLDNLLAQIGDQYADLFLAAKNLSDAILLSDILRVNTEITKAPLSASMIKRYDEHHQDLTLLKALVRQQLPEKYKEIFFDQSKNGYAGYIDGGASQEEFYKFIKPILEKMDGTEELLVKLNREDLLRKQRTFDNGSIPHQIHLGELHAILRRQEDFYPFLKDNREKIEKILTFRIPYYVGPLARGNSRFAWMTRKSEETITPWNFEEVVDKGASAQSFIERMTNFDKNLPNEKVLPKHSLLYEYFTVYNELTKVKYVTEGMRKPAFLSGEQKKAIVDLLFKTNRKVTVKQLKEDYFKKIECFDSVEISGVEDRFNASLGTYHDLLKIIKDKDFLDNEENEDILEDIVLTLTLFEDREMIEERLKTYAHLFDDKVMKQLKRRRYTGWGRLSRKLINGIRDKQSGKTILDFLKSDGFANRNFMQLIHDDSLTFKEDIQKAQVSGQGDSLHEHIANLAGSPAIKKGILQTVKVVDELVKVMGRHKPENIVIEMARENQTTQKGQKNSRERMKRIEEGIKELGSQILKEHPVENTQLQNEKLYLYYLQNGRDMYVDQELDINRLSDYDVDHIVPQSFLKDDSIDNKVLTRSDKARGKSDNVPSEEVVKKMKNYWRQLLNAKLITQRKFDNLTKAERGGLSELDKAGFIKRQLVETRQITKHVAQILDSRMNTKYDENDKLIREVKVITLKSKLVSDFRKDFQFYKVREINNYHHAHDAYLNAVVGTALIKKYPKLESEFVYGDYKVYDVRKMIAKSEQEIGKATAKYFFYSNIMNFFKTEITLANGEIRKRPLIETNGETGEIVWDKGRDFATVRKVLSMPQVNIVKKTEVQTGGFSKESILPKRNSDKLIARKKDWDPKKYGGFDSPTVAYSVLVVAKVEKGKSKKLKSVKELLGITIMERSSFEKNPIDFLEAKGYKEVKKDLIIKLPKYSLFELENGRKRMLASAGELQKGNELALPSKYVNFLYLASHYEKLKGSPEDNEQKQLFVEQHKHYLDEIIEQISEFSKRVILADANLDKVLSAYNKHRDKPIREQAENIIHLFTLTNLGAPAAFKYFDTTIDRKRYTSTKEVLDATLIHQSITGLYETRIDLSQLGGDGGPAPGGGGGTLNIEDEYRLHETSKGPDVPLGSTWLSDFPQAWAETGGMGLAVRQAPLIIPLKATSTPVSIKQYPMSQEARLGIKPHIQRLLDQGILVPCQSPWNTPLLPVKKPGTNDYRPVQDLREVNKRVEDIHPTVPNPYNLLSGLPPSHQWYTVLDLKDAFFCLRLHPTSQSLFAFEWRDPEMGISGQLTWTRLPQGFKNSPTLFNEALHRDLADFRIQHPDLILLQYVDDLLLAATSELDCQQGTRALLQTLGDLGYRASAKKAQICQKQVKYLGYLLKEGQRWLTEARKETVMGQPTPKTPRQLREFLGKAGFCRLFIPGFAEMAAPLYPLTKPGTLFEWGPDQQKAYQEIKQALLTAPALGLPDLTKPFELFVDEKQGYAKGVLTQKLGPWRRPVAYLSKKLDPVAAGWPPCLRMVAAIAVLTKDAGKLTMGQPLVILAPHAVEALVKQPPDRWLSNARMTHYQALLLDTDRVQFGPIVALNPATLLPLPEEGLQHDCLDILAEAHGTRPDLTDQPLPDADHTWYTDGSSFLQEGQRKAGAAVTTETEVVWAKALPAGTSAQRAELIALTQALKMAEGKKLNVYTDSRYAFATAHIHGEIYRRRGWLTSEGKEIKNKDEILALLKALFLPKRLSIIHCPGHQKGNRAEARGNRMADQAAREVATRETPETSTLLAGKRTADGSEFEKRTADGSEFESPKKKAKVE

SEQ ID NO: 2541 - protein, 2115 aa, synthetic construct
MPAAKRVKLDGGDKKYSIGLDIGTNSVGWAVITDEYKVPSKKFKVLGNTDRHSIKKNLIGALLFDSGETAEATRLKRTARRRYTRRKNRICYLQEIFSNEMAKVDDSFFHRLEESFLVEEDKKHERHPIFGNIVDEVAYHEKYPTIYHLRKKLVDSTDKADLRLIYLALAHMIKFRGHFLIEGDLNPDNSDVDKLFIQLVQTYNQLFEENPINASGVDAKAILSARLSKSRRLENLIAQLPGEKKNGLFGNLIALSLGLTPNFKSNFDLAEDAKLQLSKDTYDDDLDNLLAQIGDQYADLFLAAKNLSDAILLSDILRVNTEITKAPLSASMIKRYDEHHQDLTLLKALVRQQLPEKYKEIFFDQSKNGYAGYIDGGASQEEFYKFIKPILEKMDGTEELLVKLNREDLLRKQRTFDNGSIPHQIHLGELHAILRRQEDFYPFLKDNREKIEKILTFRIPYYVGPLARGNSRFAWMTRKSEETITPWNFEEVVDKGASAQSFIERMTNFDKNLPNEKVLPKHSLLYEYFTVYNELTKVKYVTEGMRKPAFLSGEQKKAIVDLLFKTNRKVTVKQLKEDYFKKIECFDSVEISGVEDRFNASLGTYHDLLKIIKDKDFLDNEENEDILEDIVLTLTLFEDREMIEERLKTYAHLFDDKVMKQLKRRRYTGWGRLSRKLINGIRDKQSGKTILDFLKSDGFANRNFMQLIHDDSLTFKEDIQKAQVSGQGDSLHEHIANLAGSPAIKKGILQTVKVVDELVKVMGRHKPENIVIEMARENQTTQKGQKNSRERMKRIEEGIKELGSQILKEHPVENTQLQNEKLYLYYLQNGRDMYVDQELDINRLSDYDVDHIVPQSFLKDDSIDNKVLTRSDKARGKSDNVPSEEVVKKMKNYWRQLLNAKLITQRKFDNLTKAERGGLSELDKAGFIKRQLVETRQITKHVAQILDSRMNTKYDENDKLIREVKVITLKSKLVSDFRKDFQFYKVREINNYHHAHDAYLNAVVGTALIKKYPKLESEFVYGDYKVYDVRKMIAKSEQEIGKATAKYFFYSNIMNFFKTEITLANGEIRKRPLIETNGETGEIVWDKGRDFATVRKVLSMPQVNIVKKTEVQTGGFSKESILPKRNSDKLIARKKDWDPKKYGGFDSPTVAYSVLVVAKVEKGKSKKLKSVKELLGITIMERSSFEKNPIDFLEAKGYKEVKKDLIIKLPKYSLFELENGRKRMLASAGELQKGNELALPSKYVNFLYLASHYEKLKGSPEDNEQKQLFVEQHKHYLDEIIEQISEFSKRVILADANLDKVLSAYNKHRDKPIREQAENIIHLFTLTNLGAPAAFKYFDTTIDRKRYTSTKEVLDATLIHQSITGLYETRIDLSQLGGDGGEAAAKEAAAKEAAAKEAAAKEAAAKEAAAKGGTLNIEDEYRLHETSKGPDVPLGSTWLSDFPQAWAETGGMGLAVRQAPLIIPLKATSTPVSIKQYPMSQEARLGIKPHIQRLLDQGILVPCQSPWNTPLLPVKKPGTNDYRPVQDLREVNKRVEDIHPTVPNPYNLLSGLPPSHQWYTVLDLKDAFFCLRLHPTSQSLFAFEWRDPEMGISGQLTWTRLPQGFKNSPTLFNEALHRDLADFRIQHPDLILLQYVDDLLLAATSELDCQQGTRALLQTLGDLGYRASAKKAQICQKQVKYLGYLLKEGQRWLTEARKETVMGQPTPKTPRQLREFLGKAGFCRLFIPGFAEMAAPLYPLTKPGTLFEWGPDQQKAYQEIKQALLTAPALGLPDLTKPFELFVDEKQGYAKGVLTQKLGPWRRPVAYLSKKLDPVAAGWPPCLRMVAAIAVLTKDAGKLTMGQPLVILAPHAVEALVKQPPDRWLSNARMTHYQALLLDTDRVQFGPIVALNPATLLPLPEEGLQHDCLDILAEAHGTRPDLTDQPLPDADHTWYTDGSSFLQEGQRKAGAAVTTETEVVWAKALPAGTSAQRAELIALTQALKMAEGKKLNVYTDSRYAFATAHIHGEIYRRRGWLTSEGKEIKNKDEILALLKALFLPKRLSIIHCPGHQKGNRAEARGNRMADQAAREVATRETPETSTLLAGKRTADGSEFEKRTADGSEFESPKKKAKVE

SEQ ID NO: 2542 - protein, 2096 aa, synthetic construct
MPAAKRVKLDGGDKKYSIGLDIGTNSVGWAVITDEYKVPSKKFKVLGNTDRHSIKKNLIGALLFDSGETAEATRLKRTARRRYTRRKNRICYLQEIFSNEMAKVDDSFFHRLEESFLVEEDKKHERHPIFGNIVDEVAYHEKYPTIYHLRKKLVDSTDKADLRLIYLALAHMIKFRGHFLIEGDLNPDNSDVDKLFIQLVQTYNQLFEENPINASGVDAKAILSARLSKSRRLENLIAQLPGEKKNGLFGNLIALSLGLTPNFKSNFDLAEDAKLQLSKDTYDDDLDNLLAQIGDQYADLFLAAKNLSDAILLSDILRVNTEITKAPLSASMIKRYDEHHQDLTLLKALVRQQLPEKYKEIFFDQSKNGYAGYIDGGASQEEFYKFIKPILEKMDGTEELLVKLNREDLLRKQRTFDNGSIPHQIHLGELHAILRRQEDFYPFLKDNREKIEKILTFRIPYYVGPLARGNSRFAWMTRKSEETITPWNFEEVVDKGASAQSFIERMTNFDKNLPNEKVLPKHSLLYEYFTVYNELTKVKYVTEGMRKPAFLSGEQKKAIVDLLFKTNRKVTVKQLKEDYFKKIECFDSVEISGVEDRFNASLGTYHDLLKIIKDKDFLDNEENEDILEDIVLTLTLFEDREMIEERLKTYAHLFDDKVMKQLKRRRYTGWGRLSRKLINGIRDKQSGKTILDFLKSDGFANRNFMQLIHDDSLTFKEDIQKAQVSGQGDSLHEHIANLAGSPAIKKGILQTVKVVDELVKVMGRHKPENIVIEMARENQTTQKGQKNSRERMKRIEEGIKELGSQILKEHPVENTQLQNEKLYLYYLQNGRDMYVDQELDINRLSDYDVDHIVPQSFLKDDSIDNKVLTRSDKARGKSDNVPSEEVVKKMKNYWRQLLNAKLITQRKFDNLTKAERGGLSELDKAGFIKRQLVETRQITKHVAQILDSRMNTKYDENDKLIREVKVITLKSKLVSDFRKDFQFYKVREINNYHHAHDAYLNAVVGTALIKKYPKLESEFVYGDYKVYDVRKMIAKSEQEIGKATAKYFFYSNIMNFFKTEITLANGEIRKRPLIETNGETGEIVWDKGRDFATVRKVLSMPQVNIVKKTEVQTGGFSKESILPKRNSDKLIARKKDWDPKKYGGFDSPTVAYSVLVVAKVEKGKSKKLKSVKELLGITIMERSSFEKNPIDFLEAKGYKEVKKDLIIKLPKYSLFELENGRKRMLASAGELQKGNELALPSKYVNFLYLASHYEKLKGSPEDNEQKQLFVEQHKHYLDEIIEQISEFSKRVILADANLDKVLSAYNKHRDKPIREQAENIIHLFTLTNLGAPAAFKYFDTTIDRKRYTSTKEVLDATLIHQSITGLYETRIDLSQLGGDGGPAPGSSEAAAKGGTLNIEDEYRLHETSKGPDVPLGSTWLSDFPQAWAETGGMGLAVRQAPLIIPLKATSTPVSIKQYPMSQEARLGIKPHIQRLLDQGILVPCQSPWNTPLLPVKKPGTNDYRPVQDLREVNKRVEDIHPTVPNPYNLLSGLPPSHQWYTVLDLKDAFFCLRLHPTSQSLFAFEWRDPEMGISGQLTWTRLPQGFKNSPTLFNEALHRDLADFRIQHPDLILLQYVDDLLLAATSELDCQQGTRALLQTLGDLGYRASAKKAQICQKQVKYLGYLLKEGQRWLTEARKETVMGQPTPKTPRQLREFLGKAGFCRLFIPGFAEMAAPLYPLTKPGTLFEWGPDQQKAYQEIKQALLTAPALGLPDLTKPFELFVDEKQGYAKGVLTQKLGPWRRPVAYLSKKLDPVAAGWPPCLRMVAAIAVLTKDAGKLTMGQPLVILAPHAVEALVKQPPDRWLSNARMTHYQALLLDTDRVQFGPIVALNPATLLPLPEEGLQHDCLDILAEAHGTRPDLTDQPLPDADHTWYTDGSSFLQEGQRKAGAAVTTETEVVWAKALPAGTSAQRAELIALTQALKMAEGKKLNVYTDSRYAFATAHIHGEIYRRRGWLTSEGKEIKNKDEILALLKALFLPKRLSIIHCPGHQKGNRAEARGNRMADQAAREVATRETPETSTLLAGKRTADGSEFEKRTADGSEFESPKKKAKVE

SEQ ID NO: 2543 - protein, 2094 aa, synthetic construct
MPAAKRVKLDGGDKKYSIGLDIGTNSVGWAVITDEYKVPSKKFKVLGNTDRHSIKKNLIGALLFDSGETAEATRLKRTARRRYTRRKNRICYLQEIFSNEMAKVDDSFFHRLEESFLVEEDKKHERHPIFGNIVDEVAYHEKYPTIYHLRKKLVDSTDKADLRLIYLALAHMIKFRGHFLIEGDLNPDNSDVDKLFIQLVQTYNQLFEENPINASGVDAKAILSARLSKSRRLENLIAQLPGEKKNGLFGNLIALSLGLTPNFKSNFDLAEDAKLQLSKDTYDDDLDNLLAQIGDQYADLFLAAKNLSDAILLSDILRVNTEITKAPLSASMIKRYDEHHQDLTLLKALVRQQLPEKYKEIFFDQSKNGYAGYIDGGASQEEFYKFIKPILEKMDGTEELLVKLNREDLLRKQRTFDNGSIPHQIHLGELHAILRRQEDFYPFLKDNREKIEKILTFRIPYYVGPLARGNSRFAWMTRKSEETITPWNFEEVVDKGASAQSFIERMTNFDKNLPNEKVLPKHSLLYEYFTVYNELTKVKYVTEGMRKPAFLSGEQKKAIVDLLFKTNRKVTVKQLKEDYFKKIECFDSVEISGVEDRFNASLGTYHDLLKIIKDKDFLDNEENEDILEDIVLTLTLFEDREMIEERLKTYAHLFDDKVMKQLKRRRYTGWGRLSRKLINGIRDKQSGKTILDFLKSDGFANRNFMQLIHDDSLTFKEDIQKAQVSGQGDSLHEHIANLAGSPAIKKGILQTVKVVDELVKVMGRHKPENIVIEMARENQTTQKGQKNSRERMKRIEEGIKELGSQILKEHPVENTQLQNEKLYLYYLQNGRDMYVDQELDINRLSDYDVDHIVPQSFLKDDSIDNKVLTRSDKARGKSDNVPSEEVVKKMKNYWRQLLNAKLITQRKFDNLTKAERGGLSELDKAGFIKRQLVETRQITKHVAQILDSRMNTKYDENDKLIREVKVITLKSKLVSDFRKDFQFYKVREINNYHHAHDAYLNAVVGTALIKKYPKLESEFVYGDYKVYDVRKMIAKSEQEIGKATAKYFFYSNIMNFFKTEITLANGEIRKRPLIETNGETGEIVWDKGRDFATVRKVLSMPQVNIVKKTEVQTGGFSKESILPKRNSDKLIARKKDWDPKKYGGFDSPTVAYSVLVVAKVEKGKSKKLKSVKELLGITIMERSSFEKNPIDFLEAKGYKEVKKDLIIKLPKYSLFELENGRKRMLASAGELQKGNELALPSKYVNFLYLASHYEKLKGSPEDNEQKQLFVEQHKHYLDEIIEQISEFSKRVILADANLDKVLSAYNKHRDKPIREQAENIIHLFTLTNLGAPAAFKYFDTTIDRKRYTSTKEVLDATLIHQSITGLYETRIDLSQLGGDGGGGGPAPGGSGGTLNIEDEYRLHETSKGPDVPLGSTWLSDFPQAWAETGGMGLAVRQAPLIIPLKATSTPVSIKQYPMSQEARLGIKPHIQRLLDQGILVPCQSPWNTPLLPVKKPGTNDYRPVQDLREVNKRVEDIHPTVPNPYNLLSGLPPSHQWYTVLDLKDAFFCLRLHPTSQSLFAFEWRDPEMGISGQLTWTRLPQGFKNSPTLFNEALHRDLADFRIQHPDLILLQYVDDLLLAATSELDCQQGTRALLQTLGDLGYRASAKKAQICQKQVKYLGYLLKEGQRWLTEARKETVMGQPTPKTPRQLREFLGKAGFCRLFIPGFAEMAAPLYPLTKPGTLFEWGPDQQKAYQEIKQALLTAPALGLPDLTKPFELFVDEKQGYAKGVLTQKLGPWRRPVAYLSKKLDPVAAGWPPCLRMVAAIAVLTKDAGKLTMGQPLVILAPHAVEALVKQPPDRWLSNARMTHYQALLLDTDRVQFGPIVALNPATLLPLPEEGLQHDCLDILAEAHGTRPDLTDQPLPDADHTWYTDGSSFLQEGQRKAGAAVTTETEVVWAKALPAGTSAQRAELIALTQALKMAEGKKLNVYTDSRYAFATAHIHGEIYRRRGWLTSEGKEIKNKDEILALLKALFLPKRLSIIHCPGHQKGNRAEARGNRMADQAAREVATRETPETSTLLAGKRTADGSEFEKRTADGSEFESPKKKAKVE

SEQ ID NO: 2544 - protein, 2097 aa, synthetic construct
MPAAKRVKLDGGDKKYSIGLDIGTNSVGWAVITDEYKVPSKKFKVLGNTDRHSIKKNLIGALLFDSGETAEATRLKRTARRRYTRRKNRICYLQEIFSNEMAKVDDSFFHRLEESFLVEEDKKHERHPIFGNIVDEVAYHEKYPTIYHLRKKLVDSTDKADLRLIYLALAHMIKFRGHFLIEGDLNPDNSDVDKLFIQLVQTYNQLFEENPINASGVDAKAILSARLSKSRRLENLIAQLPGEKKNGLFGNLIALSLGLTPNFKSNFDLAEDAKLQLSKDTYDDDLDNLLAQIGDQYADLFLAAKNLSDAILLSDILRVNTEITKAPLSASMIKRYDEHHQDLTLLKALVRQQLPEKYKEIFFDQSKNGYAGYIDGGASQEEFYKFIKPILEKMDGTEELLVKLNREDLLRKQRTFDNGSIPHQIHLGELHAILRRQEDFYPFLKDNREKIEKILTFRIPYYVGPLARGNSRFAWMTRKSEETITPWNFEEVVDKGASAQSFIERMTNFDKNLPNEKVLPKHSLLYEYFTVYNELTKVKYVTEGMRKPAFLSGEQKKAIVDLLFKTNRKVTVKQLKEDYFKKIECFDSVEISGVEDRFNASLGTYHDLLKIIKDKDFLDNEENEDILEDIVLTLTLFEDREMIEERLKTYAHLFDDKVMKQLKRRRYTGWGRLSRKLINGIRDKQSGKTILDFLKSDGFANRNFMQLIHDDSLTFKEDIQKAQVSGQGDSLHEHIANLAGSPAIKKGILQTVKVVDELVKVMGRHKPENIVIEMARENQTTQKGQKNSRERMKRIEEGIKELGSQILKEHPVENTQLQNEKLYLYYLQNGRDMYVDQELDINRLSDYDVDHIVPQSFLKDDSIDNKVLTRSDKARGKSDNVPSEEVVKKMKNYWRQLLNAKLITQRKFDNLTKAERGGLSELDKAGFIKRQLVETRQITKHVAQILDSRMNTKYDENDKLIREVKVITLKSKLVSDFRKDFQFYKVREINNYHHAHDAYLNAVVGTALIKKYPKLESEFVYGDYKVYDVRKMIAKSEQEIGKATAKYFFYSNIMNFFKTEITLANGEIRKRPLIETNGETGEIVWDKGRDFATVRKVLSMPQVNIVKKTEVQTGGFSKESILPKRNSDKLIARKKDWDPKKYGGFDSPTVAYSVLVVAKVEKGKSKKLKSVKELLGITIMERSSFEKNPIDFLEAKGYKEVKKDLIIKLPKYSLFELENGRKRMLASAGELQKGNELALPSKYVNFLYLASHYEKLKGSPEDNEQKQLFVEQHKHYLDEIIEQISEFSKRVILADANLDKVLSAYNKHRDKPIREQAENIIHLFTLTNLGAPAAFKYFDTTIDRKRYTSTKEVLDATLIHQSITGLYETRIDLSQLGGDGGGGSGGSGGSGGSGGTLNIEDEYRLHETSKGPDVPLGSTWLSDFPQAWAETGGMGLAVRQAPLIIPLKATSTPVSIKQYPMSQEARLGIKPHIQRLLDQGILVPCQSPWNTPLLPVKKPGTNDYRPVQDLREVNKRVEDIHPTVPNPYNLLSGLPPSHQWYTVLDLKDAFFCLRLHPTSQSLFAFEWRDPEMGISGQLTWTRLPQGFKNSPTLFNEALHRDLADFRIQHPDLILLQYVDDLLLAATSELDCQQGTRALLQTLGDLGYRASAKKAQICQKQVKYLGYLLKEGQRWLTEARKETVMGQPTPKTPRQLREFLGKAGFCRLFIPGFAEMAAPLYPLTKPGTLFEWGPDQQKAYQEIKQALLTAPALGLPDLTKPFELFVDEKQGYAKGVLTQKLGPWRRPVAYLSKKLDPVAAGWPPCLRMVAAIAVLTKDAGKLTMGQPLVILAPHAVEALVKQPPDRWLSNARMTHYQALLLDTDRVQFGPIVALNPATLLPLPEEGLQHDCLDILAEAHGTRPDLTDQPLPDADHTWYTDGSSFLQEGQRKAGAAVTTETEVVWAKALPAGTSAQRAELIALTQALKMAEGKKLNVYTDSRYAFATAHIHGEIYRRRGWLTSEGKEIKNKDEILALLKALFLPKRLSIIHCPGHQKGNRAEARGNRMADQAAREVATRETPETSTLLAGKRTADGSEFEKRTADGSEFESPKKKAKVE

SEQ ID NO: 2545 - protein, 2094 aa, synthetic construct
MPAAKRVKLDGGDKKYSIGLDIGTNSVGWAVITDEYKVPSKKFKVLGNTDRHSIKKNLIGALLFDSGETAEATRLKRTARRRYTRRKNRICYLQEIFSNEMAKVDDSFFHRLEESFLVEEDKKHERHPIFGNIVDEVAYHEKYPTIYHLRKKLVDSTDKADLRLIYLALAHMIKFRGHFLIEGDLNPDNSDVDKLFIQLVQTYNQLFEENPINASGVDAKAILSARLSKSRRLENLIAQLPGEKKNGLFGNLIALSLGLTPNFKSNFDLAEDAKLQLSKDTYDDDLDNLLAQIGDQYADLFLAAKNLSDAILLSDILRVNTEITKAPLSASMIKRYDEHHQDLTLLKALVRQQLPEKYKEIFFDQSKNGYAGYIDGGASQEEFYKFIKPILEKMDGTEELLVKLNREDLLRKQRTFDNGSIPHQIHLGELHAILRRQEDFYPFLKDNREKIEKILTFRIPYYVGPLARGNSRFAWMTRKSEETITPWNFEEVVDKGASAQSFIERMTNFDKNLPNEKVLPKHSLLYEYFTVYNELTKVKYVTEGMRKPAFLSGEQKKAIVDLLFKTNRKVTVKQLKEDYFKKIECFDSVEISGVEDRFNASLGTYHDLLKIIKDKDFLDNEENEDILEDIVLTLTLFEDREMIEERLKTYAHLFDDKVMKQLKRRRYTGWGRLSRKLINGIRDKQSGKTILDFLKSDGFANRNFMQLIHDDSLTFKEDIQKAQVSGQGDSLHEHIANLAGSPAIKKGILQTVKVVDELVKVMGRHKPENIVIEMARENQTTQKGQKNSRERMKRIEEGIKELGSQILKEHPVENTQLQNEKLYLYYLQNGRDMYVDQELDINRLSDYDVDHIVPQSFLKDDSIDNKVLTRSDKARGKSDNVPSEEVVKKMKNYWRQLLNAKLITQRKFDNLTKAERGGLSELDKAGFIKRQLVETRQITKHVAQILDSRMNTKYDENDKLIREVKVITLKSKLVSDFRKDFQFYKVREINNYHHAHDAYLNAVVGTALIKKYPKLESEFVYGDYKVYDVRKMIAKSEQEIGKATAKYFFYSNIMNFFKTEITLANGEIRKRPLIETNGETGEIVWDKGRDFATVRKVLSMPQVNIVKKTEVQTGGFSKESILPKRNSDKLIARKKDWDPKKYGGFDSPTVAYSVLVVAKVEKGKSKKLKSVKELLGITIMERSSFEKNPIDFLEAKGYKEVKKDLIIKLPKYSLFELENGRKRMLASAGELQKGNELALPSKYVNFLYLASHYEKLKGSPEDNEQKQLFVEQHKHYLDEIIEQISEFSKRVILADANLDKVLSAYNKHRDKPIREQAENIIHLFTLTNLGAPAAFKYFDTTIDRKRYTSTKEVLDATLIHQSITGLYETRIDLSQLGGDGGGGSGSSGGGGGTLNIEDEYRLHETSKGPDVPLGSTWLSDFPQAWAETGGMGLAVRQAPLIIPLKATSTPVSIKQYPMSQEARLGIKPHIQRLLDQGILVPCQSPWNTPLLPVKKPGTNDYRPVQDLREVNKRVEDIHPTVPNPYNLLSGLPPSHQWYTVLDLKDAFFCLRLHPTSQSLFAFEWRDPEMGISGQLTWTRLPQGFKNSPTLFNEALHRDLADFRIQHPDLILLQYVDDLLLAATSELDCQQGTRALLQTLGDLGYRASAKKAQICQKQVKYLGYLLKEGQRWLTEARKETVMGQPTPKTPRQLREFLGKAGFCRLFIPGFAEMAAPLYPLTKPGTLFEWGPDQQKAYQEIKQALLTAPALGLPDLTKPFELFVDEKQGYAKGVLTQKLGPWRRPVAYLSKKLDPVAAGWPPCLRMVAAIAVLTKDAGKLTMGQPLVILAPHAVEALVKQPPDRWLSNARMTHYQALLLDTDRVQFGPIVALNPATLLPLPEEGLQHDCLDILAEAHGTRPDLTDQPLPDADHTWYTDGSSFLQEGQRKAGAAVTTETEVVWAKALPAGTSAQRAELIALTQALKMAEGKKLNVYTDSRYAFATAHIHGEIYRRRGWLTSEGKEIKNKDEILALLKALFLPKRLSIIHCPGHQKGNRAEARGNRMADQAAREVATRETPETSTLLAGKRTADGSEFEKRTADGSEFESPKKKAKVE

SEQ ID NO: 2546 - protein, 2091 aa, synthetic construct
MPAAKRVKLDGGDKKYSIGLDIGTNSVGWAVITDEYKVPSKKFKVLGNTDRHSIKKNLIGALLFDSGETAEATRLKRTARRRYTRRKNRICYLQEIFSNEMAKVDDSFFHRLEESFLVEEDKKHERHPIFGNIVDEVAYHEKYPTIYHLRKKLVDSTDKADLRLIYLALAHMIKFRGHFLIEGDLNPDNSDVDKLFIQLVQTYNQLFEENPINASGVDAKAILSARLSKSRRLENLIAQLPGEKKNGLFGNLIALSLGLTPNFKSNFDLAEDAKLQLSKDTYDDDLDNLLAQIGDQYADLFLAAKNLSDAILLSDILRVNTEITKAPLSASMIKRYDEHHQDLTLLKALVRQQLPEKYKEIFFDQSKNGYAGYIDGGASQEEFYKFIKPILEKMDGTEELLVKLNREDLLRKQRTFDNGSIPHQIHLGELHAILRRQEDFYPFLKDNREKIEKILTFRIPYYVGPLARGNSRFAWMTRKSEETITPWNFEEVVDKGASAQSFIERMTNFDKNLPNEKVLPKHSLLYEYFTVYNELTKVKYVTEGMRKPAFLSGEQKKAIVDLLFKTNRKVTVKQLKEDYFKKIECFDSVEISGVEDRFNASLGTYHDLLKIIKDKDFLDNEENEDILEDIVLTLTLFEDREMIEERLKTYAHLFDDKVMKQLKRRRYTGWGRLSRKLINGIRDKQSGKTILDFLKSDGFANRNFMQLIHDDSLTFKEDIQKAQVSGQGDSLHEHIANLAGSPAIKKGILQTVKVVDELVKVMGRHKPENIVIEMARENQTTQKGQKNSRERMKRIEEGIKELGSQILKEHPVENTQLQNEKLYLYYLQNGRDMYVDQELDINRLSDYDVDHIVPQSFLKDDSIDNKVLTRSDKARGKSDNVPSEEVVKKMKNYWRQLLNAKLITQRKFDNLTKAERGGLSELDKAGFIKRQLVETRQITKHVAQILDSRMNTKYDENDKLIREVKVITLKSKLVSDFRKDFQFYKVREINNYHHAHDAYLNAVVGTALIKKYPKLESEFVYGDYKVYDVRKMIAKSEQEIGKATAKYFFYSNIMNFFKTEITLANGEIRKRPLIETNGETGEIVWDKGRDFATVRKVLSMPQVNIVKKTEVQTGGFSKESILPKRNSDKLIARKKDWDPKKYGGFDSPTVAYSVLVVAKVEKGKSKKLKSVKELLGITIMERSSFEKNPIDFLEAKGYKEVKKDLIIKLPKYSLFELENGRKRMLASAGELQKGNELALPSKYVNFLYLASHYEKLKGSPEDNEQKQLFVEQHKHYLDEIIEQISEFSKRVILADANLDKVLSAYNKHRDKPIREQAENIIHLFTLTNLGAPAAFKYFDTTIDRKRYTSTKEVLDATLIHQSITGLYETRIDLSQLGGDGGPAPGGSGGTLNIEDEYRLHETSKGPDVPLGSTWLSDFPQAWAETGGMGLAVRQAPLIIPLKATSTPVSIKQYPMSQEARLGIKPHIQRLLDQGILVPCQSPWNTPLLPVKKPGTNDYRPVQDLREVNKRVEDIHPTVPNPYNLLSGLPPSHQWYTVLDLKDAFFCLRLHPTSQSLFAFEWRDPEMGISGQLTWTRLPQGFKNSPTLFNEALHRDLADFRIQHPDLILLQYVDDLLLAATSELDCQQGTRALLQTLGDLGYRASAKKAQICQKQVKYLGYLLKEGQRWLTEARKETVMGQPTPKTPRQLREFLGKAGFCRLFIPGFAEMAAPLYPLTKPGTLFEWGPDQQKAYQEIKQALLTAPALGLPDLTKPFELFVDEKQGYAKGVLTQKLGPWRRPVAYLSKKLDPVAAGWPPCLRMVAAIAVLTKDAGKLTMGQPLVILAPHAVEALVKQPPDRWLSNARMTHYQALLLDTDRVQFGPIVALNPATLLPLPEEGLQHDCLDILAEAHGTRPDLTDQPLPDADHTWYTDGSSFLQEGQRKAGAAVTTETEVVWAKALPAGTSAQRAELIALTQALKMAEGKKLNVYTDSRYAFATAHIHGEIYRRRGWLTSEGKEIKNKDEILALLKALFLPKRLSIIHCPGHQKGNRAEARGNRMADQAAREVATRETPETSTLLAGKRTADGSEFEKRTADGSEFESPKKKAKVE

SEQ ID NO: 2547 - protein, 2091 aa, synthetic construct
MPAAKRVKLDGGDKKYSIGLDIGTNSVGWAVITDEYKVPSKKFKVLGNTDRHSIKKNLIGALLFDSGETAEATRLKRTARRRYTRRKNRICYLQEIFSNEMAKVDDSFFHRLEESFLVEEDKKHERHPIFGNIVDEVAYHEKYPTIYHLRKKLVDSTDKADLRLIYLALAHMIKFRGHFLIEGDLNPDNSDVDKLFIQLVQTYNQLFEENPINASGVDAKAILSARLSKSRRLENLIAQLPGEKKNGLFGNLIALSLGLTPNFKSNFDLAEDAKLQLSKDTYDDDLDNLLAQIGDQYADLFLAAKNLSDAILLSDILRVNTEITKAPLSASMIKRYDEHHQDLTLLKALVRQQLPEKYKEIFFDQSKNGYAGYIDGGASQEEFYKFIKPILEKMDGTEELLVKLNREDLLRKQRTFDNGSIPHQIHLGELHAILRRQEDFYPFLKDNREKIEKILTFRIPYYVGPLARGNSRFAWMTRKSEETITPWNFEEVVDKGASAQSFIERMTNFDKNLPNEKVLPKHSLLYEYFTVYNELTKVKYVTEGMRKPAFLSGEQKKAIVDLLFKTNRKVTVKQLKEDYFKKIECFDSVEISGVEDRFNASLGTYHDLLKIIKDKDFLDNEENEDILEDIVLTLTLFEDREMIEERLKTYAHLFDDKVMKQLKRRRYTGWGRLSRKLINGIRDKQSGKTILDFLKSDGFANRNFMQLIHDDSLTFKEDIQKAQVSGQGDSLHEHIANLAGSPAIKKGILQTVKVVDELVKVMGRHKPENIVIEMARENQTTQKGQKNSRERMKRIEEGIKELGSQILKEHPVENTQLQNEKLYLYYLQNGRDMYVDQELDINRLSDYDVDHIVPQSFLKDDSIDNKVLTRSDKARGKSDNVPSEEVVKKMKNYWRQLLNAKLITQRKFDNLTKAERGGLSELDKAGFIKRQLVETRQITKHVAQILDSRMNTKYDENDKLIREVKVITLKSKLVSDFRKDFQFYKVREINNYHHAHDAYLNAVVGTALIKKYPKLESEFVYGDYKVYDVRKMIAKSEQEIGKATAKYFFYSNIMNFFKTEITLANGEIRKRPLIETNGETGEIVWDKGRDFATVRKVLSMPQVNIVKKTEVQTGGFSKESILPKRNSDKLIARKKDWDPKKYGGFDSPTVAYSVLVVAKVEKGKSKKLKSVKELLGITIMERSSFEKNPIDFLEAKGYKEVKKDLIIKLPKYSLFELENGRKRMLASAGELQKGNELALPSKYVNFLYLASHYEKLKGSPEDNEQKQLFVEQHKHYLDEIIEQISEFSKRVILADANLDKVLSAYNKHRDKPIREQAENIIHLFTLTNLGAPAAFKYFDTTIDRKRYTSTKEVLDATLIHQSITGLYETRIDLSQLGGDGGGGGPAPGGTLNIEDEYRLHETSKGPDVPLGSTWLSDFPQAWAETGGMGLAVRQAPLIIPLKATSTPVSIKQYPMSQEARLGIKPHIQRLLDQGILVPCQSPWNTPLLPVKKPGTNDYRPVQDLREVNKRVEDIHPTVPNPYNLLSGLPPSHQWYTVLDLKDAFFCLRLHPTSQSLFAFEWRDPEMGISGQLTWTRLPQGFKNSPTLFNEALHRDLADFRIQHPDLILLQYVDDLLLAATSELDCQQGTRALLQTLGDLGYRASAKKAQICQKQVKYLGYLLKEGQRWLTEARKETVMGQPTPKTPRQLREFLGKAGFCRLFIPGFAEMAAPLYPLTKPGTLFEWGPDQQKAYQEIKQALLTAPALGLPDLTKPFELFVDEKQGYAKGVLTQKLGPWRRPVAYLSKKLDPVAAGWPPCLRMVAAIAVLTKDAGKLTMGQPLVILAPHAVEALVKQPPDRWLSNARMTHYQALLLDTDRVQFGPIVALNPATLLPLPEEGLQHDCLDILAEAHGTRPDLTDQPLPDADHTWYTDGSSFLQEGQRKAGAAVTTETEVVWAKALPAGTSAQRAELIALTQALKMAEGKKLNVYTDSRYAFATAHIHGEIYRRRGWLTSEGKEIKNKDEILALLKALFLPKRLSIIHCPGHQKGNRAEARGNRMADQAAREVATRETPETSTLLAGKRTADGSEFEKRTADGSEFESPKKKAKVE

SEQ ID NO: 2548 - protein, 2096 aa, synthetic construct
MPAAKRVKLDGGDKKYSIGLDIGTNSVGWAVITDEYKVPSKKFKVLGNTDRHSIKKNLIGALLFDSGETAEATRLKRTARRRYTRRKNRICYLQEIFSNEMAKVDDSFFHRLEESFLVEEDKKHERHPIFGNIVDEVAYHEKYPTIYHLRKKLVDSTDKADLRLIYLALAHMIKFRGHFLIEGDLNPDNSDVDKLFIQLVQTYNQLFEENPINASGVDAKAILSARLSKSRRLENLIAQLPGEKKNGLFGNLIALSLGLTPNFKSNFDLAEDAKLQLSKDTYDDDLDNLLAQIGDQYADLFLAAKNLSDAILLSDILRVNTEITKAPLSASMIKRYDEHHQDLTLLKALVRQQLPEKYKEIFFDQSKNGYAGYIDGGASQEEFYKFIKPILEKMDGTEELLVKLNREDLLRKQRTFDNGSIPHQIHLGELHAILRRQEDFYPFLKDNREKIEKILTFRIPYYVGPLARGNSRFAWMTRKSEETITPWNFEEVVDKGASAQSFIERMTNFDKNLPNEKVLPKHSLLYEYFTVYNELTKVKYVTEGMRKPAFLSGEQKKAIVDLLFKTNRKVTVKQLKEDYFKKIECFDSVEISGVEDRFNASLGTYHDLLKIIKDKDFLDNEENEDILEDIVLTLTLFEDREMIEERLKTYAHLFDDKVMKQLKRRRYTGWGRLSRKLINGIRDKQSGKTILDFLKSDGFANRNFMQLIHDDSLTFKEDIQKAQVSGQGDSLHEHIANLAGSPAIKKGILQTVKVVDELVKVMGRHKPENIVIEMARENQTTQKGQKNSRERMKRIEEGIKELGSQILKEHPVENTQLQNEKLYLYYLQNGRDMYVDQELDINRLSDYDVDHIVPQSFLKDDSIDNKVLTRSDKARGKSDNVPSEEVVKKMKNYWRQLLNAKLITQRKFDNLTKAERGGLSELDKAGFIKRQLVETRQITKHVAQILDSRMNTKYDENDKLIREVKVITLKSKLVSDFRKDFQFYKVREINNYHHAHDAYLNAVVGTALIKKYPKLESEFVYGDYKVYDVRKMIAKSEQEIGKATAKYFFYSNIMNFFKTEITLANGEIRKRPLIETNGETGEIVWDKGRDFATVRKVLSMPQVNIVKKTEVQTGGFSKESILPKRNSDKLIARKKDWDPKKYGGFDSPTVAYSVLVVAKVEKGKSKKLKSVKELLGITIMERSSFEKNPIDFLEAKGYKEVKKDLIIKLPKYSLFELENGRKRMLASAGELQKGNELALPSKYVNFLYLASHYEKLKGSPEDNEQKQLFVEQHKHYLDEIIEQISEFSKRVILADANLDKVLSAYNKHRDKPIREQAENIIHLFTLTNLGAPAAFKYFDTTIDRKRYTSTKEVLDATLIHQSITGLYETRIDLSQLGGDGGEAAAKGGSGSSGGTLNIEDEYRLHETSKGPDVPLGSTWLSDFPQAWAETGGMGLAVRQAPLIIPLKATSTPVSIKQYPMSQEARLGIKPHIQRLLDQGILVPCQSPWNTPLLPVKKPGTNDYRPVQDLREVNKRVEDIHPTVPNPYNLLSGLPPSHQWYTVLDLKDAFFCLRLHPTSQSLFAFEWRDPEMGISGQLTWTRLPQGFKNSPTLFNEALHRDLADFRIQHPDLILLQYVDDLLLAATSELDCQQGTRALLQTLGDLGYRASAKKAQICQKQVKYLGYLLKEGQRWLTEARKETVMGQPTPKTPRQLREFLGKAGFCRLFIPGFAEMAAPLYPLTKPGTLFEWGPDQQKAYQEIKQALLTAPALGLPDLTKPFELFVDEKQGYAKGVLTQKLGPWRRPVAYLSKKLDPVAAGWPPCLRMVAAIAVLTKDAGKLTMGQPLVILAPHAVEALVKQPPDRWLSNARMTHYQALLLDTDRVQFGPIVALNPATLLPLPEEGLQHDCLDILAEAHGTRPDLTDQPLPDADHTWYTDGSSFLQEGQRKAGAAVTTETEVVWAKALPAGTSAQRAELIALTQALKMAEGKKLNVYTDSRYAFATAHIHGEIYRRRGWLTSEGKEIKNKDEILALLKALFLPKRLSIIHCPGHQKGNRAEARGNRMADQAAREVATRETPETSTLLAGKRTADGSEFEKRTADGSEFESPKKKAKVE

SEQ ID NO: 2549 - protein, 2093 aa, synthetic construct
MPAAKRVKLDGGDKKYSIGLDIGTNSVGWAVITDEYKVPSKKFKVLGNTDRHSIKKNLIGALLFDSGETAEATRLKRTARRRYTRRKNRICYLQEIFSNEMAKVDDSFFHRLEESFLVEEDKKHERHPIFGNIVDEVAYHEKYPTIYHLRKKLVDSTDKADLRLIYLALAHMIKFRGHFLIEGDLNPDNSDVDKLFIQLVQTYNQLFEENPINASGVDAKAILSARLSKSRRLENLIAQLPGEKKNGLFGNLIALSLGLTPNFKSNFDLAEDAKLQLSKDTYDDDLDNLLAQIGDQYADLFLAAKNLSDAILLSDILRVNTEITKAPLSASMIKRYDEHHQDLTLLKALVRQQLPEKYKEIFFDQSKNGYAGYIDGGASQEEFYKFIKPILEKMDGTEELLVKLNREDLLRKQRTFDNGSIPHQIHLGELHAILRRQEDFYPFLKDNREKIEKILTFRIPYYVGPLARGNSRFAWMTRKSEETITPWNFEEVVDKGASAQSFIERMTNFDKNLPNEKVLPKHSLLYEYFTVYNELTKVKYVTEGMRKPAFLSGEQKKAIVDLLFKTNRKVTVKQLKEDYFKKIECFDSVEISGVEDRFNASLGTYHDLLKIIKDKDFLDNEENEDILEDIVLTLTLFEDREMIEERLKTYAHLFDDKVMKQLKRRRYTGWGRLSRKLINGIRDKQSGKTILDFLKSDGFANRNFMQLIHDDSLTFKEDIQKAQVSGQGDSLHEHIANLAGSPAIKKGILQTVKVVDELVKVMGRHKPENIVIEMARENQTTQKGQKNSRERMKRIEEGIKELGSQILKEHPVENTQLQNEKLYLYYLQNGRDMYVDQELDINRLSDYDVDHIVPQSFLKDDSIDNKVLTRSDKARGKSDNVPSEEVVKKMKNYWRQLLNAKLITQRKFDNLTKAERGGLSELDKAGFIKRQLVETRQITKHVAQILDSRMNTKYDENDKLIREVKVITLKSKLVSDFRKDFQFYKVREINNYHHAHDAYLNAVVGTALIKKYPKLESEFVYGDYKVYDVRKMIAKSEQEIGKATAKYFFYSNIMNFFKTEITLANGEIRKRPLIETNGETGEIVWDKGRDFATVRKVLSMPQVNIVKKTEVQTGGFSKESILPKRNSDKLIARKKDWDPKKYGGFDSPTVAYSVLVVAKVEKGKSKKLKSVKELLGITIMERSSFEKNPIDFLEAKGYKEVKKDLIIKLPKYSLFELENGRKRMLASAGELQKGNELALPSKYVNFLYLASHYEKLKGSPEDNEQKQLFVEQHKHYLDEIIEQISEFSKRVILADANLDKVLSAYNKHRDKPIREQAENIIHLFTLTNLGAPAAFKYFDTTIDRKRYTSTKEVLDATLIHQSITGLYETRIDLSQLGGDGGGGGGGGGGGGTLNIEDEYRLHETSKGPDVPLGSTWLSDFPQAWAETGGMGLAVRQAPLIIPLKATSTPVSIKQYPMSQEARLGIKPHIQRLLDQGILVPCQSPWNTPLLPVKKPGTNDYRPVQDLREVNKRVEDIHPTVPNPYNLLSGLPPSHQWYTVLDLKDAFFCLRLHPTSQSLFAFEWRDPEMGISGQLTWTRLPQGFKNSPTLFNEALHRDLADFRIQHPDLILLQYVDDLLLAATSELDCQQGTRALLQTLGDLGYRASAKKAQICQKQVKYLGYLLKEGQRWLTEARKETVMGQPTPKTPRQLREFLGKAGFCRLFIPGFAEMAAPLYPLTKPGTLFEWGPDQQKAYQEIKQALLTAPALGLPDLTKPFELFVDEKQGYAKGVLTQKLGPWRRPVAYLSKKLDPVAAGWPPCLRMVAAIAVLTKDAGKLTMGQPLVILAPHAVEALVKQPPDRWLSNARMTHYQALLLDTDRVQFGPIVALNPATLLPLPEEGLQHDCLDILAEAHGTRPDLTDQPLPDADHTWYTDGSSFLQEGQRKAGAAVTTETEVVWAKALPAGTSAQRAELIALTQALKMAEGKKLNVYTDSRYAFATAHIHGEIYRRRGWLTSEGKEIKNKDEILALLKALFLPKRLSIIHCPGHQKGNRAEARGNRMADQAAREVATRETPETSTLLAGKRTADGSEFEKRTADGSEFESPKKKAKVE

SEQ ID NO: 2550 - protein, 2096 aa, synthetic construct
MPAAKRVKLDGGDKKYSIGLDIGTNSVGWAVITDEYKVPSKKFKVLGNTDRHSIKKNLIGALLFDSGETAEATRLKRTARRRYTRRKNRICYLQEIFSNEMAKVDDSFFHRLEESFLVEEDKKHERHPIFGNIVDEVAYHEKYPTIYHLRKKLVDSTDKADLRLIYLALAHMIKFRGHFLIEGDLNPDNSDVDKLFIQLVQTYNQLFEENPINASGVDAKAILSARLSKSRRLENLIAQLPGEKKNGLFGNLIALSLGLTPNFKSNFDLAEDAKLQLSKDTYDDDLDNLLAQIGDQYADLFLAAKNLSDAILLSDILRVNTEITKAPLSASMIKRYDEHHQDLTLLKALVRQQLPEKYKEIFFDQSKNGYAGYIDGGASQEEFYKFIKPILEKMDGTEELLVKLNREDLLRKQRTFDNGSIPHQIHLGELHAILRRQEDFYPFLKDNREKIEKILTFRIPYYVGPLARGNSRFAWMTRKSEETITPWNFEEVVDKGASAQSFIERMTNFDKNLPNEKVLPKHSLLYEYFTVYNELTKVKYVTEGMRKPAFLSGEQKKAIVDLLFKTNRKVTVKQLKEDYFKKIECFDSVEISGVEDRFNASLGTYHDLLKIIKDKDFLDNEENEDILEDIVLTLTLFEDREMIEERLKTYAHLFDDKVMKQLKRRRYTGWGRLSRKLINGIRDKQSGKTILDFLKSDGFANRNFMQLIHDDSLTFKEDIQKAQVSGQGDSLHEHIANLAGSPAIKKGILQTVKVVDELVKVMGRHKPENIVIEMARENQTTQKGQKNSRERMKRIEEGIKELGSQILKEHPVENTQLQNEKLYLYYLQNGRDMYVDQELDINRLSDYDVDHIVPQSFLKDDSIDNKVLTRSDKARGKSDNVPSEEVVKKMKNYWRQLLNAKLITQRKFDNLTKAERGGLSELDKAGFIKRQLVETRQITKHVAQILDSRMNTKYDENDKLIREVKVITLKSKLVSDFRKDFQFYKVREINNYHHAHDAYLNAVVGTALIKKYPKLESEFVYGDYKVYDVRKMIAKSEQEIGKATAKYFFYSNIMNFFKTEITLANGEIRKRPLIETNGETGEIVWDKGRDFATVRKVLSMPQVNIVKKTEVQTGGFSKESILPKRNSDKLIARKKDWDPKKYGGFDSPTVAYSVLVVAKVEKGKSKKLKSVKELLGITIMERSSFEKNPIDFLEAKGYKEVKKDLIIKLPKYSLFELENGRKRMLASAGELQKGNELALPSKYVNFLYLASHYEKLKGSPEDNEQKQLFVEQHKHYLDEIIEQISEFSKRVILADANLDKVLSAYNKHRDKPIREQAENIIHLFTLTNLGAPAAFKYFDTTIDRKRYTSTKEVLDATLIHQSITGLYETRIDLSQLGGDGGGSSEAAAKGGGGGTLNIEDEYRLHETSKGPDVPLGSTWLSDFPQAWAETGGMGLAVRQAPLIIPLKATSTPVSIKQYPMSQEARLGIKPHIQRLLDQGILVPCQSPWNTPLLPVKKPGTNDYRPVQDLREVNKRVEDIHPTVPNPYNLLSGLPPSHQWYTVLDLKDAFFCLRLHPTSQSLFAFEWRDPEMGISGQLTWTRLPQGFKNSPTLFNEALHRDLADFRIQHPDLILLQYVDDLLLAATSELDCQQGTRALLQTLGDLGYRASAKKAQICQKQVKYLGYLLKEGQRWLTEARKETVMGQPTPKTPRQLREFLGKAGFCRLFIPGFAEMAAPLYPLTKPGTLFEWGPDQQKAYQEIKQALLTAPALGLPDLTKPFELFVDEKQGYAKGVLTQKLGPWRRPVAYLSKKLDPVAAGWPPCLRMVAAIAVLTKDAGKLTMGQPLVILAPHAVEALVKQPPDRWLSNARMTHYQALLLDTDRVQFGPIVALNPATLLPLPEEGLQHDCLDILAEAHGTRPDLTDQPLPDADHTWYTDGSSFLQEGQRKAGAAVTTETEVVWAKALPAGTSAQRAELIALTQALKMAEGKKLNVYTDSRYAFATAHIHGEIYRRRGWLTSEGKEIKNKDEILALLKALFLPKRLSIIHCPGHQKGNRAEARGNRMADQAAREVATRETPETSTLLAGKRTADGSEFEKRTADGSEFESPKKKAKVE

SEQ ID NO: 2551 - protein, 2096 aa, synthetic construct
MPAAKRVKLDGGDKKYSIGLDIGTNSVGWAVITDEYKVPSKKFKVLGNTDRHSIKKNLIGALLFDSGETAEATRLKRTARRRYTRRKNRICYLQEIFSNEMAKVDDSFFHRLEESFLVEEDKKHERHPIFGNIVDEVAYHEKYPTIYHLRKKLVDSTDKADLRLIYLALAHMIKFRGHFLIEGDLNPDNSDVDKLFIQLVQTYNQLFEENPINASGVDAKAILSARLSKSRRLENLIAQLPGEKKNGLFGNLIALSLGLTPNFKSNFDLAEDAKLQLSKDTYDDDLDNLLAQIGDQYADLFLAAKNLSDAILLSDILRVNTEITKAPLSASMIKRYDEHHQDLTLLKALVRQQLPEKYKEIFFDQSKNGYAGYIDGGASQEEFYKFIKPILEKMDGTEELLVKLNREDLLRKQRTFDNGSIPHQIHLGELHAILRRQEDFYPFLKDNREKIEKILTFRIPYYVGPLARGNSRFAWMTRKSEETITPWNFEEVVDKGASAQSFIERMTNFDKNLPNEKVLPKHSLLYEYFTVYNELTKVKYVTEGMRKPAFLSGEQKKAIVDLLFKTNRKVTVKQLKEDYFKKIECFDSVEISGVEDRFNASLGTYHDLLKIIKDKDFLDNEENEDILEDIVLTLTLFEDREMIEERLKTYAHLFDDKVMKQLKRRRYTGWGRLSRKLINGIRDKQSGKTILDFLKSDGFANRNFMQLIHDDSLTFKEDIQKAQVSGQGDSLHEHIANLAGSPAIKKGILQTVKVVDELVKVMGRHKPENIVIEMARENQTTQKGQKNSRERMKRIEEGIKELGSQILKEHPVENTQLQNEKLYLYYLQNGRDMYVDQELDINRLSDYDVDHIVPQSFLKDDSIDNKVLTRSDKARGKSDNVPSEEVVKKMKNYWRQLLNAKLITQRKFDNLTKAERGGLSELDKAGFIKRQLVETRQITKHVAQILDSRMNTKYDENDKLIREVKVITLKSKLVSDFRKDFQFYKVREINNYHHAHDAYLNAVVGTALIKKYPKLESEFVYGDYKVYDVRKMIAKSEQEIGKATAKYFFYSNIMNFFKTEITLANGEIRKRPLIETNGETGEIVWDKGRDFATVRKVLSMPQVNIVKKTEVQTGGFSKESILPKRNSDKLIARKKDWDPKKYGGFDSPTVAYSVLVVAKVEKGKSKKLKSVKELLGITIMERSSFEKNPIDFLEAKGYKEVKKDLIIKLPKYSLFELENGRKRMLASAGELQKGNELALPSKYVNFLYLASHYEKLKGSPEDNEQKQLFVEQHKHYLDEIIEQISEFSKRVILADANLDKVLSAYNKHRDKPIREQAENIIHLFTLTNLGAPAAFKYFDTTIDRKRYTSTKEVLDATLIHQSITGLYETRIDLSQLGGDGGEAAAKGGSGGGGGTLNIEDEYRLHETSKGPDVPLGSTWLSDFPQAWAETGGMGLAVRQAPLIIPLKATSTPVSIKQYPMSQEARLGIKPHIQRLLDQGILVPCQSPWNTPLLPVKKPGTNDYRPVQDLREVNKRVEDIHPTVPNPYNLLSGLPPSHQWYTVLDLKDAFFCLRLHPTSQSLFAFEWRDPEMGISGQLTWTRLPQGFKNSPTLFNEALHRDLADFRIQHPDLILLQYVDDLLLAATSELDCQQGTRALLQTLGDLGYRASAKKAQICQKQVKYLGYLLKEGQRWLTEARKETVMGQPTPKTPRQLREFLGKAGFCRLFIPGFAEMAAPLYPLTKPGTLFEWGPDQQKAYQEIKQALLTAPALGLPDLTKPFELFVDEKQGYAKGVLTQKLGPWRRPVAYLSKKLDPVAAGWPPCLRMVAAIAVLTKDAGKLTMGQPLVILAPHAVEALVKQPPDRWLSNARMTHYQALLLDTDRVQFGPIVALNPATLLPLPEEGLQHDCLDILAEAHGTRPDLTDQPLPDADHTWYTDGSSFLQEGQRKAGAAVTTETEVVWAKALPAGTSAQRAELIALTQALKMAEGKKLNVYTDSRYAFATAHIHGEIYRRRGWLTSEGKEIKNKDEILALLKALFLPKRLSIIHCPGHQKGNRAEARGNRMADQAAREVATRETPETSTLLAGKRTADGSEFEKRTADGSEFESPKKKAKVE

SEQ ID NO: 2552 - protein, 2094 aa, synthetic construct
MPAAKRVKLDGGDKKYSIGLDIGTNSVGWAVITDEYKVPSKKFKVLGNTDRHSIKKNLIGALLFDSGETAEATRLKRTARRRYTRRKNRICYLQEIFSNEMAKVDDSFFHRLEESFLVEEDKKHERHPIFGNIVDEVAYHEKYPTIYHLRKKLVDSTDKADLRLIYLALAHMIKFRGHFLIEGDLNPDNSDVDKLFIQLVQTYNQLFEENPINASGVDAKAILSARLSKSRRLENLIAQLPGEKKNGLFGNLIALSLGLTPNFKSNFDLAEDAKLQLSKDTYDDDLDNLLAQIGDQYADLFLAAKNLSDAILLSDILRVNTEITKAPLSASMIKRYDEHHQDLTLLKALVRQQLPEKYKEIFFDQSKNGYAGYIDGGASQEEFYKFIKPILEKMDGTEELLVKLNREDLLRKQRTFDNGSIPHQIHLGELHAILRRQEDFYPFLKDNREKIEKILTFRIPYYVGPLARGNSRFAWMTRKSEETITPWNFEEVVDKGASAQSFIERMTNFDKNLPNEKVLPKHSLLYEYFTVYNELTKVKYVTEGMRKPAFLSGEQKKAIVDLLFKTNRKVTVKQLKEDYFKKIECFDSVEISGVEDRFNASLGTYHDLLKIIKDKDFLDNEENEDILEDIVLTLTLFEDREMIEERLKTYAHLFDDKVMKQLKRRRYTGWGRLSRKLINGIRDKQSGKTILDFLKSDGFANRNFMQLIHDDSLTFKEDIQKAQVSGQGDSLHEHIANLAGSPAIKKGILQTVKVVDELVKVMGRHKPENIVIEMARENQTTQKGQKNSRERMKRIEEGIKELGSQILKEHPVENTQLQNEKLYLYYLQNGRDMYVDQELDINRLSDYDVDHIVPQSFLKDDSIDNKVLTRSDKARGKSDNVPSEEVVKKMKNYWRQLLNAKLITQRKFDNLTKAERGGLSELDKAGFIKRQLVETRQITKHVAQILDSRMNTKYDENDKLIREVKVITLKSKLVSDFRKDFQFYKVREINNYHHAHDAYLNAVVGTALIKKYPKLESEFVYGDYKVYDVRKMIAKSEQEIGKATAKYFFYSNIMNFFKTEITLANGEIRKRPLIETNGETGEIVWDKGRDFATVRKVLSMPQVNIVKKTEVQTGGFSKESILPKRNSDKLIARKKDWDPKKYGGFDSPTVAYSVLVVAKVEKGKSKKLKSVKELLGITIMERSSFEKNPIDFLEAKGYKEVKKDLIIKLPKYSLFELENGRKRMLASAGELQKGNELALPSKYVNFLYLASHYEKLKGSPEDNEQKQLFVEQHKHYLDEIIEQISEFSKRVILADANLDKVLSAYNKHRDKPIREQAENIIHLFTLTNLGAPAAFKYFDTTIDRKRYTSTKEVLDATLIHQSITGLYETRIDLSQLGGDGGGSSPAPGGSGGTLNIEDEYRLHETSKGPDVPLGSTWLSDFPQAWAETGGMGLAVRQAPLIIPLKATSTPVSIKQYPMSQEARLGIKPHIQRLLDQGILVPCQSPWNTPLLPVKKPGTNDYRPVQDLREVNKRVEDIHPTVPNPYNLLSGLPPSHQWYTVLDLKDAFFCLRLHPTSQSLFAFEWRDPEMGISGQLTWTRLPQGFKNSPTLFNEALHRDLADFRIQHPDLILLQYVDDLLLAATSELDCQQGTRALLQTLGDLGYRASAKKAQICQKQVKYLGYLLKEGQRWLTEARKETVMGQPTPKTPRQLREFLGKAGFCRLFIPGFAEMAAPLYPLTKPGTLFEWGPDQQKAYQEIKQALLTAPALGLPDLTKPFELFVDEKQGYAKGVLTQKLGPWRRPVAYLSKKLDPVAAGWPPCLRMVAAIAVLTKDAGKLTMGQPLVILAPHAVEALVKQPPDRWLSNARMTHYQALLLDTDRVQFGPIVALNPATLLPLPEEGLQHDCLDILAEAHGTRPDLTDQPLPDADHTWYTDGSSFLQEGQRKAGAAVTTETEVVWAKALPAGTSAQRAELIALTQALKMAEGKKLNVYTDSRYAFATAHIHGEIYRRRGWLTSEGKEIKNKDEILALLKALFLPKRLSIIHCPGHQKGNRAEARGNRMADQAAREVATRETPETSTLLAGKRTADGSEFEKRTADGSEFESPKKKAKVE

SEQ ID NO: 2553 - protein, 2096 aa, synthetic construct
MPAAKRVKLDGGDKKYSIGLDIGTNSVGWAVITDEYKVPSKKFKVLGNTDRHSIKKNLIGALLFDSGETAEATRLKRTARRRYTRRKNRICYLQEIFSNEMAKVDDSFFHRLEESFLVEEDKKHERHPIFGNIVDEVAYHEKYPTIYHLRKKLVDSTDKADLRLIYLALAHMIKFRGHFLIEGDLNPDNSDVDKLFIQLVQTYNQLFEENPINASGVDAKAILSARLSKSRRLENLIAQLPGEKKNGLFGNLIALSLGLTPNFKSNFDLAEDAKLQLSKDTYDDDLDNLLAQIGDQYADLFLAAKNLSDAILLSDILRVNTEITKAPLSASMIKRYDEHHQDLTLLKALVRQQLPEKYKEIFFDQSKNGYAGYIDGGASQEEFYKFIKPILEKMDGTEELLVKLNREDLLRKQRTFDNGSIPHQIHLGELHAILRRQEDFYPFLKDNREKIEKILTFRIPYYVGPLARGNSRFAWMTRKSEETITPWNFEEVVDKGASAQSFIERMTNFDKNLPNEKVLPKHSLLYEYFTVYNELTKVKYVTEGMRKPAFLSGEQKKAIVDLLFKTNRKVTVKQLKEDYFKKIECFDSVEISGVEDRFNASLGTYHDLLKIIKDKDFLDNEENEDILEDIVLTLTLFEDREMIEERLKTYAHLFDDKVMKQLKRRRYTGWGRLSRKLINGIRDKQSGKTILDFLKSDGFANRNFMQLIHDDSLTFKEDIQKAQVSGQGDSLHEHIANLAGSPAIKKGILQTVKVVDELVKVMGRHKPENIVIEMARENQTTQKGQKNSRERMKRIEEGIKELGSQILKEHPVENTQLQNEKLYLYYLQNGRDMYVDQELDINRLSDYDVDHIVPQSFLKDDSIDNKVLTRSDKARGKSDNVPSEEVVKKMKNYWRQLLNAKLITQRKFDNLTKAERGGLSELDKAGFIKRQLVETRQITKHVAQILDSRMNTKYDENDKLIREVKVITLKSKLVSDFRKDFQFYKVREINNYHHAHDAYLNAVVGTALIKKYPKLESEFVYGDYKVYDVRKMIAKSEQEIGKATAKYFFYSNIMNFFKTEITLANGEIRKRPLIETNGETGEIVWDKGRDFATVRKVLSMPQVNIVKKTEVQTGGFSKESILPKRNSDKLIARKKDWDPKKYGGFDSPTVAYSVLVVAKVEKGKSKKLKSVKELLGITIMERSSFEKNPIDFLEAKGYKEVKKDLIIKLPKYSLFELENGRKRMLASAGELQKGNELALPSKYVNFLYLASHYEKLKGSPEDNEQKQLFVEQHKHYLDEIIEQISEFSKRVILADANLDKVLSAYNKHRDKPIREQAENIIHLFTLTNLGAPAAFKYFDTTIDRKRYTSTKEVLDATLIHQSITGLYETRIDLSQLGGDGGGSSEAAAKGGSGGTLNIEDEYRLHETSKGPDVPLGSTWLSDFPQAWAETGGMGLAVRQAPLIIPLKATSTPVSIKQYPMSQEARLGIKPHIQRLLDQGILVPCQSPWNTPLLPVKKPGTNDYRPVQDLREVNKRVEDIHPTVPNPYNLLSGLPPSHQWYTVLDLKDAFFCLRLHPTSQSLFAFEWRDPEMGISGQLTWTRLPQGFKNSPTLFNEALHRDLADFRIQHPDLILLQYVDDLLLAATSELDCQQGTRALLQTLGDLGYRASAKKAQICQKQVKYLGYLLKEGQRWLTEARKETVMGQPTPKTPRQLREFLGKAGFCRLFIPGFAEMAAPLYPLTKPGTLFEWGPDQQKAYQEIKQALLTAPALGLPDLTKPFELFVDEKQGYAKGVLTQKLGPWRRPVAYLSKKLDPVAAGWPPCLRMVAAIAVLTKDAGKLTMGQPLVILAPHAVEALVKQPPDRWLSNARMTHYQALLLDTDRVQFGPIVALNPATLLPLPEEGLQHDCLDILAEAHGTRPDLTDQPLPDADHTWYTDGSSFLQEGQRKAGAAVTTETEVVWAKALPAGTSAQRAELIALTQALKMAEGKKLNVYTDSRYAFATAHIHGEIYRRRGWLTSEGKEIKNKDEILALLKALFLPKRLSIIHCPGHQKGNRAEARGNRMADQAAREVATRETPETSTLLAGKRTADGSEFEKRTADGSEFESPKKKAKVE

SEQ ID NO: 2554 - protein, 2094 aa, synthetic construct
MPAAKRVKLDGGDKKYSIGLDIGTNSVGWAVITDEYKVPSKKFKVLGNTDRHSIKKNLIGALLFDSGETAEATRLKRTARRRYTRRKNRICYLQEIFSNEMAKVDDSFFHRLEESFLVEEDKKHERHPIFGNIVDEVAYHEKYPTIYHLRKKLVDSTDKADLRLIYLALAHMIKFRGHFLIEGDLNPDNSDVDKLFIQLVQTYNQLFEENPINASGVDAKAILSARLSKSRRLENLIAQLPGEKKNGLFGNLIALSLGLTPNFKSNFDLAEDAKLQLSKDTYDDDLDNLLAQIGDQYADLFLAAKNLSDAILLSDILRVNTEITKAPLSASMIKRYDEHHQDLTLLKALVRQQLPEKYKEIFFDQSKNGYAGYIDGGASQEEFYKFIKPILEKMDGTEELLVKLNREDLLRKQRTFDNGSIPHQIHLGELHAILRRQEDFYPFLKDNREKIEKILTFRIPYYVGPLARGNSRFAWMTRKSEETITPWNFEEVVDKGASAQSFIERMTNFDKNLPNEKVLPKHSLLYEYFTVYNELTKVKYVTEGMRKPAFLSGEQKKAIVDLLFKTNRKVTVKQLKEDYFKKIECFDSVEISGVEDRFNASLGTYHDLLKIIKDKDFLDNEENEDILEDIVLTLTLFEDREMIEERLKTYAHLFDDKVMKQLKRRRYTGWGRLSRKLINGIRDKQSGKTILDFLKSDGFANRNFMQLIHDDSLTFKEDIQKAQVSGQGDSLHEHIANLAGSPAIKKGILQTVKVVDELVKVMGRHKPENIVIEMARENQTTQKGQKNSRERMKRIEEGIKELGSQILKEHPVENTQLQNEKLYLYYLQNGRDMYVDQELDINRLSDYDVDHIVPQSFLKDDSIDNKVLTRSDKARGKSDNVPSEEVVKKMKNYWRQLLNAKLITQRKFDNLTKAERGGLSELDKAGFIKRQLVETRQITKHVAQILDSRMNTKYDENDKLIREVKVITLKSKLVSDFRKDFQFYKVREINNYHHAHDAYLNAVVGTALIKKYPKLESEFVYGDYKVYDVRKMIAKSEQEIGKATAKYFFYSNIMNFFKTEITLANGEIRKRPLIETNGETGEIVWDKGRDFATVRKVLSMPQVNIVKKTEVQTGGFSKESILPKRNSDKLIARKKDWDPKKYGGFDSPTVAYSVLVVAKVEKGKSKKLKSVKELLGITIMERSSFEKNPIDFLEAKGYKEVKKDLIIKLPKYSLFELENGRKRMLASAGELQKGNELALPSKYVNFLYLASHYEKLKGSPEDNEQKQLFVEQHKHYLDEIIEQISEFSKRVILADANLDKVLSAYNKHRDKPIREQAENIIHLFTLTNLGAPAAFKYFDTTIDRKRYTSTKEVLDATLIHQSITGLYETRIDLSQLGGDGGGSSGGGPAPGGTLNIEDEYRLHETSKGPDVPLGSTWLSDFPQAWAETGGMGLAVRQAPLIIPLKATSTPVSIKQYPMSQEARLGIKPHIQRLLDQGILVPCQSPWNTPLLPVKKPGTNDYRPVQDLREVNKRVEDIHPTVPNPYNLLSGLPPSHQWYTVLDLKDAFFCLRLHPTSQSLFAFEWRDPEMGISGQLTWTRLPQGFKNSPTLFNEALHRDLADFRIQHPDLILLQYVDDLLLAATSELDCQQGTRALLQTLGDLGYRASAKKAQICQKQVKYLGYLLKEGQRWLTEARKETVMGQPTPKTPRQLREFLGKAGFCRLFIPGFAEMAAPLYPLTKPGTLFEWGPDQQKAYQEIKQALLTAPALGLPDLTKPFELFVDEKQGYAKGVLTQKLGPWRRPVAYLSKKLDPVAAGWPPCLRMVAAIAVLTKDAGKLTMGQPLVILAPHAVEALVKQPPDRWLSNARMTHYQALLLDTDRVQFGPIVALNPATLLPLPEEGLQHDCLDILAEAHGTRPDLTDQPLPDADHTWYTDGSSFLQEGQRKAGAAVTTETEVVWAKALPAGTSAQRAELIALTQALKMAEGKKLNVYTDSRYAFATAHIHGEIYRRRGWLTSEGKEIKNKDEILALLKALFLPKRLSIIHCPGHQKGNRAEARGNRMADQAAREVATRETPETSTLLAGKRTADGSEFEKRTADGSEFESPKKKAKVE

SEQ ID NO: 2555 - protein, 2100 aa, synthetic construct
MPAAKRVKLDGGDKKYSIGLDIGTNSVGWAVITDEYKVPSKKFKVLGNTDRHSIKKNLIGALLFDSGETAEATRLKRTARRRYTRRKNRICYLQEIFSNEMAKVDDSFFHRLEESFLVEEDKKHERHPIFGNIVDEVAYHEKYPTIYHLRKKLVDSTDKADLRLIYLALAHMIKFRGHFLIEGDLNPDNSDVDKLFIQLVQTYNQLFEENPINASGVDAKAILSARLSKSRRLENLIAQLPGEKKNGLFGNLIALSLGLTPNFKSNFDLAEDAKLQLSKDTYDDDLDNLLAQIGDQYADLFLAAKNLSDAILLSDILRVNTEITKAPLSASMIKRYDEHHQDLTLLKALVRQQLPEKYKEIFFDQSKNGYAGYIDGGASQEEFYKFIKPILEKMDGTEELLVKLNREDLLRKQRTFDNGSIPHQIHLGELHAILRRQEDFYPFLKDNREKIEKILTFRIPYYVGPLARGNSRFAWMTRKSEETITPWNFEEVVDKGASAQSFIERMTNFDKNLPNEKVLPKHSLLYEYFTVYNELTKVKYVTEGMRKPAFLSGEQKKAIVDLLFKTNRKVTVKQLKEDYFKKIECFDSVEISGVEDRFNASLGTYHDLLKIIKDKDFLDNEENEDILEDIVLTLTLFEDREMIEERLKTYAHLFDDKVMKQLKRRRYTGWGRLSRKLINGIRDKQSGKTILDFLKSDGFANRNFMQLIHDDSLTFKEDIQKAQVSGQGDSLHEHIANLAGSPAIKKGILQTVKVVDELVKVMGRHKPENIVIEMARENQTTQKGQKNSRERMKRIEEGIKELGSQILKEHPVENTQLQNEKLYLYYLQNGRDMYVDQELDINRLSDYDVDHIVPQSFLKDDSIDNKVLTRSDKARGKSDNVPSEEVVKKMKNYWRQLLNAKLITQRKFDNLTKAERGGLSELDKAGFIKRQLVETRQITKHVAQILDSRMNTKYDENDKLIREVKVITLKSKLVSDFRKDFQFYKVREINNYHHAHDAYLNAVVGTALIKKYPKLESEFVYGDYKVYDVRKMIAKSEQEIGKATAKYFFYSNIMNFFKTEITLANGEIRKRPLIETNGETGEIVWDKGRDFATVRKVLSMPQVNIVKKTEVQTGGFSKESILPKRNSDKLIARKKDWDPKKYGGFDSPTVAYSVLVVAKVEKGKSKKLKSVKELLGITIMERSSFEKNPIDFLEAKGYKEVKKDLIIKLPKYSLFELENGRKRMLASAGELQKGNELALPSKYVNFLYLASHYEKLKGSPEDNEQKQLFVEQHKHYLDEIIEQISEFSKRVILADANLDKVLSAYNKHRDKPIREQAENIIHLFTLTNLGAPAAFKYFDTTIDRKRYTSTKEVLDATLIHQSITGLYETRIDLSQLGGDGGGGSGGSGGSGGSGGSGGTLNIEDEYRLHETSKGPDVPLGSTWLSDFPQAWAETGGMGLAVRQAPLIIPLKATSTPVSIKQYPMSQEARLGIKPHIQRLLDQGILVPCQSPWNTPLLPVKKPGTNDYRPVQDLREVNKRVEDIHPTVPNPYNLLSGLPPSHQWYTVLDLKDAFFCLRLHPTSQSLFAFEWRDPEMGISGQLTWTRLPQGFKNSPTLFNEALHRDLADFRIQHPDLILLQYVDDLLLAATSELDCQQGTRALLQTLGDLGYRASAKKAQICQKQVKYLGYLLKEGQRWLTEARKETVMGQPTPKTPRQLREFLGKAGFCRLFIPGFAEMAAPLYPLTKPGTLFEWGPDQQKAYQEIKQALLTAPALGLPDLTKPFELFVDEKQGYAKGVLTQKLGPWRRPVAYLSKKLDPVAAGWPPCLRMVAAIAVLTKDAGKLTMGQPLVILAPHAVEALVKQPPDRWLSNARMTHYQALLLDTDRVQFGPIVALNPATLLPLPEEGLQHDCLDILAEAHGTRPDLTDQPLPDADHTWYTDGSSFLQEGQRKAGAAVTTETEVVWAKALPAGTSAQRAELIALTQALKMAEGKKLNVYTDSRYAFATAHIHGEIYRRRGWLTSEGKEIKNKDEILALLKALFLPKRLSIIHCPGHQKGNRAEARGNRMADQAAREVATRETPETSTLLAGKRTADGSEFEKRTADGSEFESPKKKAKVE

SEQ ID NO: 2556 - protein, 2096 aa, synthetic construct
MPAAKRVKLDGGDKKYSIGLDIGTNSVGWAVITDEYKVPSKKFKVLGNTDRHSIKKNLIGALLFDSGETAEATRLKRTARRRYTRRKNRICYLQEIFSNEMAKVDDSFFHRLEESFLVEEDKKHERHPIFGNIVDEVAYHEKYPTIYHLRKKLVDSTDKADLRLIYLALAHMIKFRGHFLIEGDLNPDNSDVDKLFIQLVQTYNQLFEENPINASGVDAKAILSARLSKSRRLENLIAQLPGEKKNGLFGNLIALSLGLTPNFKSNFDLAEDAKLQLSKDTYDDDLDNLLAQIGDQYADLFLAAKNLSDAILLSDILRVNTEITKAPLSASMIKRYDEHHQDLTLLKALVRQQLPEKYKEIFFDQSKNGYAGYIDGGASQEEFYKFIKPILEKMDGTEELLVKLNREDLLRKQRTFDNGSIPHQIHLGELHAILRRQEDFYPFLKDNREKIEKILTFRIPYYVGPLARGNSRFAWMTRKSEETITPWNFEEVVDKGASAQSFIERMTNFDKNLPNEKVLPKHSLLYEYFTVYNELTKVKYVTEGMRKPAFLSGEQKKAIVDLLFKTNRKVTVKQLKEDYFKKIECFDSVEISGVEDRFNASLGTYHDLLKIIKDKDFLDNEENEDILEDIVLTLTLFEDREMIEERLKTYAHLFDDKVMKQLKRRRYTGWGRLSRKLINGIRDKQSGKTILDFLKSDGFANRNFMQLIHDDSLTFKEDIQKAQVSGQGDSLHEHIANLAGSPAIKKGILQTVKVVDELVKVMGRHKPENIVIEMARENQTTQKGQKNSRERMKRIEEGIKELGSQILKEHPVENTQLQNEKLYLYYLQNGRDMYVDQELDINRLSDYDVDHIVPQSFLKDDSIDNKVLTRSDKARGKSDNVPSEEVVKKMKNYWRQLLNAKLITQRKFDNLTKAERGGLSELDKAGFIKRQLVETRQITKHVAQILDSRMNTKYDENDKLIREVKVITLKSKLVSDFRKDFQFYKVREINNYHHAHDAYLNAVVGTALIKKYPKLESEFVYGDYKVYDVRKMIAKSEQEIGKATAKYFFYSNIMNFFKTEITLANGEIRKRPLIETNGETGEIVWDKGRDFATVRKVLSMPQVNIVKKTEVQTGGFSKESILPKRNSDKLIARKKDWDPKKYGGFDSPTVAYSVLVVAKVEKGKSKKLKSVKELLGITIMERSSFEKNPIDFLEAKGYKEVKKDLIIKLPKYSLFELENGRKRMLASAGELQKGNELALPSKYVNFLYLASHYEKLKGSPEDNEQKQLFVEQHKHYLDEIIEQISEFSKRVILADANLDKVLSAYNKHRDKPIREQAENIIHLFTLTNLGAPAAFKYFDTTIDRKRYTSTKEVLDATLIHQSITGLYETRIDLSQLGGDGGEAAAKGGGPAPGGTLNIEDEYRLHETSKGPDVPLGSTWLSDFPQAWAETGGMGLAVRQAPLIIPLKATSTPVSIKQYPMSQEARLGIKPHIQRLLDQGILVPCQSPWNTPLLPVKKPGTNDYRPVQDLREVNKRVEDIHPTVPNPYNLLSGLPPSHQWYTVLDLKDAFFCLRLHPTSQSLFAFEWRDPEMGISGQLTWTRLPQGFKNSPTLFNEALHRDLADFRIQHPDLILLQYVDDLLLAATSELDCQQGTRALLQTLGDLGYRASAKKAQICQKQVKYLGYLLKEGQRWLTEARKETVMGQPTPKTPRQLREFLGKAGFCRLFIPGFAEMAAPLYPLTKPGTLFEWGPDQQKAYQEIKQALLTAPALGLPDLTKPFELFVDEKQGYAKGVLTQKLGPWRRPVAYLSKKLDPVAAGWPPCLRMVAAIAVLTKDAGKLTMGQPLVILAPHAVEALVKQPPDRWLSNARMTHYQALLLDTDRVQFGPIVALNPATLLPLPEEGLQHDCLDILAEAHGTRPDLTDQPLPDADHTWYTDGSSFLQEGQRKAGAAVTTETEVVWAKALPAGTSAQRAELIALTQALKMAEGKKLNVYTDSRYAFATAHIHGEIYRRRGWLTSEGKEIKNKDEILALLKALFLPKRLSIIHCPGHQKGNRAEARGNRMADQAAREVATRETPETSTLLAGKRTADGSEFEKRTADGSEFESPKKKAKVE

SEQ ID NO: 2557 - protein, 2094 aa, synthetic construct
MPAAKRVKLDGGDKKYSIGLDIGTNSVGWAVITDEYKVPSKKFKVLGNTDRHSIKKNLIGALLFDSGETAEATRLKRTARRRYTRRKNRICYLQEIFSNEMAKVDDSFFHRLEESFLVEEDKKHERHPIFGNIVDEVAYHEKYPTIYHLRKKLVDSTDKADLRLIYLALAHMIKFRGHFLIEGDLNPDNSDVDKLFIQLVQTYNQLFEENPINASGVDAKAILSARLSKSRRLENLIAQLPGEKKNGLFGNLIALSLGLTPNFKSNFDLAEDAKLQLSKDTYDDDLDNLLAQIGDQYADLFLAAKNLSDAILLSDILRVNTEITKAPLSASMIKRYDEHHQDLTLLKALVRQQLPEKYKEIFFDQSKNGYAGYIDGGASQEEFYKFIKPILEKMDGTEELLVKLNREDLLRKQRTFDNGSIPHQIHLGELHAILRRQEDFYPFLKDNREKIEKILTFRIPYYVGPLARGNSRFAWMTRKSEETITPWNFEEVVDKGASAQSFIERMTNFDKNLPNEKVLPKHSLLYEYFTVYNELTKVKYVTEGMRKPAFLSGEQKKAIVDLLFKTNRKVTVKQLKEDYFKKIECFDSVEISGVEDRFNASLGTYHDLLKIIKDKDFLDNEENEDILEDIVLTLTLFEDREMIEERLKTYAHLFDDKVMKQLKRRRYTGWGRLSRKLINGIRDKQSGKTILDFLKSDGFANRNFMQLIHDDSLTFKEDIQKAQVSGQGDSLHEHIANLAGSPAIKKGILQTVKVVDELVKVMGRHKPENIVIEMARENQTTQKGQKNSRERMKRIEEGIKELGSQILKEHPVENTQLQNEKLYLYYLQNGRDMYVDQELDINRLSDYDVDHIVPQSFLKDDSIDNKVLTRSDKARGKSDNVPSEEVVKKMKNYWRQLLNAKLITQRKFDNLTKAERGGLSELDKAGFIKRQLVETRQITKHVAQILDSRMNTKYDENDKLIREVKVITLKSKLVSDFRKDFQFYKVREINNYHHAHDAYLNAVVGTALIKKYPKLESEFVYGDYKVYDVRKMIAKSEQEIGKATAKYFFYSNIMNFFKTEITLANGEIRKRPLIETNGETGEIVWDKGRDFATVRKVLSMPQVNIVKKTEVQTGGFSKESILPKRNSDKLIARKKDWDPKKYGGFDSPTVAYSVLVVAKVEKGKSKKLKSVKELLGITIMERSSFEKNPIDFLEAKGYKEVKKDLIIKLPKYSLFELENGRKRMLASAGELQKGNELALPSKYVNFLYLASHYEKLKGSPEDNEQKQLFVEQHKHYLDEIIEQISEFSKRVILADANLDKVLSAYNKHRDKPIREQAENIIHLFTLTNLGAPAAFKYFDTTIDRKRYTSTKEVLDATLIHQSITGLYETRIDLSQLGGDGGGSSGSSGSSGGTLNIEDEYRLHETSKGPDVPLGSTWLSDFPQAWAETGGMGLAVRQAPLIIPLKATSTPVSIKQYPMSQEARLGIKPHIQRLLDQGILVPCQSPWNTPLLPVKKPGTNDYRPVQDLREVNKRVEDIHPTVPNPYNLLSGLPPSHQWYTVLDLKDAFFCLRLHPTSQSLFAFEWRDPEMGISGQLTWTRLPQGFKNSPTLFNEALHRDLADFRIQHPDLILLQYVDDLLLAATSELDCQQGTRALLQTLGDLGYRASAKKAQICQKQVKYLGYLLKEGQRWLTEARKETVMGQPTPKTPRQLREFLGKAGFCRLFIPGFAEMAAPLYPLTKPGTLFEWGPDQQKAYQEIKQALLTAPALGLPDLTKPFELFVDEKQGYAKGVLTQKLGPWRRPVAYLSKKLDPVAAGWPPCLRMVAAIAVLTKDAGKLTMGQPLVILAPHAVEALVKQPPDRWLSNARMTHYQALLLDTDRVQFGPIVALNPATLLPLPEEGLQHDCLDILAEAHGTRPDLTDQPLPDADHTWYTDGSSFLQEGQRKAGAAVTTETEVVWAKALPAGTSAQRAELIALTQALKMAEGKKLNVYTDSRYAFATAHIHGEIYRRRGWLTSEGKEIKNKDEILALLKALFLPKRLSIIHCPGHQKGNRAEARGNRMADQAAREVATRETPETSTLLAGKRTADGSEFEKRTADGSEFESPKKKAKVE

SEQ ID NO: 2558 - protein, 2094 aa, synthetic construct
MPAAKRVKLDGGDKKYSIGLDIGTNSVGWAVITDEYKVPSKKFKVLGNTDRHSIKKNLIGALLFDSGETAEATRLKRTARRRYTRRKNRICYLQEIFSNEMAKVDDSFFHRLEESFLVEEDKKHERHPIFGNIVDEVAYHEKYPTIYHLRKKLVDSTDKADLRLIYLALAHMIKFRGHFLIEGDLNPDNSDVDKLFIQLVQTYNQLFEENPINASGVDAKAILSARLSKSRRLENLIAQLPGEKKNGLFGNLIALSLGLTPNFKSNFDLAEDAKLQLSKDTYDDDLDNLLAQIGDQYADLFLAAKNLSDAILLSDILRVNTEITKAPLSASMIKRYDEHHQDLTLLKALVRQQLPEKYKEIFFDQSKNGYAGYIDGGASQEEFYKFIKPILEKMDGTEELLVKLNREDLLRKQRTFDNGSIPHQIHLGELHAILRRQEDFYPFLKDNREKIEKILTFRIPYYVGPLARGNSRFAWMTRKSEETITPWNFEEVVDKGASAQSFIERMTNFDKNLPNEKVLPKHSLLYEYFTVYNELTKVKYVTEGMRKPAFLSGEQKKAIVDLLFKTNRKVTVKQLKEDYFKKIECFDSVEISGVEDRFNASLGTYHDLLKIIKDKDFLDNEENEDILEDIVLTLTLFEDREMIEERLKTYAHLFDDKVMKQLKRRRYTGWGRLSRKLINGIRDKQSGKTILDFLKSDGFANRNFMQLIHDDSLTFKEDIQKAQVSGQGDSLHEHIANLAGSPAIKKGILQTVKVVDELVKVMGRHKPENIVIEMARENQTTQKGQKNSRERMKRIEEGIKELGSQILKEHPVENTQLQNEKLYLYYLQNGRDMYVDQELDINRLSDYDVDHIVPQSFLKDDSIDNKVLTRSDKARGKSDNVPSEEVVKKMKNYWRQLLNAKLITQRKFDNLTKAERGGLSELDKAGFIKRQLVETRQITKHVAQILDSRMNTKYDENDKLIREVKVITLKSKLVSDFRKDFQFYKVREINNYHHAHDAYLNAVVGTALIKKYPKLESEFVYGDYKVYDVRKMIAKSEQEIGKATAKYFFYSNIMNFFKTEITLANGEIRKRPLIETNGETGEIVWDKGRDFATVRKVLSMPQVNIVKKTEVQTGGFSKESILPKRNSDKLIARKKDWDPKKYGGFDSPTVAYSVLVVAKVEKGKSKKLKSVKELLGITIMERSSFEKNPIDFLEAKGYKEVKKDLIIKLPKYSLFELENGRKRMLASAGELQKGNELALPSKYVNFLYLASHYEKLKGSPEDNEQKQLFVEQHKHYLDEIIEQISEFSKRVILADANLDKVLSAYNKHRDKPIREQAENIIHLFTLTNLGAPAAFKYFDTTIDRKRYTSTKEVLDATLIHQSITGLYETRIDLSQLGGDGGGGSGSSPAPGGTLNIEDEYRLHETSKGPDVPLGSTWLSDFPQAWAETGGMGLAVRQAPLIIPLKATSTPVSIKQYPMSQEARLGIKPHIQRLLDQGILVPCQSPWNTPLLPVKKPGTNDYRPVQDLREVNKRVEDIHPTVPNPYNLLSGLPPSHQWYTVLDLKDAFFCLRLHPTSQSLFAFEWRDPEMGISGQLTWTRLPQGFKNSPTLFNEALHRDLADFRIQHPDLILLQYVDDLLLAATSELDCQQGTRALLQTLGDLGYRASAKKAQICQKQVKYLGYLLKEGQRWLTEARKETVMGQPTPKTPRQLREFLGKAGFCRLFIPGFAEMAAPLYPLTKPGTLFEWGPDQQKAYQEIKQALLTAPALGLPDLTKPFELFVDEKQGYAKGVLTQKLGPWRRPVAYLSKKLDPVAAGWPPCLRMVAAIAVLTKDAGKLTMGQPLVILAPHAVEALVKQPPDRWLSNARMTHYQALLLDTDRVQFGPIVALNPATLLPLPEEGLQHDCLDILAEAHGTRPDLTDQPLPDADHTWYTDGSSFLQEGQRKAGAAVTTETEVVWAKALPAGTSAQRAELIALTQALKMAEGKKLNVYTDSRYAFATAHIHGEIYRRRGWLTSEGKEIKNKDEILALLKALFLPKRLSIIHCPGHQKGNRAEARGNRMADQAAREVATRETPETSTLLAGKRTADGSEFEKRTADGSEFESPKKKAKVE

SEQ ID NO: 2559 - protein, 2091 aa, synthetic construct
MPAAKRVKLDGGDKKYSIGLDIGTNSVGWAVITDEYKVPSKKFKVLGNTDRHSIKKNLIGALLFDSGETAEATRLKRTARRRYTRRKNRICYLQEIFSNEMAKVDDSFFHRLEESFLVEEDKKHERHPIFGNIVDEVAYHEKYPTIYHLRKKLVDSTDKADLRLIYLALAHMIKFRGHFLIEGDLNPDNSDVDKLFIQLVQTYNQLFEENPINASGVDAKAILSARLSKSRRLENLIAQLPGEKKNGLFGNLIALSLGLTPNFKSNFDLAEDAKLQLSKDTYDDDLDNLLAQIGDQYADLFLAAKNLSDAILLSDILRVNTEITKAPLSASMIKRYDEHHQDLTLLKALVRQQLPEKYKEIFFDQSKNGYAGYIDGGASQEEFYKFIKPILEKMDGTEELLVKLNREDLLRKQRTFDNGSIPHQIHLGELHAILRRQEDFYPFLKDNREKIEKILTFRIPYYVGPLARGNSRFAWMTRKSEETITPWNFEEVVDKGASAQSFIERMTNFDKNLPNEKVLPKHSLLYEYFTVYNELTKVKYVTEGMRKPAFLSGEQKKAIVDLLFKTNRKVTVKQLKEDYFKKIECFDSVEISGVEDRFNASLGTYHDLLKIIKDKDFLDNEENEDILEDIVLTLTLFEDREMIEERLKTYAHLFDDKVMKQLKRRRYTGWGRLSRKLINGIRDKQSGKTILDFLKSDGFANRNFMQLIHDDSLTFKEDIQKAQVSGQGDSLHEHIANLAGSPAIKKGILQTVKVVDELVKVMGRHKPENIVIEMARENQTTQKGQKNSRERMKRIEEGIKELGSQILKEHPVENTQLQNEKLYLYYLQNGRDMYVDQELDINRLSDYDVDHIVPQSFLKDDSIDNKVLTRSDKARGKSDNVPSEEVVKKMKNYWRQLLNAKLITQRKFDNLTKAERGGLSELDKAGFIKRQLVETRQITKHVAQILDSRMNTKYDENDKLIREVKVITLKSKLVSDFRKDFQFYKVREINNYHHAHDAYLNAVVGTALIKKYPKLESEFVYGDYKVYDVRKMIAKSEQEIGKATAKYFFYSNIMNFFKTEITLANGEIRKRPLIETNGETGEIVWDKGRDFATVRKVLSMPQVNIVKKTEVQTGGFSKESILPKRNSDKLIARKKDWDPKKYGGFDSPTVAYSVLVVAKVEKGKSKKLKSVKELLGITIMERSSFEKNPIDFLEAKGYKEVKKDLIIKLPKYSLFELENGRKRMLASAGELQKGNELALPSKYVNFLYLASHYEKLKGSPEDNEQKQLFVEQHKHYLDEIIEQISEFSKRVILADANLDKVLSAYNKHRDKPIREQAENIIHLFTLTNLGAPAAFKYFDTTIDRKRYTSTKEVLDATLIHQSITGLYETRIDLSQLGGDGGGGSGGGGGTLNIEDEYRLHETSKGPDVPLGSTWLSDFPQAWAETGGMGLAVRQAPLIIPLKATSTPVSIKQYPMSQEARLGIKPHIQRLLDQGILVPCQSPWNTPLLPVKKPGTNDYRPVQDLREVNKRVEDIHPTVPNPYNLLSGLPPSHQWYTVLDLKDAFFCLRLHPTSQSLFAFEWRDPEMGISGQLTWTRLPQGFKNSPTLFNEALHRDLADFRIQHPDLILLQYVDDLLLAATSELDCQQGTRALLQTLGDLGYRASAKKAQICQKQVKYLGYLLKEGQRWLTEARKETVMGQPTPKTPRQLREFLGKAGFCRLFIPGFAEMAAPLYPLTKPGTLFEWGPDQQKAYQEIKQALLTAPALGLPDLTKPFELFVDEKQGYAKGVLTQKLGPWRRPVAYLSKKLDPVAAGWPPCLRMVAAIAVLTKDAGKLTMGQPLVILAPHAVEALVKQPPDRWLSNARMTHYQALLLDTDRVQFGPIVALNPATLLPLPEEGLQHDCLDILAEAHGTRPDLTDQPLPDADHTWYTDGSSFLQEGQRKAGAAVTTETEVVWAKALPAGTSAQRAELIALTQALKMAEGKKLNVYTDSRYAFATAHIHGEIYRRRGWLTSEGKEIKNKDEILALLKALFLPKRLSIIHCPGHQKGNRAEARGNRMADQAAREVATRETPETSTLLAGKRTADGSEFEKRTADGSEFESPKKKAKVE

SEQ ID NO: 2560 - protein, 2092 aa, synthetic construct
MPAAKRVKLDGGDKKYSIGLDIGTNSVGWAVITDEYKVPSKKFKVLGNTDRHSIKKNLIGALLFDSGETAEATRLKRTARRRYTRRKNRICYLQEIFSNEMAKVDDSFFHRLEESFLVEEDKKHERHPIFGNIVDEVAYHEKYPTIYHLRKKLVDSTDKADLRLIYLALAHMIKFRGHFLIEGDLNPDNSDVDKLFIQLVQTYNQLFEENPINASGVDAKAILSARLSKSRRLENLIAQLPGEKKNGLFGNLIALSLGLTPNFKSNFDLAEDAKLQLSKDTYDDDLDNLLAQIGDQYADLFLAAKNLSDAILLSDILRVNTEITKAPLSASMIKRYDEHHQDLTLLKALVRQQLPEKYKEIFFDQSKNGYAGYIDGGASQEEFYKFIKPILEKMDGTEELLVKLNREDLLRKQRTFDNGSIPHQIHLGELHAILRRQEDFYPFLKDNREKIEKILTFRIPYYVGPLARGNSRFAWMTRKSEETITPWNFEEVVDKGASAQSFIERMTNFDKNLPNEKVLPKHSLLYEYFTVYNELTKVKYVTEGMRKPAFLSGEQKKAIVDLLFKTNRKVTVKQLKEDYFKKIECFDSVEISGVEDRFNASLGTYHDLLKIIKDKDFLDNEENEDILEDIVLTLTLFEDREMIEERLKTYAHLFDDKVMKQLKRRRYTGWGRLSRKLINGIRDKQSGKTILDFLKSDGFANRNFMQLIHDDSLTFKEDIQKAQVSGQGDSLHEHIANLAGSPAIKKGILQTVKVVDELVKVMGRHKPENIVIEMARENQTTQKGQKNSRERMKRIEEGIKELGSQILKEHPVENTQLQNEKLYLYYLQNGRDMYVDQELDINRLSDYDVDHIVPQSFLKDDSIDNKVLTRSDKARGKSDNVPSEEVVKKMKNYWRQLLNAKLITQRKFDNLTKAERGGLSELDKAGFIKRQLVETRQITKHVAQILDSRMNTKYDENDKLIREVKVITLKSKLVSDFRKDFQFYKVREINNYHHAHDAYLNAVVGTALIKKYPKLESEFVYGDYKVYDVRKMIAKSEQEIGKATAKYFFYSNIMNFFKTEITLANGEIRKRPLIETNGETGEIVWDKGRDFATVRKVLSMPQVNIVKKTEVQTGGFSKESILPKRNSDKLIARKKDWDPKKYGGFDSPTVAYSVLVVAKVEKGKSKKLKSVKELLGITIMERSSFEKNPIDFLEAKGYKEVKKDLIIKLPKYSLFELENGRKRMLASAGELQKGNELALPSKYVNFLYLASHYEKLKGSPEDNEQKQLFVEQHKHYLDEIIEQISEFSKRVILADANLDKVLSAYNKHRDKPIREQAENIIHLFTLTNLGAPAAFKYFDTTIDRKRYTSTKEVLDATLIHQSITGLYETRIDLSQLGGDGGGGGGGGGGGTLNIEDEYRLHETSKGPDVPLGSTWLSDFPQAWAETGGMGLAVRQAPLIIPLKATSTPVSIKQYPMSQEARLGIKPHIQRLLDQGILVPCQSPWNTPLLPVKKPGTNDYRPVQDLREVNKRVEDIHPTVPNPYNLLSGLPPSHQWYTVLDLKDAFFCLRLHPTSQSLFAFEWRDPEMGISGQLTWTRLPQGFKNSPTLFNEALHRDLADFRIQHPDLILLQYVDDLLLAATSELDCQQGTRALLQTLGDLGYRASAKKAQICQKQVKYLGYLLKEGQRWLTEARKETVMGQPTPKTPRQLREFLGKAGFCRLFIPGFAEMAAPLYPLTKPGTLFEWGPDQQKAYQEIKQALLTAPALGLPDLTKPFELFVDEKQGYAKGVLTQKLGPWRRPVAYLSKKLDPVAAGWPPCLRMVAAIAVLTKDAGKLTMGQPLVILAPHAVEALVKQPPDRWLSNARMTHYQALLLDTDRVQFGPIVALNPATLLPLPEEGLQHDCLDILAEAHGTRPDLTDQPLPDADHTWYTDGSSFLQEGQRKAGAAVTTETEVVWAKALPAGTSAQRAELIALTQALKMAEGKKLNVYTDSRYAFATAHIHGEIYRRRGWLTSEGKEIKNKDEILALLKALFLPKRLSIIHCPGHQKGNRAEARGNRMADQAAREVATRETPETSTLLAGKRTADGSEFEKRTADGSEFESPKKKAKVE

SEQ ID NO: 2561 - protein, 2100 aa, synthetic construct
MPAAKRVKLDGGDKKYSIGLDIGTNSVGWAVITDEYKVPSKKFKVLGNTDRHSIKKNLIGALLFDSGETAEATRLKRTARRRYTRRKNRICYLQEIFSNEMAKVDDSFFHRLEESFLVEEDKKHERHPIFGNIVDEVAYHEKYPTIYHLRKKLVDSTDKADLRLIYLALAHMIKFRGHFLIEGDLNPDNSDVDKLFIQLVQTYNQLFEENPINASGVDAKAILSARLSKSRRLENLIAQLPGEKKNGLFGNLIALSLGLTPNFKSNFDLAEDAKLQLSKDTYDDDLDNLLAQIGDQYADLFLAAKNLSDAILLSDILRVNTEITKAPLSASMIKRYDEHHQDLTLLKALVRQQLPEKYKEIFFDQSKNGYAGYIDGGASQEEFYKFIKPILEKMDGTEELLVKLNREDLLRKQRTFDNGSIPHQIHLGELHAILRRQEDFYPFLKDNREKIEKILTFRIPYYVGPLARGNSRFAWMTRKSEETITPWNFEEVVDKGASAQSFIERMTNFDKNLPNEKVLPKHSLLYEYFTVYNELTKVKYVTEGMRKPAFLSGEQKKAIVDLLFKTNRKVTVKQLKEDYFKKIECFDSVEISGVEDRFNASLGTYHDLLKIIKDKDFLDNEENEDILEDIVLTLTLFEDREMIEERLKTYAHLFDDKVMKQLKRRRYTGWGRLSRKLINGIRDKQSGKTILDFLKSDGFANRNFMQLIHDDSLTFKEDIQKAQVSGQGDSLHEHIANLAGSPAIKKGILQTVKVVDELVKVMGRHKPENIVIEMARENQTTQKGQKNSRERMKRIEEGIKELGSQILKEHPVENTQLQNEKLYLYYLQNGRDMYVDQELDINRLSDYDVDHIVPQSFLKDDSIDNKVLTRSDKARGKSDNVPSEEVVKKMKNYWRQLLNAKLITQRKFDNLTKAERGGLSELDKAGFIKRQLVETRQITKHVAQILDSRMNTKYDENDKLIREVKVITLKSKLVSDFRKDFQFYKVREINNYHHAHDAYLNAVVGTALIKKYPKLESEFVYGDYKVYDVRKMIAKSEQEIGKATAKYFFYSNIMNFFKTEITLANGEIRKRPLIETNGETGEIVWDKGRDFATVRKVLSMPQVNIVKKTEVQTGGFSKESILPKRNSDKLIARKKDWDPKKYGGFDSPTVAYSVLVVAKVEKGKSKKLKSVKELLGITIMERSSFEKNPIDFLEAKGYKEVKKDLIIKLPKYSLFELENGRKRMLASAGELQKGNELALPSKYVNFLYLASHYEKLKGSPEDNEQKQLFVEQHKHYLDEIIEQISEFSKRVILADANLDKVLSAYNKHRDKPIREQAENIIHLFTLTNLGAPAAFKYFDTTIDRKRYTSTKEVLDATLIHQSITGLYETRIDLSQLGGDGGEAAAKGGGGSEAAAKGGTLNIEDEYRLHETSKGPDVPLGSTWLSDFPQAWAETGGMGLAVRQAPLIIPLKATSTPVSIKQYPMSQEARLGIKPHIQRLLDQGILVPCQSPWNTPLLPVKKPGTNDYRPVQDLREVNKRVEDIHPTVPNPYNLLSGLPPSHQWYTVLDLKDAFFCLRLHPTSQSLFAFEWRDPEMGISGQLTWTRLPQGFKNSPTLFNEALHRDLADFRIQHPDLILLQYVDDLLLAATSELDCQQGTRALLQTLGDLGYRASAKKAQICQKQVKYLGYLLKEGQRWLTEARKETVMGQPTPKTPRQLREFLGKAGFCRLFIPGFAEMAAPLYPLTKPGTLFEWGPDQQKAYQEIKQALLTAPALGLPDLTKPFELFVDEKQGYAKGVLTQKLGPWRRPVAYLSKKLDPVAAGWPPCLRMVAAIAVLTKDAGKLTMGQPLVILAPHAVEALVKQPPDRWLSNARMTHYQALLLDTDRVQFGPIVALNPATLLPLPEEGLQHDCLDILAEAHGTRPDLTDQPLPDADHTWYTDGSSFLQEGQRKAGAAVTTETEVVWAKALPAGTSAQRAELIALTQALKMAEGKKLNVYTDSRYAFATAHIHGEIYRRRGWLTSEGKEIKNKDEILALLKALFLPKRLSIIHCPGHQKGNRAEARGNRMADQAAREVATRETPETSTLLAGKRTADGSEFEKRTADGSEFESPKKKAKVE

SEQ ID NO: 2562 - protein, 2091 aa, synthetic construct
MPAAKRVKLDGGDKKYSIGLDIGTNSVGWAVITDEYKVPSKKFKVLGNTDRHSIKKNLIGALLFDSGETAEATRLKRTARRRYTRRKNRICYLQEIFSNEMAKVDDSFFHRLEESFLVEEDKKHERHPIFGNIVDEVAYHEKYPTIYHLRKKLVDSTDKADLRLIYLALAHMIKFRGHFLIEGDLNPDNSDVDKLFIQLVQTYNQLFEENPINASGVDAKAILSARLSKSRRLENLIAQLPGEKKNGLFGNLIALSLGLTPNFKSNFDLAEDAKLQLSKDTYDDDLDNLLAQIGDQYADLFLAAKNLSDAILLSDILRVNTEITKAPLSASMIKRYDEHHQDLTLLKALVRQQLPEKYKEIFFDQSKNGYAGYIDGGASQEEFYKFIKPILEKMDGTEELLVKLNREDLLRKQRTFDNGSIPHQIHLGELHAILRRQEDFYPFLKDNREKIEKILTFRIPYYVGPLARGNSRFAWMTRKSEETITPWNFEEVVDKGASAQSFIERMTNFDKNLPNEKVLPKHSLLYEYFTVYNELTKVKYVTEGMRKPAFLSGEQKKAIVDLLFKTNRKVTVKQLKEDYFKKIECFDSVEISGVEDRFNASLGTYHDLLKIIKDKDFLDNEENEDILEDIVLTLTLFEDREMIEERLKTYAHLFDDKVMKQLKRRRYTGWGRLSRKLINGIRDKQSGKTILDFLKSDGFANRNFMQLIHDDSLTFKEDIQKAQVSGQGDSLHEHIANLAGSPAIKKGILQTVKVVDELVKVMGRHKPENIVIEMARENQTTQKGQKNSRERMKRIEEGIKELGSQILKEHPVENTQLQNEKLYLYYLQNGRDMYVDQELDINRLSDYDVDHIVPQSFLKDDSIDNKVLTRSDKARGKSDNVPSEEVVKKMKNYWRQLLNAKLITQRKFDNLTKAERGGLSELDKAGFIKRQLVETRQITKHVAQILDSRMNTKYDENDKLIREVKVITLKSKLVSDFRKDFQFYKVREINNYHHAHDAYLNAVVGTALIKKYPKLESEFVYGDYKVYDVRKMIAKSEQEIGKATAKYFFYSNIMNFFKTEITLANGEIRKRPLIETNGETGEIVWDKGRDFATVRKVLSMPQVNIVKKTEVQTGGFSKESILPKRNSDKLIARKKDWDPKKYGGFDSPTVAYSVLVVAKVEKGKSKKLKSVKELLGITIMERSSFEKNPIDFLEAKGYKEVKKDLIIKLPKYSLFELENGRKRMLASAGELQKGNELALPSKYVNFLYLASHYEKLKGSPEDNEQKQLFVEQHKHYLDEIIEQISEFSKRVILADANLDKVLSAYNKHRDKPIREQAENIIHLFTLTNLGAPAAFKYFDTTIDRKRYTSTKEVLDATLIHQSITGLYETRIDLSQLGGDGGGGGGGGGGTLNIEDEYRLHETSKGPDVPLGSTWLSDFPQAWAETGGMGLAVRQAPLIIPLKATSTPVSIKQYPMSQEARLGIKPHIQRLLDQGILVPCQSPWNTPLLPVKKPGTNDYRPVQDLREVNKRVEDIHPTVPNPYNLLSGLPPSHQWYTVLDLKDAFFCLRLHPTSQSLFAFEWRDPEMGISGQLTWTRLPQGFKNSPTLFNEALHRDLADFRIQHPDLILLQYVDDLLLAATSELDCQQGTRALLQTLGDLGYRASAKKAQICQKQVKYLGYLLKEGQRWLTEARKETVMGQPTPKTPRQLREFLGKAGFCRLFIPGFAEMAAPLYPLTKPGTLFEWGPDQQKAYQEIKQALLTAPALGLPDLTKPFELFVDEKQGYAKGVLTQKLGPWRRPVAYLSKKLDPVAAGWPPCLRMVAAIAVLTKDAGKLTMGQPLVILAPHAVEALVKQPPDRWLSNARMTHYQALLLDTDRVQFGPIVALNPATLLPLPEEGLQHDCLDILAEAHGTRPDLTDQPLPDADHTWYTDGSSFLQEGQRKAGAAVTTETEVVWAKALPAGTSAQRAELIALTQALKMAEGKKLNVYTDSRYAFATAHIHGEIYRRRGWLTSEGKEIKNKDEILALLKALFLPKRLSIIHCPGHQKGNRAEARGNRMADQAAREVATRETPETSTLLAGKRTADGSEFEKRTADGSEFESPKKKAKVE

SEQ ID NO: 2563 - protein, 2094 aa, synthetic construct
MPAAKRVKLDGGDKKYSIGLDIGTNSVGWAVITDEYKVPSKKFKVLGNTDRHSIKKNLIGALLFDSGETAEATRLKRTARRRYTRRKNRICYLQEIFSNEMAKVDDSFFHRLEESFLVEEDKKHERHPIFGNIVDEVAYHEKYPTIYHLRKKLVDSTDKADLRLIYLALAHMIKFRGHFLIEGDLNPDNSDVDKLFIQLVQTYNQLFEENPINASGVDAKAILSARLSKSRRLENLIAQLPGEKKNGLFGNLIALSLGLTPNFKSNFDLAEDAKLQLSKDTYDDDLDNLLAQIGDQYADLFLAAKNLSDAILLSDILRVNTEITKAPLSASMIKRYDEHHQDLTLLKALVRQQLPEKYKEIFFDQSKNGYAGYIDGGASQEEFYKFIKPILEKMDGTEELLVKLNREDLLRKQRTFDNGSIPHQIHLGELHAILRRQEDFYPFLKDNREKIEKILTFRIPYYVGPLARGNSRFAWMTRKSEETITPWNFEEVVDKGASAQSFIERMTNFDKNLPNEKVLPKHSLLYEYFTVYNELTKVKYVTEGMRKPAFLSGEQKKAIVDLLFKTNRKVTVKQLKEDYFKKIECFDSVEISGVEDRFNASLGTYHDLLKIIKDKDFLDNEENEDILEDIVLTLTLFEDREMIEERLKTYAHLFDDKVMKQLKRRRYTGWGRLSRKLINGIRDKQSGKTILDFLKSDGFANRNFMQLIHDDSLTFKEDIQKAQVSGQGDSLHEHIANLAGSPAIKKGILQTVKVVDELVKVMGRHKPENIVIEMARENQTTQKGQKNSRERMKRIEEGIKELGSQILKEHPVENTQLQNEKLYLYYLQNGRDMYVDQELDINRLSDYDVDHIVPQSFLKDDSIDNKVLTRSDKARGKSDNVPSEEVVKKMKNYWRQLLNAKLITQRKFDNLTKAERGGLSELDKAGFIKRQLVETRQITKHVAQILDSRMNTKYDENDKLIREVKVITLKSKLVSDFRKDFQFYKVREINNYHHAHDAYLNAVVGTALIKKYPKLESEFVYGDYKVYDVRKMIAKSEQEIGKATAKYFFYSNIMNFFKTEITLANGEIRKRPLIETNGETGEIVWDKGRDFATVRKVLSMPQVNIVKKTEVQTGGFSKESILPKRNSDKLIARKKDWDPKKYGGFDSPTVAYSVLVVAKVEKGKSKKLKSVKELLGITIMERSSFEKNPIDFLEAKGYKEVKKDLIIKLPKYSLFELENGRKRMLASAGELQKGNELALPSKYVNFLYLASHYEKLKGSPEDNEQKQLFVEQHKHYLDEIIEQISEFSKRVILADANLDKVLSAYNKHRDKPIREQAENIIHLFTLTNLGAPAAFKYFDTTIDRKRYTSTKEVLDATLIHQSITGLYETRIDLSQLGGDGGGGSPAPGSSGGTLNIEDEYRLHETSKGPDVPLGSTWLSDFPQAWAETGGMGLAVRQAPLIIPLKATSTPVSIKQYPMSQEARLGIKPHIQRLLDQGILVPCQSPWNTPLLPVKKPGTNDYRPVQDLREVNKRVEDIHPTVPNPYNLLSGLPPSHQWYTVLDLKDAFFCLRLHPTSQSLFAFEWRDPEMGISGQLTWTRLPQGFKNSPTLFNEALHRDLADFRIQHPDLILLQYVDDLLLAATSELDCQQGTRALLQTLGDLGYRASAKKAQICQKQVKYLGYLLKEGQRWLTEARKETVMGQPTPKTPRQLREFLGKAGFCRLFIPGFAEMAAPLYPLTKPGTLFEWGPDQQKAYQEIKQALLTAPALGLPDLTKPFELFVDEKQGYAKGVLTQKLGPWRRPVAYLSKKLDPVAAGWPPCLRMVAAIAVLTKDAGKLTMGQPLVILAPHAVEALVKQPPDRWLSNARMTHYQALLLDTDRVQFGPIVALNPATLLPLPEEGLQHDCLDILAEAHGTRPDLTDQPLPDADHTWYTDGSSFLQEGQRKAGAAVTTETEVVWAKALPAGTSAQRAELIALTQALKMAEGKKLNVYTDSRYAFATAHIHGEIYRRRGWLTSEGKEIKNKDEILALLKALFLPKRLSIIHCPGHQKGNRAEARGNRMADQAAREVATRETPETSTLLAGKRTADGSEFEKRTADGSEFESPKKKAKVE

SEQ ID NO: 2564 - protein, 2096 aa, synthetic construct
MPAAKRVKLDGGDKKYSIGLDIGTNSVGWAVITDEYKVPSKKFKVLGNTDRHSIKKNLIGALLFDSGETAEATRLKRTARRRYTRRKNRICYLQEIFSNEMAKVDDSFFHRLEESFLVEEDKKHERHPIFGNIVDEVAYHEKYPTIYHLRKKLVDSTDKADLRLIYLALAHMIKFRGHFLIEGDLNPDNSDVDKLFIQLVQTYNQLFEENPINASGVDAKAILSARLSKSRRLENLIAQLPGEKKNGLFGNLIALSLGLTPNFKSNFDLAEDAKLQLSKDTYDDDLDNLLAQIGDQYADLFLAAKNLSDAILLSDILRVNTEITKAPLSASMIKRYDEHHQDLTLLKALVRQQLPEKYKEIFFDQSKNGYAGYIDGGASQEEFYKFIKPILEKMDGTEELLVKLNREDLLRKQRTFDNGSIPHQIHLGELHAILRRQEDFYPFLKDNREKIEKILTFRIPYYVGPLARGNSRFAWMTRKSEETITPWNFEEVVDKGASAQSFIERMTNFDKNLPNEKVLPKHSLLYEYFTVYNELTKVKYVTEGMRKPAFLSGEQKKAIVDLLFKTNRKVTVKQLKEDYFKKIECFDSVEISGVEDRFNASLGTYHDLLKIIKDKDFLDNEENEDILEDIVLTLTLFEDREMIEERLKTYAHLFDDKVMKQLKRRRYTGWGRLSRKLINGIRDKQSGKTILDFLKSDGFANRNFMQLIHDDSLTFKEDIQKAQVSGQGDSLHEHIANLAGSPAIKKGILQTVKVVDELVKVMGRHKPENIVIEMARENQTTQKGQKNSRERMKRIEEGIKELGSQILKEHPVENTQLQNEKLYLYYLQNGRDMYVDQELDINRLSDYDVDHIVPQSFLKDDSIDNKVLTRSDKARGKSDNVPSEEVVKKMKNYWRQLLNAKLITQRKFDNLTKAERGGLSELDKAGFIKRQLVETRQITKHVAQILDSRMNTKYDENDKLIREVKVITLKSKLVSDFRKDFQFYKVREINNYHHAHDAYLNAVVGTALIKKYPKLESEFVYGDYKVYDVRKMIAKSEQEIGKATAKYFFYSNIMNFFKTEITLANGEIRKRPLIETNGETGEIVWDKGRDFATVRKVLSMPQVNIVKKTEVQTGGFSKESILPKRNSDKLIARKKDWDPKKYGGFDSPTVAYSVLVVAKVEKGKSKKLKSVKELLGITIMERSSFEKNPIDFLEAKGYKEVKKDLIIKLPKYSLFELENGRKRMLASAGELQKGNELALPSKYVNFLYLASHYEKLKGSPEDNEQKQLFVEQHKHYLDEIIEQISEFSKRVILADANLDKVLSAYNKHRDKPIREQAENIIHLFTLTNLGAPAAFKYFDTTIDRKRYTSTKEVLDATLIHQSITGLYETRIDLSQLGGDGGPAPGGSEAAAKGGTLNIEDEYRLHETSKGPDVPLGSTWLSDFPQAWAETGGMGLAVRQAPLIIPLKATSTPVSIKQYPMSQEARLGIKPHIQRLLDQGILVPCQSPWNTPLLPVKKPGTNDYRPVQDLREVNKRVEDIHPTVPNPYNLLSGLPPSHQWYTVLDLKDAFFCLRLHPTSQSLFAFEWRDPEMGISGQLTWTRLPQGFKNSPTLFNEALHRDLADFRIQHPDLILLQYVDDLLLAATSELDCQQGTRALLQTLGDLGYRASAKKAQICQKQVKYLGYLLKEGQRWLTEARKETVMGQPTPKTPRQLREFLGKAGFCRLFIPGFAEMAAPLYPLTKPGTLFEWGPDQQKAYQEIKQALLTAPALGLPDLTKPFELFVDEKQGYAKGVLTQKLGPWRRPVAYLSKKLDPVAAGWPPCLRMVAAIAVLTKDAGKLTMGQPLVILAPHAVEALVKQPPDRWLSNARMTHYQALLLDTDRVQFGPIVALNPATLLPLPEEGLQHDCLDILAEAHGTRPDLTDQPLPDADHTWYTDGSSFLQEGQRKAGAAVTTETEVVWAKALPAGTSAQRAELIALTQALKMAEGKKLNVYTDSRYAFATAHIHGEIYRRRGWLTSEGKEIKNKDEILALLKALFLPKRLSIIHCPGHQKGNRAEARGNRMADQAAREVATRETPETSTLLAGKRTADGSEFEKRTADGSEFESPKKKAKVE

SEQ ID NO: 2565 - protein, 2094 aa, synthetic construct
MPAAKRVKLDGGDKKYSIGLDIGTNSVGWAVITDEYKVPSKKFKVLGNTDRHSIKKNLIGALLFDSGETAEATRLKRTARRRYTRRKNRICYLQEIFSNEMAKVDDSFFHRLEESFLVEEDKKHERHPIFGNIVDEVAYHEKYPTIYHLRKKLVDSTDKADLRLIYLALAHMIKFRGHFLIEGDLNPDNSDVDKLFIQLVQTYNQLFEENPINASGVDAKAILSARLSKSRRLENLIAQLPGEKKNGLFGNLIALSLGLTPNFKSNFDLAEDAKLQLSKDTYDDDLDNLLAQIGDQYADLFLAAKNLSDAILLSDILRVNTEITKAPLSASMIKRYDEHHQDLTLLKALVRQQLPEKYKEIFFDQSKNGYAGYIDGGASQEEFYKFIKPILEKMDGTEELLVKLNREDLLRKQRTFDNGSIPHQIHLGELHAILRRQEDFYPFLKDNREKIEKILTFRIPYYVGPLARGNSRFAWMTRKSEETITPWNFEEVVDKGASAQSFIERMTNFDKNLPNEKVLPKHSLLYEYFTVYNELTKVKYVTEGMRKPAFLSGEQKKAIVDLLFKTNRKVTVKQLKEDYFKKIECFDSVEISGVEDRFNASLGTYHDLLKIIKDKDFLDNEENEDILEDIVLTLTLFEDREMIEERLKTYAHLFDDKVMKQLKRRRYTGWGRLSRKLINGIRDKQSGKTILDFLKSDGFANRNFMQLIHDDSLTFKEDIQKAQVSGQGDSLHEHIANLAGSPAIKKGILQTVKVVDELVKVMGRHKPENIVIEMARENQTTQKGQKNSRERMKRIEEGIKELGSQILKEHPVENTQLQNEKLYLYYLQNGRDMYVDQELDINRLSDYDVDHIVPQSFLKDDSIDNKVLTRSDKARGKSDNVPSEEVVKKMKNYWRQLLNAKLITQRKFDNLTKAERGGLSELDKAGFIKRQLVETRQITKHVAQILDSRMNTKYDENDKLIREVKVITLKSKLVSDFRKDFQFYKVREINNYHHAHDAYLNAVVGTALIKKYPKLESEFVYGDYKVYDVRKMIAKSEQEIGKATAKYFFYSNIMNFFKTEITLANGEIRKRPLIETNGETGEIVWDKGRDFATVRKVLSMPQVNIVKKTEVQTGGFSKESILPKRNSDKLIARKKDWDPKKYGGFDSPTVAYSVLVVAKVEKGKSKKLKSVKELLGITIMERSSFEKNPIDFLEAKGYKEVKKDLIIKLPKYSLFELENGRKRMLASAGELQKGNELALPSKYVNFLYLASHYEKLKGSPEDNEQKQLFVEQHKHYLDEIIEQISEFSKRVILADANLDKVLSAYNKHRDKPIREQAENIIHLFTLTNLGAPAAFKYFDTTIDRKRYTSTKEVLDATLIHQSITGLYETRIDLSQLGGDGGGSSGGGGGSGGTLNIEDEYRLHETSKGPDVPLGSTWLSDFPQAWAETGGMGLAVRQAPLIIPLKATSTPVSIKQYPMSQEARLGIKPHIQRLLDQGILVPCQSPWNTPLLPVKKPGTNDYRPVQDLREVNKRVEDIHPTVPNPYNLLSGLPPSHQWYTVLDLKDAFFCLRLHPTSQSLFAFEWRDPEMGISGQLTWTRLPQGFKNSPTLFNEALHRDLADFRIQHPDLILLQYVDDLLLAATSELDCQQGTRALLQTLGDLGYRASAKKAQICQKQVKYLGYLLKEGQRWLTEARKETVMGQPTPKTPRQLREFLGKAGFCRLFIPGFAEMAAPLYPLTKPGTLFEWGPDQQKAYQEIKQALLTAPALGLPDLTKPFELFVDEKQGYAKGVLTQKLGPWRRPVAYLSKKLDPVAAGWPPCLRMVAAIAVLTKDAGKLTMGQPLVILAPHAVEALVKQPPDRWLSNARMTHYQALLLDTDRVQFGPIVALNPATLLPLPEEGLQHDCLDILAEAHGTRPDLTDQPLPDADHTWYTDGSSFLQEGQRKAGAAVTTETEVVWAKALPAGTSAQRAELIALTQALKMAEGKKLNVYTDSRYAFATAHIHGEIYRRRGWLTSEGKEIKNKDEILALLKALFLPKRLSIIHCPGHQKGNRAEARGNRMADQAAREVATRETPETSTLLAGKRTADGSEFEKRTADGSEFESPKKKAKVE

SEQ ID NO: 2566 - protein, 2115 aa, synthetic construct
MPAAKRVKLDGGDKKYSIGLDIGTNSVGWAVITDEYKVPSKKFKVLGNTDRHSIKKNLIGALLFDSGETAEATRLKRTARRRYTRRKNRICYLQEIFSNEMAKVDDSFFHRLEESFLVEEDKKHERHPIFGNIVDEVAYHEKYPTIYHLRKKLVDSTDKADLRLIYLALAHMIKFRGHFLIEGDLNPDNSDVDKLFIQLVQTYNQLFEENPINASGVDAKAILSARLSKSRRLENLIAQLPGEKKNGLFGNLIALSLGLTPNFKSNFDLAEDAKLQLSKDTYDDDLDNLLAQIGDQYADLFLAAKNLSDAILLSDILRVNTEITKAPLSASMIKRYDEHHQDLTLLKALVRQQLPEKYKEIFFDQSKNGYAGYIDGGASQEEFYKFIKPILEKMDGTEELLVKLNREDLLRKQRTFDNGSIPHQIHLGELHAILRRQEDFYPFLKDNREKIEKILTFRIPYYVGPLARGNSRFAWMTRKSEETITPWNFEEVVDKGASAQSFIERMTNFDKNLPNEKVLPKHSLLYEYFTVYNELTKVKYVTEGMRKPAFLSGEQKKAIVDLLFKTNRKVTVKQLKEDYFKKIECFDSVEISGVEDRFNASLGTYHDLLKIIKDKDFLDNEENEDILEDIVLTLTLFEDREMIEERLKTYAHLFDDKVMKQLKRRRYTGWGRLSRKLINGIRDKQSGKTILDFLKSDGFANRNFMQLIHDDSLTFKEDIQKAQVSGQGDSLHEHIANLAGSPAIKKGILQTVKVVDELVKVMGRHKPENIVIEMARENQTTQKGQKNSRERMKRIEEGIKELGSQILKEHPVENTQLQNEKLYLYYLQNGRDMYVDQELDINRLSDYDVDHIVPQSFLKDDSIDNKVLTRSDKARGKSDNVPSEEVVKKMKNYWRQLLNAKLITQRKFDNLTKAERGGLSELDKAGFIKRQLVETRQITKHVAQILDSRMNTKYDENDKLIREVKVITLKSKLVSDFRKDFQFYKVREINNYHHAHDAYLNAVVGTALIKKYPKLESEFVYGDYKVYDVRKMIAKSEQEIGKATAKYFFYSNIMNFFKTEITLANGEIRKRPLIETNGETGEIVWDKGRDFATVRKVLSMPQVNIVKKTEVQTGGFSKESILPKRNSDKLIARKKDWDPKKYGGFDSPTVAYSVLVVAKVEKGKSKKLKSVKELLGITIMERSSFEKNPIDFLEAKGYKEVKKDLIIKLPKYSLFELENGRKRMLASAGELQKGNELALPSKYVNFLYLASHYEKLKGSPEDNEQKQLFVEQHKHYLDEIIEQISEFSKRVILADANLDKVLSAYNKHRDKPIREQAENIIHLFTLTNLGAPAAFKYFDTTIDRKRYTSTKEVLDATLIHQSITGLYETRIDLSQLGGDGGGGGGSGGGGSGGGGSGGGGSGGGGSGGGGSGGTLNIEDEYRLHETSKGPDVPLGSTWLSDFPQAWAETGGMGLAVRQAPLIIPLKATSTPVSIKQYPMSQEARLGIKPHIQRLLDQGILVPCQSPWNTPLLPVKKPGTNDYRPVQDLREVNKRVEDIHPTVPNPYNLLSGLPPSHQWYTVLDLKDAFFCLRLHPTSQSLFAFEWRDPEMGISGQLTWTRLPQGFKNSPTLFNEALHRDLADFRIQHPDLILLQYVDDLLLAATSELDCQQGTRALLQTLGDLGYRASAKKAQICQKQVKYLGYLLKEGQRWLTEARKETVMGQPTPKTPRQLREFLGKAGFCRLFIPGFAEMAAPLYPLTKPGTLFEWGPDQQKAYQEIKQALLTAPALGLPDLTKPFELFVDEKQGYAKGVLTQKLGPWRRPVAYLSKKLDPVAAGWPPCLRMVAAIAVLTKDAGKLTMGQPLVILAPHAVEALVKQPPDRWLSNARMTHYQALLLDTDRVQFGPIVALNPATLLPLPEEGLQHDCLDILAEAHGTRPDLTDQPLPDADHTWYTDGSSFLQEGQRKAGAAVTTETEVVWAKALPAGTSAQRAELIALTQALKMAEGKKLNVYTDSRYAFATAHIHGEIYRRRGWLTSEGKEIKNKDEILALLKALFLPKRLSIIHCPGHQKGNRAEARGNRMADQAAREVATRETPETSTLLAGKRTADGSEFEKRTADGSEFESPKKKAKVE

SEQ ID NO: 2567 - protein, 2094 aa, synthetic construct
MPAAKRVKLDGGDKKYSIGLDIGTNSVGWAVITDEYKVPSKKFKVLGNTDRHSIKKNLIGALLFDSGETAEATRLKRTARRRYTRRKNRICYLQEIFSNEMAKVDDSFFHRLEESFLVEEDKKHERHPIFGNIVDEVAYHEKYPTIYHLRKKLVDSTDKADLRLIYLALAHMIKFRGHFLIEGDLNPDNSDVDKLFIQLVQTYNQLFEENPINASGVDAKAILSARLSKSRRLENLIAQLPGEKKNGLFGNLIALSLGLTPNFKSNFDLAEDAKLQLSKDTYDDDLDNLLAQIGDQYADLFLAAKNLSDAILLSDILRVNTEITKAPLSASMIKRYDEHHQDLTLLKALVRQQLPEKYKEIFFDQSKNGYAGYIDGGASQEEFYKFIKPILEKMDGTEELLVKLNREDLLRKQRTFDNGSIPHQIHLGELHAILRRQEDFYPFLKDNREKIEKILTFRIPYYVGPLARGNSRFAWMTRKSEETITPWNFEEVVDKGASAQSFIERMTNFDKNLPNEKVLPKHSLLYEYFTVYNELTKVKYVTEGMRKPAFLSGEQKKAIVDLLFKTNRKVTVKQLKEDYFKKIECFDSVEISGVEDRFNASLGTYHDLLKIIKDKDFLDNEENEDILEDIVLTLTLFEDREMIEERLKTYAHLFDDKVMKQLKRRRYTGWGRLSRKLINGIRDKQSGKTILDFLKSDGFANRNFMQLIHDDSLTFKEDIQKAQVSGQGDSLHEHIANLAGSPAIKKGILQTVKVVDELVKVMGRHKPENIVIEMARENQTTQKGQKNSRERMKRIEEGIKELGSQILKEHPVENTQLQNEKLYLYYLQNGRDMYVDQELDINRLSDYDVDHIVPQSFLKDDSIDNKVLTRSDKARGKSDNVPSEEVVKKMKNYWRQLLNAKLITQRKFDNLTKAERGGLSELDKAGFIKRQLVETRQITKHVAQILDSRMNTKYDENDKLIREVKVITLKSKLVSDFRKDFQFYKVREINNYHHAHDAYLNAVVGTALIKKYPKLESEFVYGDYKVYDVRKMIAKSEQEIGKATAKYFFYSNIMNFFKTEITLANGEIRKRPLIETNGETGEIVWDKGRDFATVRKVLSMPQVNIVKKTEVQTGGFSKESILPKRNSDKLIARKKDWDPKKYGGFDSPTVAYSVLVVAKVEKGKSKKLKSVKELLGITIMERSSFEKNPIDFLEAKGYKEVKKDLIIKLPKYSLFELENGRKRMLASAGELQKGNELALPSKYVNFLYLASHYEKLKGSPEDNEQKQLFVEQHKHYLDEIIEQISEFSKRVILADANLDKVLSAYNKHRDKPIREQAENIIHLFTLTNLGAPAAFKYFDTTIDRKRYTSTKEVLDATLIHQSITGLYETRIDLSQLGGDGGGSSGGSGGGGGTLNIEDEYRLHETSKGPDVPLGSTWLSDFPQAWAETGGMGLAVRQAPLIIPLKATSTPVSIKQYPMSQEARLGIKPHIQRLLDQGILVPCQSPWNTPLLPVKKPGTNDYRPVQDLREVNKRVEDIHPTVPNPYNLLSGLPPSHQWYTVLDLKDAFFCLRLHPTSQSLFAFEWRDPEMGISGQLTWTRLPQGFKNSPTLFNEALHRDLADFRIQHPDLILLQYVDDLLLAATSELDCQQGTRALLQTLGDLGYRASAKKAQICQKQVKYLGYLLKEGQRWLTEARKETVMGQPTPKTPRQLREFLGKAGFCRLFIPGFAEMAAPLYPLTKPGTLFEWGPDQQKAYQEIKQALLTAPALGLPDLTKPFELFVDEKQGYAKGVLTQKLGPWRRPVAYLSKKLDPVAAGWPPCLRMVAAIAVLTKDAGKLTMGQPLVILAPHAVEALVKQPPDRWLSNARMTHYQALLLDTDRVQFGPIVALNPATLLPLPEEGLQHDCLDILAEAHGTRPDLTDQPLPDADHTWYTDGSSFLQEGQRKAGAAVTTETEVVWAKALPAGTSAQRAELIALTQALKMAEGKKLNVYTDSRYAFATAHIHGEIYRRRGWLTSEGKEIKNKDEILALLKALFLPKRLSIIHCPGHQKGNRAEARGNRMADQAAREVATRETPETSTLLAGKRTADGSEFEKRTADGSEFESPKKKAKVE

SEQ ID NO: 2568 - protein, 2090 aa, synthetic construct
MPAAKRVKLDGGDKKYSIGLDIGTNSVGWAVITDEYKVPSKKFKVLGNTDRHSIKKNLIGALLFDSGETAEATRLKRTARRRYTRRKNRICYLQEIFSNEMAKVDDSFFHRLEESFLVEEDKKHERHPIFGNIVDEVAYHEKYPTIYHLRKKLVDSTDKADLRLIYLALAHMIKFRGHFLIEGDLNPDNSDVDKLFIQLVQTYNQLFEENPINASGVDAKAILSARLSKSRRLENLIAQLPGEKKNGLFGNLIALSLGLTPNFKSNFDLAEDAKLQLSKDTYDDDLDNLLAQIGDQYADLFLAAKNLSDAILLSDILRVNTEITKAPLSASMIKRYDEHHQDLTLLKALVRQQLPEKYKEIFFDQSKNGYAGYIDGGASQEEFYKFIKPILEKMDGTEELLVKLNREDLLRKQRTFDNGSIPHQIHLGELHAILRRQEDFYPFLKDNREKIEKILTFRIPYYVGPLARGNSRFAWMTRKSEETITPWNFEEVVDKGASAQSFIERMTNFDKNLPNEKVLPKHSLLYEYFTVYNELTKVKYVTEGMRKPAFLSGEQKKAIVDLLFKTNRKVTVKQLKEDYFKKIECFDSVEISGVEDRFNASLGTYHDLLKIIKDKDFLDNEENEDILEDIVLTLTLFEDREMIEERLKTYAHLFDDKVMKQLKRRRYTGWGRLSRKLINGIRDKQSGKTILDFLKSDGFANRNFMQLIHDDSLTFKEDIQKAQVSGQGDSLHEHIANLAGSPAIKKGILQTVKVVDELVKVMGRHKPENIVIEMARENQTTQKGQKNSRERMKRIEEGIKELGSQILKEHPVENTQLQNEKLYLYYLQNGRDMYVDQELDINRLSDYDVDHIVPQSFLKDDSIDNKVLTRSDKARGKSDNVPSEEVVKKMKNYWRQLLNAKLITQRKFDNLTKAERGGLSELDKAGFIKRQLVETRQITKHVAQILDSRMNTKYDENDKLIREVKVITLKSKLVSDFRKDFQFYKVREINNYHHAHDAYLNAVVGTALIKKYPKLESEFVYGDYKVYDVRKMIAKSEQEIGKATAKYFFYSNIMNFFKTEITLANGEIRKRPLIETNGETGEIVWDKGRDFATVRKVLSMPQVNIVKKTEVQTGGFSKESILPKRNSDKLIARKKDWDPKKYGGFDSPTVAYSVLVVAKVEKGKSKKLKSVKELLGITIMERSSFEKNPIDFLEAKGYKEVKKDLIIKLPKYSLFELENGRKRMLASAGELQKGNELALPSKYVNFLYLASHYEKLKGSPEDNEQKQLFVEQHKHYLDEIIEQISEFSKRVILADANLDKVLSAYNKHRDKPIREQAENIIHLFTLTNLGAPAAFKYFDTTIDRKRYTSTKEVLDATLIHQSITGLYETRIDLSQLGGDGGPAPAPGGTLNIEDEYRLHETSKGPDVPLGSTWLSDFPQAWAETGGMGLAVRQAPLIIPLKATSTPVSIKQYPMSQEARLGIKPHIQRLLDQGILVPCQSPWNTPLLPVKKPGTNDYRPVQDLREVNKRVEDIHPTVPNPYNLLSGLPPSHQWYTVLDLKDAFFCLRLHPTSQSLFAFEWRDPEMGISGQLTWTRLPQGFKNSPTLFNEALHRDLADFRIQHPDLILLQYVDDLLLAATSELDCQQGTRALLQTLGDLGYRASAKKAQICQKQVKYLGYLLKEGQRWLTEARKETVMGQPTPKTPRQLREFLGKAGFCRLFIPGFAEMAAPLYPLTKPGTLFEWGPDQQKAYQEIKQALLTAPALGLPDLTKPFELFVDEKQGYAKGVLTQKLGPWRRPVAYLSKKLDPVAAGWPPCLRMVAAIAVLTKDAGKLTMGQPLVILAPHAVEALVKQPPDRWLSNARMTHYQALLLDTDRVQFGPIVALNPATLLPLPEEGLQHDCLDILAEAHGTRPDLTDQPLPDADHTWYTDGSSFLQEGQRKAGAAVTTETEVVWAKALPAGTSAQRAELIALTQALKMAEGKKLNVYTDSRYAFATAHIHGEIYRRRGWLTSEGKEIKNKDEILALLKALFLPKRLSIIHCPGHQKGNRAEARGNRMADQAAREVATRETPETSTLLAGKRTADGSEFEKRTADGSEFESPKKKAKVE

SEQ ID NO: 2569 - protein, 2095 aa, synthetic construct
MPAAKRVKLDGGDKKYSIGLDIGTNSVGWAVITDEYKVPSKKFKVLGNTDRHSIKKNLIGALLFDSGETAEATRLKRTARRRYTRRKNRICYLQEIFSNEMAKVDDSFFHRLEESFLVEEDKKHERHPIFGNIVDEVAYHEKYPTIYHLRKKLVDSTDKADLRLIYLALAHMIKFRGHFLIEGDLNPDNSDVDKLFIQLVQTYNQLFEENPINASGVDAKAILSARLSKSRRLENLIAQLPGEKKNGLFGNLIALSLGLTPNFKSNFDLAEDAKLQLSKDTYDDDLDNLLAQIGDQYADLFLAAKNLSDAILLSDILRVNTEITKAPLSASMIKRYDEHHQDLTLLKALVRQQLPEKYKEIFFDQSKNGYAGYIDGGASQEEFYKFIKPILEKMDGTEELLVKLNREDLLRKQRTFDNGSIPHQIHLGELHAILRRQEDFYPFLKDNREKIEKILTFRIPYYVGPLARGNSRFAWMTRKSEETITPWNFEEVVDKGASAQSFIERMTNFDKNLPNEKVLPKHSLLYEYFTVYNELTKVKYVTEGMRKPAFLSGEQKKAIVDLLFKTNRKVTVKQLKEDYFKKIECFDSVEISGVEDRFNASLGTYHDLLKIIKDKDFLDNEENEDILEDIVLTLTLFEDREMIEERLKTYAHLFDDKVMKQLKRRRYTGWGRLSRKLINGIRDKQSGKTILDFLKSDGFANRNFMQLIHDDSLTFKEDIQKAQVSGQGDSLHEHIANLAGSPAIKKGILQTVKVVDELVKVMGRHKPENIVIEMARENQTTQKGQKNSRERMKRIEEGIKELGSQILKEHPVENTQLQNEKLYLYYLQNGRDMYVDQELDINRLSDYDVDHIVPQSFLKDDSIDNKVLTRSDKARGKSDNVPSEEVVKKMKNYWRQLLNAKLITQRKFDNLTKAERGGLSELDKAGFIKRQLVETRQITKHVAQILDSRMNTKYDENDKLIREVKVITLKSKLVSDFRKDFQFYKVREINNYHHAHDAYLNAVVGTALIKKYPKLESEFVYGDYKVYDVRKMIAKSEQEIGKATAKYFFYSNIMNFFKTEITLANGEIRKRPLIETNGETGEIVWDKGRDFATVRKVLSMPQVNIVKKTEVQTGGFSKESILPKRNSDKLIARKKDWDPKKYGGFDSPTVAYSVLVVAKVEKGKSKKLKSVKELLGITIMERSSFEKNPIDFLEAKGYKEVKKDLIIKLPKYSLFELENGRKRMLASAGELQKGNELALPSKYVNFLYLASHYEKLKGSPEDNEQKQLFVEQHKHYLDEIIEQISEFSKRVILADANLDKVLSAYNKHRDKPIREQAENIIHLFTLTNLGAPAAFKYFDTTIDRKRYTSTKEVLDATLIHQSITGLYETRIDLSQLGGDGGEAAAKEAAAKGGTLNIEDEYRLHETSKGPDVPLGSTWLSDFPQAWAETGGMGLAVRQAPLIIPLKATSTPVSIKQYPMSQEARLGIKPHIQRLLDQGILVPCQSPWNTPLLPVKKPGTNDYRPVQDLREVNKRVEDIHPTVPNPYNLLSGLPPSHQWYTVLDLKDAFFCLRLHPTSQSLFAFEWRDPEMGISGQLTWTRLPQGFKNSPTLFNEALHRDLADFRIQHPDLILLQYVDDLLLAATSELDCQQGTRALLQTLGDLGYRASAKKAQICQKQVKYLGYLLKEGQRWLTEARKETVMGQPTPKTPRQLREFLGKAGFCRLFIPGFAEMAAPLYPLTKPGTLFEWGPDQQKAYQEIKQALLTAPALGLPDLTKPFELFVDEKQGYAKGVLTQKLGPWRRPVAYLSKKLDPVAAGWPPCLRMVAAIAVLTKDAGKLTMGQPLVILAPHAVEALVKQPPDRWLSNARMTHYQALLLDTDRVQFGPIVALNPATLLPLPEEGLQHDCLDILAEAHGTRPDLTDQPLPDADHTWYTDGSSFLQEGQRKAGAAVTTETEVVWAKALPAGTSAQRAELIALTQALKMAEGKKLNVYTDSRYAFATAHIHGEIYRRRGWLTSEGKEIKNKDEILALLKALFLPKRLSIIHCPGHQKGNRAEARGNRMADQAAREVATRETPETSTLLAGKRTADGSEFEKRTADGSEFESPKKKAKVE

SEQ ID NO: 2570 - protein, 2096 aa, synthetic construct
MPAAKRVKLDGGDKKYSIGLDIGTNSVGWAVITDEYKVPSKKFKVLGNTDRHSIKKNLIGALLFDSGETAEATRLKRTARRRYTRRKNRICYLQEIFSNEMAKVDDSFFHRLEESFLVEEDKKHERHPIFGNIVDEVAYHEKYPTIYHLRKKLVDSTDKADLRLIYLALAHMIKFRGHFLIEGDLNPDNSDVDKLFIQLVQTYNQLFEENPINASGVDAKAILSARLSKSRRLENLIAQLPGEKKNGLFGNLIALSLGLTPNFKSNFDLAEDAKLQLSKDTYDDDLDNLLAQIGDQYADLFLAAKNLSDAILLSDILRVNTEITKAPLSASMIKRYDEHHQDLTLLKALVRQQLPEKYKEIFFDQSKNGYAGYIDGGASQEEFYKFIKPILEKMDGTEELLVKLNREDLLRKQRTFDNGSIPHQIHLGELHAILRRQEDFYPFLKDNREKIEKILTFRIPYYVGPLARGNSRFAWMTRKSEETITPWNFEEVVDKGASAQSFIERMTNFDKNLPNEKVLPKHSLLYEYFTVYNELTKVKYVTEGMRKPAFLSGEQKKAIVDLLFKTNRKVTVKQLKEDYFKKIECFDSVEISGVEDRFNASLGTYHDLLKIIKDKDFLDNEENEDILEDIVLTLTLFEDREMIEERLKTYAHLFDDKVMKQLKRRRYTGWGRLSRKLINGIRDKQSGKTILDFLKSDGFANRNFMQLIHDDSLTFKEDIQKAQVSGQGDSLHEHIANLAGSPAIKKGILQTVKVVDELVKVMGRHKPENIVIEMARENQTTQKGQKNSRERMKRIEEGIKELGSQILKEHPVENTQLQNEKLYLYYLQNGRDMYVDQELDINRLSDYDVDHIVPQSFLKDDSIDNKVLTRSDKARGKSDNVPSEEVVKKMKNYWRQLLNAKLITQRKFDNLTKAERGGLSELDKAGFIKRQLVETRQITKHVAQILDSRMNTKYDENDKLIREVKVITLKSKLVSDFRKDFQFYKVREINNYHHAHDAYLNAVVGTALIKKYPKLESEFVYGDYKVYDVRKMIAKSEQEIGKATAKYFFYSNIMNFFKTEITLANGEIRKRPLIETNGETGEIVWDKGRDFATVRKVLSMPQVNIVKKTEVQTGGFSKESILPKRNSDKLIARKKDWDPKKYGGFDSPTVAYSVLVVAKVEKGKSKKLKSVKELLGITIMERSSFEKNPIDFLEAKGYKEVKKDLIIKLPKYSLFELENGRKRMLASAGELQKGNELALPSKYVNFLYLASHYEKLKGSPEDNEQKQLFVEQHKHYLDEIIEQISEFSKRVILADANLDKVLSAYNKHRDKPIREQAENIIHLFTLTNLGAPAAFKYFDTTIDRKRYTSTKEVLDATLIHQSITGLYETRIDLSQLGGDGGGSSGGSEAAAKGGTLNIEDEYRLHETSKGPDVPLGSTWLSDFPQAWAETGGMGLAVRQAPLIIPLKATSTPVSIKQYPMSQEARLGIKPHIQRLLDQGILVPCQSPWNTPLLPVKKPGTNDYRPVQDLREVNKRVEDIHPTVPNPYNLLSGLPPSHQWYTVLDLKDAFFCLRLHPTSQSLFAFEWRDPEMGISGQLTWTRLPQGFKNSPTLFNEALHRDLADFRIQHPDLILLQYVDDLLLAATSELDCQQGTRALLQTLGDLGYRASAKKAQICQKQVKYLGYLLKEGQRWLTEARKETVMGQPTPKTPRQLREFLGKAGFCRLFIPGFAEMAAPLYPLTKPGTLFEWGPDQQKAYQEIKQALLTAPALGLPDLTKPFELFVDEKQGYAKGVLTQKLGPWRRPVAYLSKKLDPVAAGWPPCLRMVAAIAVLTKDAGKLTMGQPLVILAPHAVEALVKQPPDRWLSNARMTHYQALLLDTDRVQFGPIVALNPATLLPLPEEGLQHDCLDILAEAHGTRPDLTDQPLPDADHTWYTDGSSFLQEGQRKAGAAVTTETEVVWAKALPAGTSAQRAELIALTQALKMAEGKKLNVYTDSRYAFATAHIHGEIYRRRGWLTSEGKEIKNKDEILALLKALFLPKRLSIIHCPGHQKGNRAEARGNRMADQAAREVATRETPETSTLLAGKRTADGSEFEKRTADGSEFESPKKKAKVE

SEQ ID NO: 2571 - protein, 2094 aa, synthetic construct
MPAAKRVKLDGGDKKYSIGLDIGTNSVGWAVITDEYKVPSKKFKVLGNTDRHSIKKNLIGALLFDSGETAEATRLKRTARRRYTRRKNRICYLQEIFSNEMAKVDDSFFHRLEESFLVEEDKKHERHPIFGNIVDEVAYHEKYPTIYHLRKKLVDSTDKADLRLIYLALAHMIKFRGHFLIEGDLNPDNSDVDKLFIQLVQTYNQLFEENPINASGVDAKAILSARLSKSRRLENLIAQLPGEKKNGLFGNLIALSLGLTPNFKSNFDLAEDAKLQLSKDTYDDDLDNLLAQIGDQYADLFLAAKNLSDAILLSDILRVNTEITKAPLSASMIKRYDEHHQDLTLLKALVRQQLPEKYKEIFFDQSKNGYAGYIDGGASQEEFYKFIKPILEKMDGTEELLVKLNREDLLRKQRTFDNGSIPHQIHLGELHAILRRQEDFYPFLKDNREKIEKILTFRIPYYVGPLARGNSRFAWMTRKSEETITPWNFEEVVDKGASAQSFIERMTNFDKNLPNEKVLPKHSLLYEYFTVYNELTKVKYVTEGMRKPAFLSGEQKKAIVDLLFKTNRKVTVKQLKEDYFKKIECFDSVEISGVEDRFNASLGTYHDLLKIIKDKDFLDNEENEDILEDIVLTLTLFEDREMIEERLKTYAHLFDDKVMKQLKRRRYTGWGRLSRKLINGIRDKQSGKTILDFLKSDGFANRNFMQLIHDDSLTFKEDIQKAQVSGQGDSLHEHIANLAGSPAIKKGILQTVKVVDELVKVMGRHKPENIVIEMARENQTTQKGQKNSRERMKRIEEGIKELGSQILKEHPVENTQLQNEKLYLYYLQNGRDMYVDQELDINRLSDYDVDHIVPQSFLKDDSIDNKVLTRSDKARGKSDNVPSEEVVKKMKNYWRQLLNAKLITQRKFDNLTKAERGGLSELDKAGFIKRQLVETRQITKHVAQILDSRMNTKYDENDKLIREVKVITLKSKLVSDFRKDFQFYKVREINNYHHAHDAYLNAVVGTALIKKYPKLESEFVYGDYKVYDVRKMIAKSEQEIGKATAKYFFYSNIMNFFKTEITLANGEIRKRPLIETNGETGEIVWDKGRDFATVRKVLSMPQVNIVKKTEVQTGGFSKESILPKRNSDKLIARKKDWDPKKYGGFDSPTVAYSVLVVAKVEKGKSKKLKSVKELLGITIMERSSFEKNPIDFLEAKGYKEVKKDLIIKLPKYSLFELENGRKRMLASAGELQKGNELALPSKYVNFLYLASHYEKLKGSPEDNEQKQLFVEQHKHYLDEIIEQISEFSKRVILADANLDKVLSAYNKHRDKPIREQAENIIHLFTLTNLGAPAAFKYFDTTIDRKRYTSTKEVLDATLIHQSITGLYETRIDLSQLGGDGGGGGGSSGGSGGTLNIEDEYRLHETSKGPDVPLGSTWLSDFPQAWAETGGMGLAVRQAPLIIPLKATSTPVSIKQYPMSQEARLGIKPHIQRLLDQGILVPCQSPWNTPLLPVKKPGTNDYRPVQDLREVNKRVEDIHPTVPNPYNLLSGLPPSHQWYTVLDLKDAFFCLRLHPTSQSLFAFEWRDPEMGISGQLTWTRLPQGFKNSPTLFNEALHRDLADFRIQHPDLILLQYVDDLLLAATSELDCQQGTRALLQTLGDLGYRASAKKAQICQKQVKYLGYLLKEGQRWLTEARKETVMGQPTPKTPRQLREFLGKAGFCRLFIPGFAEMAAPLYPLTKPGTLFEWGPDQQKAYQEIKQALLTAPALGLPDLTKPFELFVDEKQGYAKGVLTQKLGPWRRPVAYLSKKLDPVAAGWPPCLRMVAAIAVLTKDAGKLTMGQPLVILAPHAVEALVKQPPDRWLSNARMTHYQALLLDTDRVQFGPIVALNPATLLPLPEEGLQHDCLDILAEAHGTRPDLTDQPLPDADHTWYTDGSSFLQEGQRKAGAAVTTETEVVWAKALPAGTSAQRAELIALTQALKMAEGKKLNVYTDSRYAFATAHIHGEIYRRRGWLTSEGKEIKNKDEILALLKALFLPKRLSIIHCPGHQKGNRAEARGNRMADQAAREVATRETPETSTLLAGKRTADGSEFEKRTADGSEFESPKKKAKVE

SEQ ID NO: 2572 - protein, 2091 aa, synthetic construct
MPAAKRVKLDGGDKKYSIGLDIGTNSVGWAVITDEYKVPSKKFKVLGNTDRHSIKKNLIGALLFDSGETAEATRLKRTARRRYTRRKNRICYLQEIFSNEMAKVDDSFFHRLEESFLVEEDKKHERHPIFGNIVDEVAYHEKYPTIYHLRKKLVDSTDKADLRLIYLALAHMIKFRGHFLIEGDLNPDNSDVDKLFIQLVQTYNQLFEENPINASGVDAKAILSARLSKSRRLENLIAQLPGEKKNGLFGNLIALSLGLTPNFKSNFDLAEDAKLQLSKDTYDDDLDNLLAQIGDQYADLFLAAKNLSDAILLSDILRVNTEITKAPLSASMIKRYDEHHQDLTLLKALVRQQLPEKYKEIFFDQSKNGYAGYIDGGASQEEFYKFIKPILEKMDGTEELLVKLNREDLLRKQRTFDNGSIPHQIHLGELHAILRRQEDFYPFLKDNREKIEKILTFRIPYYVGPLARGNSRFAWMTRKSEETITPWNFEEVVDKGASAQSFIERMTNFDKNLPNEKVLPKHSLLYEYFTVYNELTKVKYVTEGMRKPAFLSGEQKKAIVDLLFKTNRKVTVKQLKEDYFKKIECFDSVEISGVEDRFNASLGTYHDLLKIIKDKDFLDNEENEDILEDIVLTLTLFEDREMIEERLKTYAHLFDDKVMKQLKRRRYTGWGRLSRKLINGIRDKQSGKTILDFLKSDGFANRNFMQLIHDDSLTFKEDIQKAQVSGQGDSLHEHIANLAGSPAIKKGILQTVKVVDELVKVMGRHKPENIVIEMARENQTTQKGQKNSRERMKRIEEGIKELGSQILKEHPVENTQLQNEKLYLYYLQNGRDMYVDQELDINRLSDYDVDHIVPQSFLKDDSIDNKVLTRSDKARGKSDNVPSEEVVKKMKNYWRQLLNAKLITQRKFDNLTKAERGGLSELDKAGFIKRQLVETRQITKHVAQILDSRMNTKYDENDKLIREVKVITLKSKLVSDFRKDFQFYKVREINNYHHAHDAYLNAVVGTALIKKYPKLESEFVYGDYKVYDVRKMIAKSEQEIGKATAKYFFYSNIMNFFKTEITLANGEIRKRPLIETNGETGEIVWDKGRDFATVRKVLSMPQVNIVKKTEVQTGGFSKESILPKRNSDKLIARKKDWDPKKYGGFDSPTVAYSVLVVAKVEKGKSKKLKSVKELLGITIMERSSFEKNPIDFLEAKGYKEVKKDLIIKLPKYSLFELENGRKRMLASAGELQKGNELALPSKYVNFLYLASHYEKLKGSPEDNEQKQLFVEQHKHYLDEIIEQISEFSKRVILADANLDKVLSAYNKHRDKPIREQAENIIHLFTLTNLGAPAAFKYFDTTIDRKRYTSTKEVLDATLIHQSITGLYETRIDLSQLGGDGGGSSPAPGGTLNIEDEYRLHETSKGPDVPLGSTWLSDFPQAWAETGGMGLAVRQAPLIIPLKATSTPVSIKQYPMSQEARLGIKPHIQRLLDQGILVPCQSPWNTPLLPVKKPGTNDYRPVQDLREVNKRVEDIHPTVPNPYNLLSGLPPSHQWYTVLDLKDAFFCLRLHPTSQSLFAFEWRDPEMGISGQLTWTRLPQGFKNSPTLFNEALHRDLADFRIQHPDLILLQYVDDLLLAATSELDCQQGTRALLQTLGDLGYRASAKKAQICQKQVKYLGYLLKEGQRWLTEARKETVMGQPTPKTPRQLREFLGKAGFCRLFIPGFAEMAAPLYPLTKPGTLFEWGPDQQKAYQEIKQALLTAPALGLPDLTKPFELFVDEKQGYAKGVLTQKLGPWRRPVAYLSKKLDPVAAGWPPCLRMVAAIAVLTKDAGKLTMGQPLVILAPHAVEALVKQPPDRWLSNARMTHYQALLLDTDRVQFGPIVALNPATLLPLPEEGLQHDCLDILAEAHGTRPDLTDQPLPDADHTWYTDGSSFLQEGQRKAGAAVTTETEVVWAKALPAGTSAQRAELIALTQALKMAEGKKLNVYTDSRYAFATAHIHGEIYRRRGWLTSEGKEIKNKDEILALLKALFLPKRLSIIHCPGHQKGNRAEARGNRMADQAAREVATRETPETSTLLAGKRTADGSEFEKRTADGSEFESPKKKAKVE

SEQ ID NO: 2573 - protein, 2094 aa, synthetic construct
MPAAKRVKLDGGDKKYSIGLDIGTNSVGWAVITDEYKVPSKKFKVLGNTDRHSIKKNLIGALLFDSGETAEATRLKRTARRRYTRRKNRICYLQEIFSNEMAKVDDSFFHRLEESFLVEEDKKHERHPIFGNIVDEVAYHEKYPTIYHLRKKLVDSTDKADLRLIYLALAHMIKFRGHFLIEGDLNPDNSDVDKLFIQLVQTYNQLFEENPINASGVDAKAILSARLSKSRRLENLIAQLPGEKKNGLFGNLIALSLGLTPNFKSNFDLAEDAKLQLSKDTYDDDLDNLLAQIGDQYADLFLAAKNLSDAILLSDILRVNTEITKAPLSASMIKRYDEHHQDLTLLKALVRQQLPEKYKEIFFDQSKNGYAGYIDGGASQEEFYKFIKPILEKMDGTEELLVKLNREDLLRKQRTFDNGSIPHQIHLGELHAILRRQEDFYPFLKDNREKIEKILTFRIPYYVGPLARGNSRFAWMTRKSEETITPWNFEEVVDKGASAQSFIERMTNFDKNLPNEKVLPKHSLLYEYFTVYNELTKVKYVTEGMRKPAFLSGEQKKAIVDLLFKTNRKVTVKQLKEDYFKKIECFDSVEISGVEDRFNASLGTYHDLLKIIKDKDFLDNEENEDILEDIVLTLTLFEDREMIEERLKTYAHLFDDKVMKQLKRRRYTGWGRLSRKLINGIRDKQSGKTILDFLKSDGFANRNFMQLIHDDSLTFKEDIQKAQVSGQGDSLHEHIANLAGSPAIKKGILQTVKVVDELVKVMGRHKPENIVIEMARENQTTQKGQKNSRERMKRIEEGIKELGSQILKEHPVENTQLQNEKLYLYYLQNGRDMYVDQELDINRLSDYDVDHIVPQSFLKDDSIDNKVLTRSDKARGKSDNVPSEEVVKKMKNYWRQLLNAKLITQRKFDNLTKAERGGLSELDKAGFIKRQLVETRQITKHVAQILDSRMNTKYDENDKLIREVKVITLKSKLVSDFRKDFQFYKVREINNYHHAHDAYLNAVVGTALIKKYPKLESEFVYGDYKVYDVRKMIAKSEQEIGKATAKYFFYSNIMNFFKTEITLANGEIRKRPLIETNGETGEIVWDKGRDFATVRKVLSMPQVNIVKKTEVQTGGFSKESILPKRNSDKLIARKKDWDPKKYGGFDSPTVAYSVLVVAKVEKGKSKKLKSVKELLGITIMERSSFEKNPIDFLEAKGYKEVKKDLIIKLPKYSLFELENGRKRMLASAGELQKGNELALPSKYVNFLYLASHYEKLKGSPEDNEQKQLFVEQHKHYLDEIIEQISEFSKRVILADANLDKVLSAYNKHRDKPIREQAENIIHLFTLTNLGAPAAFKYFDTTIDRKRYTSTKEVLDATLIHQSITGLYETRIDLSQLGGDGGGGSPAPGGGGGTLNIEDEYRLHETSKGPDVPLGSTWLSDFPQAWAETGGMGLAVRQAPLIIPLKATSTPVSIKQYPMSQEARLGIKPHIQRLLDQGILVPCQSPWNTPLLPVKKPGTNDYRPVQDLREVNKRVEDIHPTVPNPYNLLSGLPPSHQWYTVLDLKDAFFCLRLHPTSQSLFAFEWRDPEMGISGQLTWTRLPQGFKNSPTLFNEALHRDLADFRIQHPDLILLQYVDDLLLAATSELDCQQGTRALLQTLGDLGYRASAKKAQICQKQVKYLGYLLKEGQRWLTEARKETVMGQPTPKTPRQLREFLGKAGFCRLFIPGFAEMAAPLYPLTKPGTLFEWGPDQQKAYQEIKQALLTAPALGLPDLTKPFELFVDEKQGYAKGVLTQKLGPWRRPVAYLSKKLDPVAAGWPPCLRMVAAIAVLTKDAGKLTMGQPLVILAPHAVEALVKQPPDRWLSNARMTHYQALLLDTDRVQFGPIVALNPATLLPLPEEGLQHDCLDILAEAHGTRPDLTDQPLPDADHTWYTDGSSFLQEGQRKAGAAVTTETEVVWAKALPAGTSAQRAELIALTQALKMAEGKKLNVYTDSRYAFATAHIHGEIYRRRGWLTSEGKEIKNKDEILALLKALFLPKRLSIIHCPGHQKGNRAEARGNRMADQAAREVATRETPETSTLLAGKRTADGSEFEKRTADGSEFESPKKKAKVE

SEQ ID NO: 2574 - protein, 2094 aa, synthetic construct
MPAAKRVKLDGGDKKYSIGLDIGTNSVGWAVITDEYKVPSKKFKVLGNTDRHSIKKNLIGALLFDSGETAEATRLKRTARRRYTRRKNRICYLQEIFSNEMAKVDDSFFHRLEESFLVEEDKKHERHPIFGNIVDEVAYHEKYPTIYHLRKKLVDSTDKADLRLIYLALAHMIKFRGHFLIEGDLNPDNSDVDKLFIQLVQTYNQLFEENPINASGVDAKAILSARLSKSRRLENLIAQLPGEKKNGLFGNLIALSLGLTPNFKSNFDLAEDAKLQLSKDTYDDDLDNLLAQIGDQYADLFLAAKNLSDAILLSDILRVNTEITKAPLSASMIKRYDEHHQDLTLLKALVRQQLPEKYKEIFFDQSKNGYAGYIDGGASQEEFYKFIKPILEKMDGTEELLVKLNREDLLRKQRTFDNGSIPHQIHLGELHAILRRQEDFYPFLKDNREKIEKILTFRIPYYVGPLARGNSRFAWMTRKSEETITPWNFEEVVDKGASAQSFIERMTNFDKNLPNEKVLPKHSLLYEYFTVYNELTKVKYVTEGMRKPAFLSGEQKKAIVDLLFKTNRKVTVKQLKEDYFKKIECFDSVEISGVEDRFNASLGTYHDLLKIIKDKDFLDNEENEDILEDIVLTLTLFEDREMIEERLKTYAHLFDDKVMKQLKRRRYTGWGRLSRKLINGIRDKQSGKTILDFLKSDGFANRNFMQLIHDDSLTFKEDIQKAQVSGQGDSLHEHIANLAGSPAIKKGILQTVKVVDELVKVMGRHKPENIVIEMARENQTTQKGQKNSRERMKRIEEGIKELGSQILKEHPVENTQLQNEKLYLYYLQNGRDMYVDQELDINRLSDYDVDHIVPQSFLKDDSIDNKVLTRSDKARGKSDNVPSEEVVKKMKNYWRQLLNAKLITQRKFDNLTKAERGGLSELDKAGFIKRQLVETRQITKHVAQILDSRMNTKYDENDKLIREVKVITLKSKLVSDFRKDFQFYKVREINNYHHAHDAYLNAVVGTALIKKYPKLESEFVYGDYKVYDVRKMIAKSEQEIGKATAKYFFYSNIMNFFKTEITLANGEIRKRPLIETNGETGEIVWDKGRDFATVRKVLSMPQVNIVKKTEVQTGGFSKESILPKRNSDKLIARKKDWDPKKYGGFDSPTVAYSVLVVAKVEKGKSKKLKSVKELLGITIMERSSFEKNPIDFLEAKGYKEVKKDLIIKLPKYSLFELENGRKRMLASAGELQKGNELALPSKYVNFLYLASHYEKLKGSPEDNEQKQLFVEQHKHYLDEIIEQISEFSKRVILADANLDKVLSAYNKHRDKPIREQAENIIHLFTLTNLGAPAAFKYFDTTIDRKRYTSTKEVLDATLIHQSITGLYETRIDLSQLGGDGGPAPGGSGGGGGTLNIEDEYRLHETSKGPDVPLGSTWLSDFPQAWAETGGMGLAVRQAPLIIPLKATSTPVSIKQYPMSQEARLGIKPHIQRLLDQGILVPCQSPWNTPLLPVKKPGTNDYRPVQDLREVNKRVEDIHPTVPNPYNLLSGLPPSHQWYTVLDLKDAFFCLRLHPTSQSLFAFEWRDPEMGISGQLTWTRLPQGFKNSPTLFNEALHRDLADFRIQHPDLILLQYVDDLLLAATSELDCQQGTRALLQTLGDLGYRASAKKAQICQKQVKYLGYLLKEGQRWLTEARKETVMGQPTPKTPRQLREFLGKAGFCRLFIPGFAEMAAPLYPLTKPGTLFEWGPDQQKAYQEIKQALLTAPALGLPDLTKPFELFVDEKQGYAKGVLTQKLGPWRRPVAYLSKKLDPVAAGWPPCLRMVAAIAVLTKDAGKLTMGQPLVILAPHAVEALVKQPPDRWLSNARMTHYQALLLDTDRVQFGPIVALNPATLLPLPEEGLQHDCLDILAEAHGTRPDLTDQPLPDADHTWYTDGSSFLQEGQRKAGAAVTTETEVVWAKALPAGTSAQRAELIALTQALKMAEGKKLNVYTDSRYAFATAHIHGEIYRRRGWLTSEGKEIKNKDEILALLKALFLPKRLSIIHCPGHQKGNRAEARGNRMADQAAREVATRETPETSTLLAGKRTADGSEFEKRTADGSEFESPKKKAKVE

SEQ ID NO: 2575 - protein, 2096 aa, synthetic construct
MPAAKRVKLDGGDKKYSIGLDIGTNSVGWAVITDEYKVPSKKFKVLGNTDRHSIKKNLIGALLFDSGETAEATRLKRTARRRYTRRKNRICYLQEIFSNEMAKVDDSFFHRLEESFLVEEDKKHERHPIFGNIVDEVAYHEKYPTIYHLRKKLVDSTDKADLRLIYLALAHMIKFRGHFLIEGDLNPDNSDVDKLFIQLVQTYNQLFEENPINASGVDAKAILSARLSKSRRLENLIAQLPGEKKNGLFGNLIALSLGLTPNFKSNFDLAEDAKLQLSKDTYDDDLDNLLAQIGDQYADLFLAAKNLSDAILLSDILRVNTEITKAPLSASMIKRYDEHHQDLTLLKALVRQQLPEKYKEIFFDQSKNGYAGYIDGGASQEEFYKFIKPILEKMDGTEELLVKLNREDLLRKQRTFDNGSIPHQIHLGELHAILRRQEDFYPFLKDNREKIEKILTFRIPYYVGPLARGNSRFAWMTRKSEETITPWNFEEVVDKGASAQSFIERMTNFDKNLPNEKVLPKHSLLYEYFTVYNELTKVKYVTEGMRKPAFLSGEQKKAIVDLLFKTNRKVTVKQLKEDYFKKIECFDSVEISGVEDRFNASLGTYHDLLKIIKDKDFLDNEENEDILEDIVLTLTLFEDREMIEERLKTYAHLFDDKVMKQLKRRRYTGWGRLSRKLINGIRDKQSGKTILDFLKSDGFANRNFMQLIHDDSLTFKEDIQKAQVSGQGDSLHEHIANLAGSPAIKKGILQTVKVVDELVKVMGRHKPENIVIEMARENQTTQKGQKNSRERMKRIEEGIKELGSQILKEHPVENTQLQNEKLYLYYLQNGRDMYVDQELDINRLSDYDVDHIVPQSFLKDDSIDNKVLTRSDKARGKSDNVPSEEVVKKMKNYWRQLLNAKLITQRKFDNLTKAERGGLSELDKAGFIKRQLVETRQITKHVAQILDSRMNTKYDENDKLIREVKVITLKSKLVSDFRKDFQFYKVREINNYHHAHDAYLNAVVGTALIKKYPKLESEFVYGDYKVYDVRKMIAKSEQEIGKATAKYFFYSNIMNFFKTEITLANGEIRKRPLIETNGETGEIVWDKGRDFATVRKVLSMPQVNIVKKTEVQTGGFSKESILPKRNSDKLIARKKDWDPKKYGGFDSPTVAYSVLVVAKVEKGKSKKLKSVKELLGITIMERSSFEKNPIDFLEAKGYKEVKKDLIIKLPKYSLFELENGRKRMLASAGELQKGNELALPSKYVNFLYLASHYEKLKGSPEDNEQKQLFVEQHKHYLDEIIEQISEFSKRVILADANLDKVLSAYNKHRDKPIREQAENIIHLFTLTNLGAPAAFKYFDTTIDRKRYTSTKEVLDATLIHQSITGLYETRIDLSQLGGDGGGGGGSSEAAAKGGTLNIEDEYRLHETSKGPDVPLGSTWLSDFPQAWAETGGMGLAVRQAPLIIPLKATSTPVSIKQYPMSQEARLGIKPHIQRLLDQGILVPCQSPWNTPLLPVKKPGTNDYRPVQDLREVNKRVEDIHPTVPNPYNLLSGLPPSHQWYTVLDLKDAFFCLRLHPTSQSLFAFEWRDPEMGISGQLTWTRLPQGFKNSPTLFNEALHRDLADFRIQHPDLILLQYVDDLLLAATSELDCQQGTRALLQTLGDLGYRASAKKAQICQKQVKYLGYLLKEGQRWLTEARKETVMGQPTPKTPRQLREFLGKAGFCRLFIPGFAEMAAPLYPLTKPGTLFEWGPDQQKAYQEIKQALLTAPALGLPDLTKPFELFVDEKQGYAKGVLTQKLGPWRRPVAYLSKKLDPVAAGWPPCLRMVAAIAVLTKDAGKLTMGQPLVILAPHAVEALVKQPPDRWLSNARMTHYQALLLDTDRVQFGPIVALNPATLLPLPEEGLQHDCLDILAEAHGTRPDLTDQPLPDADHTWYTDGSSFLQEGQRKAGAAVTTETEVVWAKALPAGTSAQRAELIALTQALKMAEGKKLNVYTDSRYAFATAHIHGEIYRRRGWLTSEGKEIKNKDEILALLKALFLPKRLSIIHCPGHQKGNRAEARGNRMADQAAREVATRETPETSTLLAGKRTADGSEFEKRTADGSEFESPKKKAKVE

SEQ ID NO: 2576 - protein, 2096 aa, synthetic construct
MPAAKRVKLDGGDKKYSIGLDIGTNSVGWAVITDEYKVPSKKFKVLGNTDRHSIKKNLIGALLFDSGETAEATRLKRTARRRYTRRKNRICYLQEIFSNEMAKVDDSFFHRLEESFLVEEDKKHERHPIFGNIVDEVAYHEKYPTIYHLRKKLVDSTDKADLRLIYLALAHMIKFRGHFLIEGDLNPDNSDVDKLFIQLVQTYNQLFEENPINASGVDAKAILSARLSKSRRLENLIAQLPGEKKNGLFGNLIALSLGLTPNFKSNFDLAEDAKLQLSKDTYDDDLDNLLAQIGDQYADLFLAAKNLSDAILLSDILRVNTEITKAPLSASMIKRYDEHHQDLTLLKALVRQQLPEKYKEIFFDQSKNGYAGYIDGGASQEEFYKFIKPILEKMDGTEELLVKLNREDLLRKQRTFDNGSIPHQIHLGELHAILRRQEDFYPFLKDNREKIEKILTFRIPYYVGPLARGNSRFAWMTRKSEETITPWNFEEVVDKGASAQSFIERMTNFDKNLPNEKVLPKHSLLYEYFTVYNELTKVKYVTEGMRKPAFLSGEQKKAIVDLLFKTNRKVTVKQLKEDYFKKIECFDSVEISGVEDRFNASLGTYHDLLKIIKDKDFLDNEENEDILEDIVLTLTLFEDREMIEERLKTYAHLFDDKVMKQLKRRRYTGWGRLSRKLINGIRDKQSGKTILDFLKSDGFANRNFMQLIHDDSLTFKEDIQKAQVSGQGDSLHEHIANLAGSPAIKKGILQTVKVVDELVKVMGRHKPENIVIEMARENQTTQKGQKNSRERMKRIEEGIKELGSQILKEHPVENTQLQNEKLYLYYLQNGRDMYVDQELDINRLSDYDVDHIVPQSFLKDDSIDNKVLTRSDKARGKSDNVPSEEVVKKMKNYWRQLLNAKLITQRKFDNLTKAERGGLSELDKAGFIKRQLVETRQITKHVAQILDSRMNTKYDENDKLIREVKVITLKSKLVSDFRKDFQFYKVREINNYHHAHDAYLNAVVGTALIKKYPKLESEFVYGDYKVYDVRKMIAKSEQEIGKATAKYFFYSNIMNFFKTEITLANGEIRKRPLIETNGETGEIVWDKGRDFATVRKVLSMPQVNIVKKTEVQTGGFSKESILPKRNSDKLIARKKDWDPKKYGGFDSPTVAYSVLVVAKVEKGKSKKLKSVKELLGITIMERSSFEKNPIDFLEAKGYKEVKKDLIIKLPKYSLFELENGRKRMLASAGELQKGNELALPSKYVNFLYLASHYEKLKGSPEDNEQKQLFVEQHKHYLDEIIEQISEFSKRVILADANLDKVLSAYNKHRDKPIREQAENIIHLFTLTNLGAPAAFKYFDTTIDRKRYTSTKEVLDATLIHQSITGLYETRIDLSQLGGDGGGGGEAAAKGSSGGTLNIEDEYRLHETSKGPDVPLGSTWLSDFPQAWAETGGMGLAVRQAPLIIPLKATSTPVSIKQYPMSQEARLGIKPHIQRLLDQGILVPCQSPWNTPLLPVKKPGTNDYRPVQDLREVNKRVEDIHPTVPNPYNLLSGLPPSHQWYTVLDLKDAFFCLRLHPTSQSLFAFEWRDPEMGISGQLTWTRLPQGFKNSPTLFNEALHRDLADFRIQHPDLILLQYVDDLLLAATSELDCQQGTRALLQTLGDLGYRASAKKAQICQKQVKYLGYLLKEGQRWLTEARKETVMGQPTPKTPRQLREFLGKAGFCRLFIPGFAEMAAPLYPLTKPGTLFEWGPDQQKAYQEIKQALLTAPALGLPDLTKPFELFVDEKQGYAKGVLTQKLGPWRRPVAYLSKKLDPVAAGWPPCLRMVAAIAVLTKDAGKLTMGQPLVILAPHAVEALVKQPPDRWLSNARMTHYQALLLDTDRVQFGPIVALNPATLLPLPEEGLQHDCLDILAEAHGTRPDLTDQPLPDADHTWYTDGSSFLQEGQRKAGAAVTTETEVVWAKALPAGTSAQRAELIALTQALKMAEGKKLNVYTDSRYAFATAHIHGEIYRRRGWLTSEGKEIKNKDEILALLKALFLPKRLSIIHCPGHQKGNRAEARGNRMADQAAREVATRETPETSTLLAGKRTADGSEFEKRTADGSEFESPKKKAKVE

SEQ ID NO: 2577 - protein, 2096 aa, synthetic construct
MPAAKRVKLDGGDKKYSIGLDIGTNSVGWAVITDEYKVPSKKFKVLGNTDRHSIKKNLIGALLFDSGETAEATRLKRTARRRYTRRKNRICYLQEIFSNEMAKVDDSFFHRLEESFLVEEDKKHERHPIFGNIVDEVAYHEKYPTIYHLRKKLVDSTDKADLRLIYLALAHMIKFRGHFLIEGDLNPDNSDVDKLFIQLVQTYNQLFEENPINASGVDAKAILSARLSKSRRLENLIAQLPGEKKNGLFGNLIALSLGLTPNFKSNFDLAEDAKLQLSKDTYDDDLDNLLAQIGDQYADLFLAAKNLSDAILLSDILRVNTEITKAPLSASMIKRYDEHHQDLTLLKALVRQQLPEKYKEIFFDQSKNGYAGYIDGGASQEEFYKFIKPILEKMDGTEELLVKLNREDLLRKQRTFDNGSIPHQIHLGELHAILRRQEDFYPFLKDNREKIEKILTFRIPYYVGPLARGNSRFAWMTRKSEETITPWNFEEVVDKGASAQSFIERMTNFDKNLPNEKVLPKHSLLYEYFTVYNELTKVKYVTEGMRKPAFLSGEQKKAIVDLLFKTNRKVTVKQLKEDYFKKIECFDSVEISGVEDRFNASLGTYHDLLKIIKDKDFLDNEENEDILEDIVLTLTLFEDREMIEERLKTYAHLFDDKVMKQLKRRRYTGWGRLSRKLINGIRDKQSGKTILDFLKSDGFANRNFMQLIHDDSLTFKEDIQKAQVSGQGDSLHEHIANLAGSPAIKKGILQTVKVVDELVKVMGRHKPENIVIEMARENQTTQKGQKNSRERMKRIEEGIKELGSQILKEHPVENTQLQNEKLYLYYLQNGRDMYVDQELDINRLSDYDVDHIVPQSFLKDDSIDNKVLTRSDKARGKSDNVPSEEVVKKMKNYWRQLLNAKLITQRKFDNLTKAERGGLSELDKAGFIKRQLVETRQITKHVAQILDSRMNTKYDENDKLIREVKVITLKSKLVSDFRKDFQFYKVREINNYHHAHDAYLNAVVGTALIKKYPKLESEFVYGDYKVYDVRKMIAKSEQEIGKATAKYFFYSNIMNFFKTEITLANGEIRKRPLIETNGETGEIVWDKGRDFATVRKVLSMPQVNIVKKTEVQTGGFSKESILPKRNSDKLIARKKDWDPKKYGGFDSPTVAYSVLVVAKVEKGKSKKLKSVKELLGITIMERSSFEKNPIDFLEAKGYKEVKKDLIIKLPKYSLFELENGRKRMLASAGELQKGNELALPSKYVNFLYLASHYEKLKGSPEDNEQKQLFVEQHKHYLDEIIEQISEFSKRVILADANLDKVLSAYNKHRDKPIREQAENIIHLFTLTNLGAPAAFKYFDTTIDRKRYTSTKEVLDATLIHQSITGLYETRIDLSQLGGDGGPAPEAAAKGGSGGTLNIEDEYRLHETSKGPDVPLGSTWLSDFPQAWAETGGMGLAVRQAPLIIPLKATSTPVSIKQYPMSQEARLGIKPHIQRLLDQGILVPCQSPWNTPLLPVKKPGTNDYRPVQDLREVNKRVEDIHPTVPNPYNLLSGLPPSHQWYTVLDLKDAFFCLRLHPTSQSLFAFEWRDPEMGISGQLTWTRLPQGFKNSPTLFNEALHRDLADFRIQHPDLILLQYVDDLLLAATSELDCQQGTRALLQTLGDLGYRASAKKAQICQKQVKYLGYLLKEGQRWLTEARKETVMGQPTPKTPRQLREFLGKAGFCRLFIPGFAEMAAPLYPLTKPGTLFEWGPDQQKAYQEIKQALLTAPALGLPDLTKPFELFVDEKQGYAKGVLTQKLGPWRRPVAYLSKKLDPVAAGWPPCLRMVAAIAVLTKDAGKLTMGQPLVILAPHAVEALVKQPPDRWLSNARMTHYQALLLDTDRVQFGPIVALNPATLLPLPEEGLQHDCLDILAEAHGTRPDLTDQPLPDADHTWYTDGSSFLQEGQRKAGAAVTTETEVVWAKALPAGTSAQRAELIALTQALKMAEGKKLNVYTDSRYAFATAHIHGEIYRRRGWLTSEGKEIKNKDEILALLKALFLPKRLSIIHCPGHQKGNRAEARGNRMADQAAREVATRETPETSTLLAGKRTADGSEFEKRTADGSEFESPKKKAKVE

SEQ ID NO: 2578 - protein, 2096 aa, synthetic construct
MPAAKRVKLDGGDKKYSIGLDIGTNSVGWAVITDEYKVPSKKFKVLGNTDRHSIKKNLIGALLFDSGETAEATRLKRTARRRYTRRKNRICYLQEIFSNEMAKVDDSFFHRLEESFLVEEDKKHERHPIFGNIVDEVAYHEKYPTIYHLRKKLVDSTDKADLRLIYLALAHMIKFRGHFLIEGDLNPDNSDVDKLFIQLVQTYNQLFEENPINASGVDAKAILSARLSKSRRLENLIAQLPGEKKNGLFGNLIALSLGLTPNFKSNFDLAEDAKLQLSKDTYDDDLDNLLAQIGDQYADLFLAAKNLSDAILLSDILRVNTEITKAPLSASMIKRYDEHHQDLTLLKALVRQQLPEKYKEIFFDQSKNGYAGYIDGGASQEEFYKFIKPILEKMDGTEELLVKLNREDLLRKQRTFDNGSIPHQIHLGELHAILRRQEDFYPFLKDNREKIEKILTFRIPYYVGPLARGNSRFAWMTRKSEETITPWNFEEVVDKGASAQSFIERMTNFDKNLPNEKVLPKHSLLYEYFTVYNELTKVKYVTEGMRKPAFLSGEQKKAIVDLLFKTNRKVTVKQLKEDYFKKIECFDSVEISGVEDRFNASLGTYHDLLKIIKDKDFLDNEENEDILEDIVLTLTLFEDREMIEERLKTYAHLFDDKVMKQLKRRRYTGWGRLSRKLINGIRDKQSGKTILDFLKSDGFANRNFMQLIHDDSLTFKEDIQKAQVSGQGDSLHEHIANLAGSPAIKKGILQTVKVVDELVKVMGRHKPENIVIEMARENQTTQKGQKNSRERMKRIEEGIKELGSQILKEHPVENTQLQNEKLYLYYLQNGRDMYVDQELDINRLSDYDVDHIVPQSFLKDDSIDNKVLTRSDKARGKSDNVPSEEVVKKMKNYWRQLLNAKLITQRKFDNLTKAERGGLSELDKAGFIKRQLVETRQITKHVAQILDSRMNTKYDENDKLIREVKVITLKSKLVSDFRKDFQFYKVREINNYHHAHDAYLNAVVGTALIKKYPKLESEFVYGDYKVYDVRKMIAKSEQEIGKATAKYFFYSNIMNFFKTEITLANGEIRKRPLIETNGETGEIVWDKGRDFATVRKVLSMPQVNIVKKTEVQTGGFSKESILPKRNSDKLIARKKDWDPKKYGGFDSPTVAYSVLVVAKVEKGKSKKLKSVKELLGITIMERSSFEKNPIDFLEAKGYKEVKKDLIIKLPKYSLFELENGRKRMLASAGELQKGNELALPSKYVNFLYLASHYEKLKGSPEDNEQKQLFVEQHKHYLDEIIEQISEFSKRVILADANLDKVLSAYNKHRDKPIREQAENIIHLFTLTNLGAPAAFKYFDTTIDRKRYTSTKEVLDATLIHQSITGLYETRIDLSQLGGDGGGGSEAAAKGGGGGTLNIEDEYRLHETSKGPDVPLGSTWLSDFPQAWAETGGMGLAVRQAPLIIPLKATSTPVSIKQYPMSQEARLGIKPHIQRLLDQGILVPCQSPWNTPLLPVKKPGTNDYRPVQDLREVNKRVEDIHPTVPNPYNLLSGLPPSHQWYTVLDLKDAFFCLRLHPTSQSLFAFEWRDPEMGISGQLTWTRLPQGFKNSPTLFNEALHRDLADFRIQHPDLILLQYVDDLLLAATSELDCQQGTRALLQTLGDLGYRASAKKAQICQKQVKYLGYLLKEGQRWLTEARKETVMGQPTPKTPRQLREFLGKAGFCRLFIPGFAEMAAPLYPLTKPGTLFEWGPDQQKAYQEIKQALLTAPALGLPDLTKPFELFVDEKQGYAKGVLTQKLGPWRRPVAYLSKKLDPVAAGWPPCLRMVAAIAVLTKDAGKLTMGQPLVILAPHAVEALVKQPPDRWLSNARMTHYQALLLDTDRVQFGPIVALNPATLLPLPEEGLQHDCLDILAEAHGTRPDLTDQPLPDADHTWYTDGSSFLQEGQRKAGAAVTTETEVVWAKALPAGTSAQRAELIALTQALKMAEGKKLNVYTDSRYAFATAHIHGEIYRRRGWLTSEGKEIKNKDEILALLKALFLPKRLSIIHCPGHQKGNRAEARGNRMADQAAREVATRETPETSTLLAGKRTADGSEFEKRTADGSEFESPKKKAKVE

SEQ ID NO: 2579 - protein, 2090 aa, synthetic construct
MPAAKRVKLDGGDKKYSIGLDIGTNSVGWAVITDEYKVPSKKFKVLGNTDRHSIKKNLIGALLFDSGETAEATRLKRTARRRYTRRKNRICYLQEIFSNEMAKVDDSFFHRLEESFLVEEDKKHERHPIFGNIVDEVAYHEKYPTIYHLRKKLVDSTDKADLRLIYLALAHMIKFRGHFLIEGDLNPDNSDVDKLFIQLVQTYNQLFEENPINASGVDAKAILSARLSKSRRLENLIAQLPGEKKNGLFGNLIALSLGLTPNFKSNFDLAEDAKLQLSKDTYDDDLDNLLAQIGDQYADLFLAAKNLSDAILLSDILRVNTEITKAPLSASMIKRYDEHHQDLTLLKALVRQQLPEKYKEIFFDQSKNGYAGYIDGGASQEEFYKFIKPILEKMDGTEELLVKLNREDLLRKQRTFDNGSIPHQIHLGELHAILRRQEDFYPFLKDNREKIEKILTFRIPYYVGPLARGNSRFAWMTRKSEETITPWNFEEVVDKGASAQSFIERMTNFDKNLPNEKVLPKHSLLYEYFTVYNELTKVKYVTEGMRKPAFLSGEQKKAIVDLLFKTNRKVTVKQLKEDYFKKIECFDSVEISGVEDRFNASLGTYHDLLKIIKDKDFLDNEENEDILEDIVLTLTLFEDREMIEERLKTYAHLFDDKVMKQLKRRRYTGWGRLSRKLINGIRDKQSGKTILDFLKSDGFANRNFMQLIHDDSLTFKEDIQKAQVSGQGDSLHEHIANLAGSPAIKKGILQTVKVVDELVKVMGRHKPENIVIEMARENQTTQKGQKNSRERMKRIEEGIKELGSQILKEHPVENTQLQNEKLYLYYLQNGRDMYVDQELDINRLSDYDVDHIVPQSFLKDDSIDNKVLTRSDKARGKSDNVPSEEVVKKMKNYWRQLLNAKLITQRKFDNLTKAERGGLSELDKAGFIKRQLVETRQITKHVAQILDSRMNTKYDENDKLIREVKVITLKSKLVSDFRKDFQFYKVREINNYHHAHDAYLNAVVGTALIKKYPKLESEFVYGDYKVYDVRKMIAKSEQEIGKATAKYFFYSNIMNFFKTEITLANGEIRKRPLIETNGETGEIVWDKGRDFATVRKVLSMPQVNIVKKTEVQTGGFSKESILPKRNSDKLIARKKDWDPKKYGGFDSPTVAYSVLVVAKVEKGKSKKLKSVKELLGITIMERSSFEKNPIDFLEAKGYKEVKKDLIIKLPKYSLFELENGRKRMLASAGELQKGNELALPSKYVNFLYLASHYEKLKGSPEDNEQKQLFVEQHKHYLDEIIEQISEFSKRVILADANLDKVLSAYNKHRDKPIREQAENIIHLFTLTNLGAPAAFKYFDTTIDRKRYTSTKEVLDATLIHQSITGLYETRIDLSQLGGDGGGGGGGGGTLNIEDEYRLHETSKGPDVPLGSTWLSDFPQAWAETGGMGLAVRQAPLIIPLKATSTPVSIKQYPMSQEARLGIKPHIQRLLDQGILVPCQSPWNTPLLPVKKPGTNDYRPVQDLREVNKRVEDIHPTVPNPYNLLSGLPPSHQWYTVLDLKDAFFCLRLHPTSQSLFAFEWRDPEMGISGQLTWTRLPQGFKNSPTLFNEALHRDLADFRIQHPDLILLQYVDDLLLAATSELDCQQGTRALLQTLGDLGYRASAKKAQICQKQVKYLGYLLKEGQRWLTEARKETVMGQPTPKTPRQLREFLGKAGFCRLFIPGFAEMAAPLYPLTKPGTLFEWGPDQQKAYQEIKQALLTAPALGLPDLTKPFELFVDEKQGYAKGVLTQKLGPWRRPVAYLSKKLDPVAAGWPPCLRMVAAIAVLTKDAGKLTMGQPLVILAPHAVEALVKQPPDRWLSNARMTHYQALLLDTDRVQFGPIVALNPATLLPLPEEGLQHDCLDILAEAHGTRPDLTDQPLPDADHTWYTDGSSFLQEGQRKAGAAVTTETEVVWAKALPAGTSAQRAELIALTQALKMAEGKKLNVYTDSRYAFATAHIHGEIYRRRGWLTSEGKEIKNKDEILALLKALFLPKRLSIIHCPGHQKGNRAEARGNRMADQAAREVATRETPETSTLLAGKRTADGSEFEKRTADGSEFESPKKKAKVE

SEQ ID NO: 2580 - protein, 2094 aa, synthetic construct
MPAAKRVKLDGGDKKYSIGLDIGTNSVGWAVITDEYKVPSKKFKVLGNTDRHSIKKNLIGALLFDSGETAEATRLKRTARRRYTRRKNRICYLQEIFSNEMAKVDDSFFHRLEESFLVEEDKKHERHPIFGNIVDEVAYHEKYPTIYHLRKKLVDSTDKADLRLIYLALAHMIKFRGHFLIEGDLNPDNSDVDKLFIQLVQTYNQLFEENPINASGVDAKAILSARLSKSRRLENLIAQLPGEKKNGLFGNLIALSLGLTPNFKSNFDLAEDAKLQLSKDTYDDDLDNLLAQIGDQYADLFLAAKNLSDAILLSDILRVNTEITKAPLSASMIKRYDEHHQDLTLLKALVRQQLPEKYKEIFFDQSKNGYAGYIDGGASQEEFYKFIKPILEKMDGTEELLVKLNREDLLRKQRTFDNGSIPHQIHLGELHAILRRQEDFYPFLKDNREKIEKILTFRIPYYVGPLARGNSRFAWMTRKSEETITPWNFEEVVDKGASAQSFIERMTNFDKNLPNEKVLPKHSLLYEYFTVYNELTKVKYVTEGMRKPAFLSGEQKKAIVDLLFKTNRKVTVKQLKEDYFKKIECFDSVEISGVEDRFNASLGTYHDLLKIIKDKDFLDNEENEDILEDIVLTLTLFEDREMIEERLKTYAHLFDDKVMKQLKRRRYTGWGRLSRKLINGIRDKQSGKTILDFLKSDGFANRNFMQLIHDDSLTFKEDIQKAQVSGQGDSLHEHIANLAGSPAIKKGILQTVKVVDELVKVMGRHKPENIVIEMARENQTTQKGQKNSRERMKRIEEGIKELGSQILKEHPVENTQLQNEKLYLYYLQNGRDMYVDQELDINRLSDYDVDHIVPQSFLKDDSIDNKVLTRSDKARGKSDNVPSEEVVKKMKNYWRQLLNAKLITQRKFDNLTKAERGGLSELDKAGFIKRQLVETRQITKHVAQILDSRMNTKYDENDKLIREVKVITLKSKLVSDFRKDFQFYKVREINNYHHAHDAYLNAVVGTALIKKYPKLESEFVYGDYKVYDVRKMIAKSEQEIGKATAKYFFYSNIMNFFKTEITLANGEIRKRPLIETNGETGEIVWDKGRDFATVRKVLSMPQVNIVKKTEVQTGGFSKESILPKRNSDKLIARKKDWDPKKYGGFDSPTVAYSVLVVAKVEKGKSKKLKSVKELLGITIMERSSFEKNPIDFLEAKGYKEVKKDLIIKLPKYSLFELENGRKRMLASAGELQKGNELALPSKYVNFLYLASHYEKLKGSPEDNEQKQLFVEQHKHYLDEIIEQISEFSKRVILADANLDKVLSAYNKHRDKPIREQAENIIHLFTLTNLGAPAAFKYFDTTIDRKRYTSTKEVLDATLIHQSITGLYETRIDLSQLGGDGGGSSPAPGGGGGTLNIEDEYRLHETSKGPDVPLGSTWLSDFPQAWAETGGMGLAVRQAPLIIPLKATSTPVSIKQYPMSQEARLGIKPHIQRLLDQGILVPCQSPWNTPLLPVKKPGTNDYRPVQDLREVNKRVEDIHPTVPNPYNLLSGLPPSHQWYTVLDLKDAFFCLRLHPTSQSLFAFEWRDPEMGISGQLTWTRLPQGFKNSPTLFNEALHRDLADFRIQHPDLILLQYVDDLLLAATSELDCQQGTRALLQTLGDLGYRASAKKAQICQKQVKYLGYLLKEGQRWLTEARKETVMGQPTPKTPRQLREFLGKAGFCRLFIPGFAEMAAPLYPLTKPGTLFEWGPDQQKAYQEIKQALLTAPALGLPDLTKPFELFVDEKQGYAKGVLTQKLGPWRRPVAYLSKKLDPVAAGWPPCLRMVAAIAVLTKDAGKLTMGQPLVILAPHAVEALVKQPPDRWLSNARMTHYQALLLDTDRVQFGPIVALNPATLLPLPEEGLQHDCLDILAEAHGTRPDLTDQPLPDADHTWYTDGSSFLQEGQRKAGAAVTTETEVVWAKALPAGTSAQRAELIALTQALKMAEGKKLNVYTDSRYAFATAHIHGEIYRRRGWLTSEGKEIKNKDEILALLKALFLPKRLSIIHCPGHQKGNRAEARGNRMADQAAREVATRETPETSTLLAGKRTADGSEFEKRTADGSEFESPKKKAKVE

SEQ ID NO: 2581 - protein, 2094 aa, synthetic construct
MPAAKRVKLDGGDKKYSIGLDIGTNSVGWAVITDEYKVPSKKFKVLGNTDRHSIKKNLIGALLFDSGETAEATRLKRTARRRYTRRKNRICYLQEIFSNEMAKVDDSFFHRLEESFLVEEDKKHERHPIFGNIVDEVAYHEKYPTIYHLRKKLVDSTDKADLRLIYLALAHMIKFRGHFLIEGDLNPDNSDVDKLFIQLVQTYNQLFEENPINASGVDAKAILSARLSKSRRLENLIAQLPGEKKNGLFGNLIALSLGLTPNFKSNFDLAEDAKLQLSKDTYDDDLDNLLAQIGDQYADLFLAAKNLSDAILLSDILRVNTEITKAPLSASMIKRYDEHHQDLTLLKALVRQQLPEKYKEIFFDQSKNGYAGYIDGGASQEEFYKFIKPILEKMDGTEELLVKLNREDLLRKQRTFDNGSIPHQIHLGELHAILRRQEDFYPFLKDNREKIEKILTFRIPYYVGPLARGNSRFAWMTRKSEETITPWNFEEVVDKGASAQSFIERMTNFDKNLPNEKVLPKHSLLYEYFTVYNELTKVKYVTEGMRKPAFLSGEQKKAIVDLLFKTNRKVTVKQLKEDYFKKIECFDSVEISGVEDRFNASLGTYHDLLKIIKDKDFLDNEENEDILEDIVLTLTLFEDREMIEERLKTYAHLFDDKVMKQLKRRRYTGWGRLSRKLINGIRDKQSGKTILDFLKSDGFANRNFMQLIHDDSLTFKEDIQKAQVSGQGDSLHEHIANLAGSPAIKKGILQTVKVVDELVKVMGRHKPENIVIEMARENQTTQKGQKNSRERMKRIEEGIKELGSQILKEHPVENTQLQNEKLYLYYLQNGRDMYVDQELDINRLSDYDVDHIVPQSFLKDDSIDNKVLTRSDKARGKSDNVPSEEVVKKMKNYWRQLLNAKLITQRKFDNLTKAERGGLSELDKAGFIKRQLVETRQITKHVAQILDSRMNTKYDENDKLIREVKVITLKSKLVSDFRKDFQFYKVREINNYHHAHDAYLNAVVGTALIKKYPKLESEFVYGDYKVYDVRKMIAKSEQEIGKATAKYFFYSNIMNFFKTEITLANGEIRKRPLIETNGETGEIVWDKGRDFATVRKVLSMPQVNIVKKTEVQTGGFSKESILPKRNSDKLIARKKDWDPKKYGGFDSPTVAYSVLVVAKVEKGKSKKLKSVKELLGITIMERSSFEKNPIDFLEAKGYKEVKKDLIIKLPKYSLFELENGRKRMLASAGELQKGNELALPSKYVNFLYLASHYEKLKGSPEDNEQKQLFVEQHKHYLDEIIEQISEFSKRVILADANLDKVLSAYNKHRDKPIREQAENIIHLFTLTNLGAPAAFKYFDTTIDRKRYTSTKEVLDATLIHQSITGLYETRIDLSQLGGDGGPAPGSSGGSGGTLNIEDEYRLHETSKGPDVPLGSTWLSDFPQAWAETGGMGLAVRQAPLIIPLKATSTPVSIKQYPMSQEARLGIKPHIQRLLDQGILVPCQSPWNTPLLPVKKPGTNDYRPVQDLREVNKRVEDIHPTVPNPYNLLSGLPPSHQWYTVLDLKDAFFCLRLHPTSQSLFAFEWRDPEMGISGQLTWTRLPQGFKNSPTLFNEALHRDLADFRIQHPDLILLQYVDDLLLAATSELDCQQGTRALLQTLGDLGYRASAKKAQICQKQVKYLGYLLKEGQRWLTEARKETVMGQPTPKTPRQLREFLGKAGFCRLFIPGFAEMAAPLYPLTKPGTLFEWGPDQQKAYQEIKQALLTAPALGLPDLTKPFELFVDEKQGYAKGVLTQKLGPWRRPVAYLSKKLDPVAAGWPPCLRMVAAIAVLTKDAGKLTMGQPLVILAPHAVEALVKQPPDRWLSNARMTHYQALLLDTDRVQFGPIVALNPATLLPLPEEGLQHDCLDILAEAHGTRPDLTDQPLPDADHTWYTDGSSFLQEGQRKAGAAVTTETEVVWAKALPAGTSAQRAELIALTQALKMAEGKKLNVYTDSRYAFATAHIHGEIYRRRGWLTSEGKEIKNKDEILALLKALFLPKRLSIIHCPGHQKGNRAEARGNRMADQAAREVATRETPETSTLLAGKRTADGSEFEKRTADGSEFESPKKKAKVE

SEQ ID NO: 2582 - protein, 2096 aa, synthetic construct
MPAAKRVKLDGGDKKYSIGLDIGTNSVGWAVITDEYKVPSKKFKVLGNTDRHSIKKNLIGALLFDSGETAEATRLKRTARRRYTRRKNRICYLQEIFSNEMAKVDDSFFHRLEESFLVEEDKKHERHPIFGNIVDEVAYHEKYPTIYHLRKKLVDSTDKADLRLIYLALAHMIKFRGHFLIEGDLNPDNSDVDKLFIQLVQTYNQLFEENPINASGVDAKAILSARLSKSRRLENLIAQLPGEKKNGLFGNLIALSLGLTPNFKSNFDLAEDAKLQLSKDTYDDDLDNLLAQIGDQYADLFLAAKNLSDAILLSDILRVNTEITKAPLSASMIKRYDEHHQDLTLLKALVRQQLPEKYKEIFFDQSKNGYAGYIDGGASQEEFYKFIKPILEKMDGTEELLVKLNREDLLRKQRTFDNGSIPHQIHLGELHAILRRQEDFYPFLKDNREKIEKILTFRIPYYVGPLARGNSRFAWMTRKSEETITPWNFEEVVDKGASAQSFIERMTNFDKNLPNEKVLPKHSLLYEYFTVYNELTKVKYVTEGMRKPAFLSGEQKKAIVDLLFKTNRKVTVKQLKEDYFKKIECFDSVEISGVEDRFNASLGTYHDLLKIIKDKDFLDNEENEDILEDIVLTLTLFEDREMIEERLKTYAHLFDDKVMKQLKRRRYTGWGRLSRKLINGIRDKQSGKTILDFLKSDGFANRNFMQLIHDDSLTFKEDIQKAQVSGQGDSLHEHIANLAGSPAIKKGILQTVKVVDELVKVMGRHKPENIVIEMARENQTTQKGQKNSRERMKRIEEGIKELGSQILKEHPVENTQLQNEKLYLYYLQNGRDMYVDQELDINRLSDYDVDHIVPQSFLKDDSIDNKVLTRSDKARGKSDNVPSEEVVKKMKNYWRQLLNAKLITQRKFDNLTKAERGGLSELDKAGFIKRQLVETRQITKHVAQILDSRMNTKYDENDKLIREVKVITLKSKLVSDFRKDFQFYKVREINNYHHAHDAYLNAVVGTALIKKYPKLESEFVYGDYKVYDVRKMIAKSEQEIGKATAKYFFYSNIMNFFKTEITLANGEIRKRPLIETNGETGEIVWDKGRDFATVRKVLSMPQVNIVKKTEVQTGGFSKESILPKRNSDKLIARKKDWDPKKYGGFDSPTVAYSVLVVAKVEKGKSKKLKSVKELLGITIMERSSFEKNPIDFLEAKGYKEVKKDLIIKLPKYSLFELENGRKRMLASAGELQKGNELALPSKYVNFLYLASHYEKLKGSPEDNEQKQLFVEQHKHYLDEIIEQISEFSKRVILADANLDKVLSAYNKHRDKPIREQAENIIHLFTLTNLGAPAAFKYFDTTIDRKRYTSTKEVLDATLIHQSITGLYETRIDLSQLGGDGGEAAAKGGGGGSGGTLNIEDEYRLHETSKGPDVPLGSTWLSDFPQAWAETGGMGLAVRQAPLIIPLKATSTPVSIKQYPMSQEARLGIKPHIQRLLDQGILVPCQSPWNTPLLPVKKPGTNDYRPVQDLREVNKRVEDIHPTVPNPYNLLSGLPPSHQWYTVLDLKDAFFCLRLHPTSQSLFAFEWRDPEMGISGQLTWTRLPQGFKNSPTLFNEALHRDLADFRIQHPDLILLQYVDDLLLAATSELDCQQGTRALLQTLGDLGYRASAKKAQICQKQVKYLGYLLKEGQRWLTEARKETVMGQPTPKTPRQLREFLGKAGFCRLFIPGFAEMAAPLYPLTKPGTLFEWGPDQQKAYQEIKQALLTAPALGLPDLTKPFELFVDEKQGYAKGVLTQKLGPWRRPVAYLSKKLDPVAAGWPPCLRMVAAIAVLTKDAGKLTMGQPLVILAPHAVEALVKQPPDRWLSNARMTHYQALLLDTDRVQFGPIVALNPATLLPLPEEGLQHDCLDILAEAHGTRPDLTDQPLPDADHTWYTDGSSFLQEGQRKAGAAVTTETEVVWAKALPAGTSAQRAELIALTQALKMAEGKKLNVYTDSRYAFATAHIHGEIYRRRGWLTSEGKEIKNKDEILALLKALFLPKRLSIIHCPGHQKGNRAEARGNRMADQAAREVATRETPETSTLLAGKRTADGSEFEKRTADGSEFESPKKKAKVE

SEQ ID NO: 2583 - protein, 2097 aa, synthetic construct
MPAAKRVKLDGGDKKYSIGLDIGTNSVGWAVITDEYKVPSKKFKVLGNTDRHSIKKNLIGALLFDSGETAEATRLKRTARRRYTRRKNRICYLQEIFSNEMAKVDDSFFHRLEESFLVEEDKKHERHPIFGNIVDEVAYHEKYPTIYHLRKKLVDSTDKADLRLIYLALAHMIKFRGHFLIEGDLNPDNSDVDKLFIQLVQTYNQLFEENPINASGVDAKAILSARLSKSRRLENLIAQLPGEKKNGLFGNLIALSLGLTPNFKSNFDLAEDAKLQLSKDTYDDDLDNLLAQIGDQYADLFLAAKNLSDAILLSDILRVNTEITKAPLSASMIKRYDEHHQDLTLLKALVRQQLPEKYKEIFFDQSKNGYAGYIDGGASQEEFYKFIKPILEKMDGTEELLVKLNREDLLRKQRTFDNGSIPHQIHLGELHAILRRQEDFYPFLKDNREKIEKILTFRIPYYVGPLARGNSRFAWMTRKSEETITPWNFEEVVDKGASAQSFIERMTNFDKNLPNEKVLPKHSLLYEYFTVYNELTKVKYVTEGMRKPAFLSGEQKKAIVDLLFKTNRKVTVKQLKEDYFKKIECFDSVEISGVEDRFNASLGTYHDLLKIIKDKDFLDNEENEDILEDIVLTLTLFEDREMIEERLKTYAHLFDDKVMKQLKRRRYTGWGRLSRKLINGIRDKQSGKTILDFLKSDGFANRNFMQLIHDDSLTFKEDIQKAQVSGQGDSLHEHIANLAGSPAIKKGILQTVKVVDELVKVMGRHKPENIVIEMARENQTTQKGQKNSRERMKRIEEGIKELGSQILKEHPVENTQLQNEKLYLYYLQNGRDMYVDQELDINRLSDYDVDHIVPQSFLKDDSIDNKVLTRSDKARGKSDNVPSEEVVKKMKNYWRQLLNAKLITQRKFDNLTKAERGGLSELDKAGFIKRQLVETRQITKHVAQILDSRMNTKYDENDKLIREVKVITLKSKLVSDFRKDFQFYKVREINNYHHAHDAYLNAVVGTALIKKYPKLESEFVYGDYKVYDVRKMIAKSEQEIGKATAKYFFYSNIMNFFKTEITLANGEIRKRPLIETNGETGEIVWDKGRDFATVRKVLSMPQVNIVKKTEVQTGGFSKESILPKRNSDKLIARKKDWDPKKYGGFDSPTVAYSVLVVAKVEKGKSKKLKSVKELLGITIMERSSFEKNPIDFLEAKGYKEVKKDLIIKLPKYSLFELENGRKRMLASAGELQKGNELALPSKYVNFLYLASHYEKLKGSPEDNEQKQLFVEQHKHYLDEIIEQISEFSKRVILADANLDKVLSAYNKHRDKPIREQAENIIHLFTLTNLGAPAAFKYFDTTIDRKRYTSTKEVLDATLIHQSITGLYETRIDLSQLGGDGGGSAGSAAGSGEFGGTLNIEDEYRLHETSKGPDVPLGSTWLSDFPQAWAETGGMGLAVRQAPLIIPLKATSTPVSIKQYPMSQEARLGIKPHIQRLLDQGILVPCQSPWNTPLLPVKKPGTNDYRPVQDLREVNKRVEDIHPTVPNPYNLLSGLPPSHQWYTVLDLKDAFFCLRLHPTSQSLFAFEWRDPEMGISGQLTWTRLPQGFKNSPTLFNEALHRDLADFRIQHPDLILLQYVDDLLLAATSELDCQQGTRALLQTLGDLGYRASAKKAQICQKQVKYLGYLLKEGQRWLTEARKETVMGQPTPKTPRQLREFLGKAGFCRLFIPGFAEMAAPLYPLTKPGTLFEWGPDQQKAYQEIKQALLTAPALGLPDLTKPFELFVDEKQGYAKGVLTQKLGPWRRPVAYLSKKLDPVAAGWPPCLRMVAAIAVLTKDAGKLTMGQPLVILAPHAVEALVKQPPDRWLSNARMTHYQALLLDTDRVQFGPIVALNPATLLPLPEEGLQHDCLDILAEAHGTRPDLTDQPLPDADHTWYTDGSSFLQEGQRKAGAAVTTETEVVWAKALPAGTSAQRAELIALTQALKMAEGKKLNVYTDSRYAFATAHIHGEIYRRRGWLTSEGKEIKNKDEILALLKALFLPKRLSIIHCPGHQKGNRAEARGNRMADQAAREVATRETPETSTLLAGKRTADGSEFEKRTADGSEFESPKKKAKVE

SEQ ID NO: 2584 - protein, 2093 aa, synthetic construct
MPAAKRVKLDGGDKKYSIGLDIGTNSVGWAVITDEYKVPSKKFKVLGNTDRHSIKKNLIGALLFDSGETAEATRLKRTARRRYTRRKNRICYLQEIFSNEMAKVDDSFFHRLEESFLVEEDKKHERHPIFGNIVDEVAYHEKYPTIYHLRKKLVDSTDKADLRLIYLALAHMIKFRGHFLIEGDLNPDNSDVDKLFIQLVQTYNQLFEENPINASGVDAKAILSARLSKSRRLENLIAQLPGEKKNGLFGNLIALSLGLTPNFKSNFDLAEDAKLQLSKDTYDDDLDNLLAQIGDQYADLFLAAKNLSDAILLSDILRVNTEITKAPLSASMIKRYDEHHQDLTLLKALVRQQLPEKYKEIFFDQSKNGYAGYIDGGASQEEFYKFIKPILEKMDGTEELLVKLNREDLLRKQRTFDNGSIPHQIHLGELHAILRRQEDFYPFLKDNREKIEKILTFRIPYYVGPLARGNSRFAWMTRKSEETITPWNFEEVVDKGASAQSFIERMTNFDKNLPNEKVLPKHSLLYEYFTVYNELTKVKYVTEGMRKPAFLSGEQKKAIVDLLFKTNRKVTVKQLKEDYFKKIECFDSVEISGVEDRFNASLGTYHDLLKIIKDKDFLDNEENEDILEDIVLTLTLFEDREMIEERLKTYAHLFDDKVMKQLKRRRYTGWGRLSRKLINGIRDKQSGKTILDFLKSDGFANRNFMQLIHDDSLTFKEDIQKAQVSGQGDSLHEHIANLAGSPAIKKGILQTVKVVDELVKVMGRHKPENIVIEMARENQTTQKGQKNSRERMKRIEEGIKELGSQILKEHPVENTQLQNEKLYLYYLQNGRDMYVDQELDINRLSDYDVDHIVPQSFLKDDSIDNKVLTRSDKARGKSDNVPSEEVVKKMKNYWRQLLNAKLITQRKFDNLTKAERGGLSELDKAGFIKRQLVETRQITKHVAQILDSRMNTKYDENDKLIREVKVITLKSKLVSDFRKDFQFYKVREINNYHHAHDAYLNAVVGTALIKKYPKLESEFVYGDYKVYDVRKMIAKSEQEIGKATAKYFFYSNIMNFFKTEITLANGEIRKRPLIETNGETGEIVWDKGRDFATVRKVLSMPQVNIVKKTEVQTGGFSKESILPKRNSDKLIARKKDWDPKKYGGFDSPTVAYSVLVVAKVEKGKSKKLKSVKELLGITIMERSSFEKNPIDFLEAKGYKEVKKDLIIKLPKYSLFELENGRKRMLASAGELQKGNELALPSKYVNFLYLASHYEKLKGSPEDNEQKQLFVEQHKHYLDEIIEQISEFSKRVILADANLDKVLSAYNKHRDKPIREQAENIIHLFTLTNLGAPAAFKYFDTTIDRKRYTSTKEVLDATLIHQSITGLYETRIDLSQLGGDGGEAAAKGGSGGTLNIEDEYRLHETSKGPDVPLGSTWLSDFPQAWAETGGMGLAVRQAPLIIPLKATSTPVSIKQYPMSQEARLGIKPHIQRLLDQGILVPCQSPWNTPLLPVKKPGTNDYRPVQDLREVNKRVEDIHPTVPNPYNLLSGLPPSHQWYTVLDLKDAFFCLRLHPTSQSLFAFEWRDPEMGISGQLTWTRLPQGFKNSPTLFNEALHRDLADFRIQHPDLILLQYVDDLLLAATSELDCQQGTRALLQTLGDLGYRASAKKAQICQKQVKYLGYLLKEGQRWLTEARKETVMGQPTPKTPRQLREFLGKAGFCRLFIPGFAEMAAPLYPLTKPGTLFEWGPDQQKAYQEIKQALLTAPALGLPDLTKPFELFVDEKQGYAKGVLTQKLGPWRRPVAYLSKKLDPVAAGWPPCLRMVAAIAVLTKDAGKLTMGQPLVILAPHAVEALVKQPPDRWLSNARMTHYQALLLDTDRVQFGPIVALNPATLLPLPEEGLQHDCLDILAEAHGTRPDLTDQPLPDADHTWYTDGSSFLQEGQRKAGAAVTTETEVVWAKALPAGTSAQRAELIALTQALKMAEGKKLNVYTDSRYAFATAHIHGEIYRRRGWLTSEGKEIKNKDEILALLKALFLPKRLSIIHCPGHQKGNRAEARGNRMADQAAREVATRETPETSTLLAGKRTADGSEFEKRTADGSEFESPKKKAKVE

SEQ ID NO: 2585 - protein, 2093 aa, synthetic construct
MPAAKRVKLDGGDKKYSIGLDIGTNSVGWAVITDEYKVPSKKFKVLGNTDRHSIKKNLIGALLFDSGETAEATRLKRTARRRYTRRKNRICYLQEIFSNEMAKVDDSFFHRLEESFLVEEDKKHERHPIFGNIVDEVAYHEKYPTIYHLRKKLVDSTDKADLRLIYLALAHMIKFRGHFLIEGDLNPDNSDVDKLFIQLVQTYNQLFEENPINASGVDAKAILSARLSKSRRLENLIAQLPGEKKNGLFGNLIALSLGLTPNFKSNFDLAEDAKLQLSKDTYDDDLDNLLAQIGDQYADLFLAAKNLSDAILLSDILRVNTEITKAPLSASMIKRYDEHHQDLTLLKALVRQQLPEKYKEIFFDQSKNGYAGYIDGGASQEEFYKFIKPILEKMDGTEELLVKLNREDLLRKQRTFDNGSIPHQIHLGELHAILRRQEDFYPFLKDNREKIEKILTFRIPYYVGPLARGNSRFAWMTRKSEETITPWNFEEVVDKGASAQSFIERMTNFDKNLPNEKVLPKHSLLYEYFTVYNELTKVKYVTEGMRKPAFLSGEQKKAIVDLLFKTNRKVTVKQLKEDYFKKIECFDSVEISGVEDRFNASLGTYHDLLKIIKDKDFLDNEENEDILEDIVLTLTLFEDREMIEERLKTYAHLFDDKVMKQLKRRRYTGWGRLSRKLINGIRDKQSGKTILDFLKSDGFANRNFMQLIHDDSLTFKEDIQKAQVSGQGDSLHEHIANLAGSPAIKKGILQTVKVVDELVKVMGRHKPENIVIEMARENQTTQKGQKNSRERMKRIEEGIKELGSQILKEHPVENTQLQNEKLYLYYLQNGRDMYVDQELDINRLSDYDVDHIVPQSFLKDDSIDNKVLTRSDKARGKSDNVPSEEVVKKMKNYWRQLLNAKLITQRKFDNLTKAERGGLSELDKAGFIKRQLVETRQITKHVAQILDSRMNTKYDENDKLIREVKVITLKSKLVSDFRKDFQFYKVREINNYHHAHDAYLNAVVGTALIKKYPKLESEFVYGDYKVYDVRKMIAKSEQEIGKATAKYFFYSNIMNFFKTEITLANGEIRKRPLIETNGETGEIVWDKGRDFATVRKVLSMPQVNIVKKTEVQTGGFSKESILPKRNSDKLIARKKDWDPKKYGGFDSPTVAYSVLVVAKVEKGKSKKLKSVKELLGITIMERSSFEKNPIDFLEAKGYKEVKKDLIIKLPKYSLFELENGRKRMLASAGELQKGNELALPSKYVNFLYLASHYEKLKGSPEDNEQKQLFVEQHKHYLDEIIEQISEFSKRVILADANLDKVLSAYNKHRDKPIREQAENIIHLFTLTNLGAPAAFKYFDTTIDRKRYTSTKEVLDATLIHQSITGLYETRIDLSQLGGDGGEAAAKGSSGGTLNIEDEYRLHETSKGPDVPLGSTWLSDFPQAWAETGGMGLAVRQAPLIIPLKATSTPVSIKQYPMSQEARLGIKPHIQRLLDQGILVPCQSPWNTPLLPVKKPGTNDYRPVQDLREVNKRVEDIHPTVPNPYNLLSGLPPSHQWYTVLDLKDAFFCLRLHPTSQSLFAFEWRDPEMGISGQLTWTRLPQGFKNSPTLFNEALHRDLADFRIQHPDLILLQYVDDLLLAATSELDCQQGTRALLQTLGDLGYRASAKKAQICQKQVKYLGYLLKEGQRWLTEARKETVMGQPTPKTPRQLREFLGKAGFCRLFIPGFAEMAAPLYPLTKPGTLFEWGPDQQKAYQEIKQALLTAPALGLPDLTKPFELFVDEKQGYAKGVLTQKLGPWRRPVAYLSKKLDPVAAGWPPCLRMVAAIAVLTKDAGKLTMGQPLVILAPHAVEALVKQPPDRWLSNARMTHYQALLLDTDRVQFGPIVALNPATLLPLPEEGLQHDCLDILAEAHGTRPDLTDQPLPDADHTWYTDGSSFLQEGQRKAGAAVTTETEVVWAKALPAGTSAQRAELIALTQALKMAEGKKLNVYTDSRYAFATAHIHGEIYRRRGWLTSEGKEIKNKDEILALLKALFLPKRLSIIHCPGHQKGNRAEARGNRMADQAAREVATRETPETSTLLAGKRTADGSEFEKRTADGSEFESPKKKAKVE

SEQ ID NO: 2586 - protein, 2091 aa, synthetic construct
MPAAKRVKLDGGDKKYSIGLDIGTNSVGWAVITDEYKVPSKKFKVLGNTDRHSIKKNLIGALLFDSGETAEATRLKRTARRRYTRRKNRICYLQEIFSNEMAKVDDSFFHRLEESFLVEEDKKHERHPIFGNIVDEVAYHEKYPTIYHLRKKLVDSTDKADLRLIYLALAHMIKFRGHFLIEGDLNPDNSDVDKLFIQLVQTYNQLFEENPINASGVDAKAILSARLSKSRRLENLIAQLPGEKKNGLFGNLIALSLGLTPNFKSNFDLAEDAKLQLSKDTYDDDLDNLLAQIGDQYADLFLAAKNLSDAILLSDILRVNTEITKAPLSASMIKRYDEHHQDLTLLKALVRQQLPEKYKEIFFDQSKNGYAGYIDGGASQEEFYKFIKPILEKMDGTEELLVKLNREDLLRKQRTFDNGSIPHQIHLGELHAILRRQEDFYPFLKDNREKIEKILTFRIPYYVGPLARGNSRFAWMTRKSEETITPWNFEEVVDKGASAQSFIERMTNFDKNLPNEKVLPKHSLLYEYFTVYNELTKVKYVTEGMRKPAFLSGEQKKAIVDLLFKTNRKVTVKQLKEDYFKKIECFDSVEISGVEDRFNASLGTYHDLLKIIKDKDFLDNEENEDILEDIVLTLTLFEDREMIEERLKTYAHLFDDKVMKQLKRRRYTGWGRLSRKLINGIRDKQSGKTILDFLKSDGFANRNFMQLIHDDSLTFKEDIQKAQVSGQGDSLHEHIANLAGSPAIKKGILQTVKVVDELVKVMGRHKPENIVIEMARENQTTQKGQKNSRERMKRIEEGIKELGSQILKEHPVENTQLQNEKLYLYYLQNGRDMYVDQELDINRLSDYDVDHIVPQSFLKDDSIDNKVLTRSDKARGKSDNVPSEEVVKKMKNYWRQLLNAKLITQRKFDNLTKAERGGLSELDKAGFIKRQLVETRQITKHVAQILDSRMNTKYDENDKLIREVKVITLKSKLVSDFRKDFQFYKVREINNYHHAHDAYLNAVVGTALIKKYPKLESEFVYGDYKVYDVRKMIAKSEQEIGKATAKYFFYSNIMNFFKTEITLANGEIRKRPLIETNGETGEIVWDKGRDFATVRKVLSMPQVNIVKKTEVQTGGFSKESILPKRNSDKLIARKKDWDPKKYGGFDSPTVAYSVLVVAKVEKGKSKKLKSVKELLGITIMERSSFEKNPIDFLEAKGYKEVKKDLIIKLPKYSLFELENGRKRMLASAGELQKGNELALPSKYVNFLYLASHYEKLKGSPEDNEQKQLFVEQHKHYLDEIIEQISEFSKRVILADANLDKVLSAYNKHRDKPIREQAENIIHLFTLTNLGAPAAFKYFDTTIDRKRYTSTKEVLDATLIHQSITGLYETRIDLSQLGGDGGGGGGSSGGTLNIEDEYRLHETSKGPDVPLGSTWLSDFPQAWAETGGMGLAVRQAPLIIPLKATSTPVSIKQYPMSQEARLGIKPHIQRLLDQGILVPCQSPWNTPLLPVKKPGTNDYRPVQDLREVNKRVEDIHPTVPNPYNLLSGLPPSHQWYTVLDLKDAFFCLRLHPTSQSLFAFEWRDPEMGISGQLTWTRLPQGFKNSPTLFNEALHRDLADFRIQHPDLILLQYVDDLLLAATSELDCQQGTRALLQTLGDLGYRASAKKAQICQKQVKYLGYLLKEGQRWLTEARKETVMGQPTPKTPRQLREFLGKAGFCRLFIPGFAEMAAPLYPLTKPGTLFEWGPDQQKAYQEIKQALLTAPALGLPDLTKPFELFVDEKQGYAKGVLTQKLGPWRRPVAYLSKKLDPVAAGWPPCLRMVAAIAVLTKDAGKLTMGQPLVILAPHAVEALVKQPPDRWLSNARMTHYQALLLDTDRVQFGPIVALNPATLLPLPEEGLQHDCLDILAEAHGTRPDLTDQPLPDADHTWYTDGSSFLQEGQRKAGAAVTTETEVVWAKALPAGTSAQRAELIALTQALKMAEGKKLNVYTDSRYAFATAHIHGEIYRRRGWLTSEGKEIKNKDEILALLKALFLPKRLSIIHCPGHQKGNRAEARGNRMADQAAREVATRETPETSTLLAGKRTADGSEFEKRTADGSEFESPKKKAKVE

SEQ ID NO: 2587 - protein, 2093 aa, synthetic construct
MPAAKRVKLDGGDKKYSIGLDIGTNSVGWAVITDEYKVPSKKFKVLGNTDRHSIKKNLIGALLFDSGETAEATRLKRTARRRYTRRKNRICYLQEIFSNEMAKVDDSFFHRLEESFLVEEDKKHERHPIFGNIVDEVAYHEKYPTIYHLRKKLVDSTDKADLRLIYLALAHMIKFRGHFLIEGDLNPDNSDVDKLFIQLVQTYNQLFEENPINASGVDAKAILSARLSKSRRLENLIAQLPGEKKNGLFGNLIALSLGLTPNFKSNFDLAEDAKLQLSKDTYDDDLDNLLAQIGDQYADLFLAAKNLSDAILLSDILRVNTEITKAPLSASMIKRYDEHHQDLTLLKALVRQQLPEKYKEIFFDQSKNGYAGYIDGGASQEEFYKFIKPILEKMDGTEELLVKLNREDLLRKQRTFDNGSIPHQIHLGELHAILRRQEDFYPFLKDNREKIEKILTFRIPYYVGPLARGNSRFAWMTRKSEETITPWNFEEVVDKGASAQSFIERMTNFDKNLPNEKVLPKHSLLYEYFTVYNELTKVKYVTEGMRKPAFLSGEQKKAIVDLLFKTNRKVTVKQLKEDYFKKIECFDSVEISGVEDRFNASLGTYHDLLKIIKDKDFLDNEENEDILEDIVLTLTLFEDREMIEERLKTYAHLFDDKVMKQLKRRRYTGWGRLSRKLINGIRDKQSGKTILDFLKSDGFANRNFMQLIHDDSLTFKEDIQKAQVSGQGDSLHEHIANLAGSPAIKKGILQTVKVVDELVKVMGRHKPENIVIEMARENQTTQKGQKNSRERMKRIEEGIKELGSQILKEHPVENTQLQNEKLYLYYLQNGRDMYVDQELDINRLSDYDVDHIVPQSFLKDDSIDNKVLTRSDKARGKSDNVPSEEVVKKMKNYWRQLLNAKLITQRKFDNLTKAERGGLSELDKAGFIKRQLVETRQITKHVAQILDSRMNTKYDENDKLIREVKVITLKSKLVSDFRKDFQFYKVREINNYHHAHDAYLNAVVGTALIKKYPKLESEFVYGDYKVYDVRKMIAKSEQEIGKATAKYFFYSNIMNFFKTEITLANGEIRKRPLIETNGETGEIVWDKGRDFATVRKVLSMPQVNIVKKTEVQTGGFSKESILPKRNSDKLIARKKDWDPKKYGGFDSPTVAYSVLVVAKVEKGKSKKLKSVKELLGITIMERSSFEKNPIDFLEAKGYKEVKKDLIIKLPKYSLFELENGRKRMLASAGELQKGNELALPSKYVNFLYLASHYEKLKGSPEDNEQKQLFVEQHKHYLDEIIEQISEFSKRVILADANLDKVLSAYNKHRDKPIREQAENIIHLFTLTNLGAPAAFKYFDTTIDRKRYTSTKEVLDATLIHQSITGLYETRIDLSQLGGDGGEAAAKPAPGGTLNIEDEYRLHETSKGPDVPLGSTWLSDFPQAWAETGGMGLAVRQAPLIIPLKATSTPVSIKQYPMSQEARLGIKPHIQRLLDQGILVPCQSPWNTPLLPVKKPGTNDYRPVQDLREVNKRVEDIHPTVPNPYNLLSGLPPSHQWYTVLDLKDAFFCLRLHPTSQSLFAFEWRDPEMGISGQLTWTRLPQGFKNSPTLFNEALHRDLADFRIQHPDLILLQYVDDLLLAATSELDCQQGTRALLQTLGDLGYRASAKKAQICQKQVKYLGYLLKEGQRWLTEARKETVMGQPTPKTPRQLREFLGKAGFCRLFIPGFAEMAAPLYPLTKPGTLFEWGPDQQKAYQEIKQALLTAPALGLPDLTKPFELFVDEKQGYAKGVLTQKLGPWRRPVAYLSKKLDPVAAGWPPCLRMVAAIAVLTKDAGKLTMGQPLVILAPHAVEALVKQPPDRWLSNARMTHYQALLLDTDRVQFGPIVALNPATLLPLPEEGLQHDCLDILAEAHGTRPDLTDQPLPDADHTWYTDGSSFLQEGQRKAGAAVTTETEVVWAKALPAGTSAQRAELIALTQALKMAEGKKLNVYTDSRYAFATAHIHGEIYRRRGWLTSEGKEIKNKDEILALLKALFLPKRLSIIHCPGHQKGNRAEARGNRMADQAAREVATRETPETSTLLAGKRTADGSEFEKRTADGSEFESPKKKAKVE

SEQ ID NO: 2588 - protein, 2094 aa, synthetic construct
MPAAKRVKLDGGDKKYSIGLDIGTNSVGWAVITDEYKVPSKKFKVLGNTDRHSIKKNLIGALLFDSGETAEATRLKRTARRRYTRRKNRICYLQEIFSNEMAKVDDSFFHRLEESFLVEEDKKHERHPIFGNIVDEVAYHEKYPTIYHLRKKLVDSTDKADLRLIYLALAHMIKFRGHFLIEGDLNPDNSDVDKLFIQLVQTYNQLFEENPINASGVDAKAILSARLSKSRRLENLIAQLPGEKKNGLFGNLIALSLGLTPNFKSNFDLAEDAKLQLSKDTYDDDLDNLLAQIGDQYADLFLAAKNLSDAILLSDILRVNTEITKAPLSASMIKRYDEHHQDLTLLKALVRQQLPEKYKEIFFDQSKNGYAGYIDGGASQEEFYKFIKPILEKMDGTEELLVKLNREDLLRKQRTFDNGSIPHQIHLGELHAILRRQEDFYPFLKDNREKIEKILTFRIPYYVGPLARGNSRFAWMTRKSEETITPWNFEEVVDKGASAQSFIERMTNFDKNLPNEKVLPKHSLLYEYFTVYNELTKVKYVTEGMRKPAFLSGEQKKAIVDLLFKTNRKVTVKQLKEDYFKKIECFDSVEISGVEDRFNASLGTYHDLLKIIKDKDFLDNEENEDILEDIVLTLTLFEDREMIEERLKTYAHLFDDKVMKQLKRRRYTGWGRLSRKLINGIRDKQSGKTILDFLKSDGFANRNFMQLIHDDSLTFKEDIQKAQVSGQGDSLHEHIANLAGSPAIKKGILQTVKVVDELVKVMGRHKPENIVIEMARENQTTQKGQKNSRERMKRIEEGIKELGSQILKEHPVENTQLQNEKLYLYYLQNGRDMYVDQELDINRLSDYDVDHIVPQSFLKDDSIDNKVLTRSDKARGKSDNVPSEEVVKKMKNYWRQLLNAKLITQRKFDNLTKAERGGLSELDKAGFIKRQLVETRQITKHVAQILDSRMNTKYDENDKLIREVKVITLKSKLVSDFRKDFQFYKVREINNYHHAHDAYLNAVVGTALIKKYPKLESEFVYGDYKVYDVRKMIAKSEQEIGKATAKYFFYSNIMNFFKTEITLANGEIRKRPLIETNGETGEIVWDKGRDFATVRKVLSMPQVNIVKKTEVQTGGFSKESILPKRNSDKLIARKKDWDPKKYGGFDSPTVAYSVLVVAKVEKGKSKKLKSVKELLGITIMERSSFEKNPIDFLEAKGYKEVKKDLIIKLPKYSLFELENGRKRMLASAGELQKGNELALPSKYVNFLYLASHYEKLKGSPEDNEQKQLFVEQHKHYLDEIIEQISEFSKRVILADANLDKVLSAYNKHRDKPIREQAENIIHLFTLTNLGAPAAFKYFDTTIDRKRYTSTKEVLDATLIHQSITGLYETRIDLSQLGGDGGGGGGGSPAPGGTLNIEDEYRLHETSKGPDVPLGSTWLSDFPQAWAETGGMGLAVRQAPLIIPLKATSTPVSIKQYPMSQEARLGIKPHIQRLLDQGILVPCQSPWNTPLLPVKKPGTNDYRPVQDLREVNKRVEDIHPTVPNPYNLLSGLPPSHQWYTVLDLKDAFFCLRLHPTSQSLFAFEWRDPEMGISGQLTWTRLPQGFKNSPTLFNEALHRDLADFRIQHPDLILLQYVDDLLLAATSELDCQQGTRALLQTLGDLGYRASAKKAQICQKQVKYLGYLLKEGQRWLTEARKETVMGQPTPKTPRQLREFLGKAGFCRLFIPGFAEMAAPLYPLTKPGTLFEWGPDQQKAYQEIKQALLTAPALGLPDLTKPFELFVDEKQGYAKGVLTQKLGPWRRPVAYLSKKLDPVAAGWPPCLRMVAAIAVLTKDAGKLTMGQPLVILAPHAVEALVKQPPDRWLSNARMTHYQALLLDTDRVQFGPIVALNPATLLPLPEEGLQHDCLDILAEAHGTRPDLTDQPLPDADHTWYTDGSSFLQEGQRKAGAAVTTETEVVWAKALPAGTSAQRAELIALTQALKMAEGKKLNVYTDSRYAFATAHIHGEIYRRRGWLTSEGKEIKNKDEILALLKALFLPKRLSIIHCPGHQKGNRAEARGNRMADQAAREVATRETPETSTLLAGKRTADGSEFEKRTADGSEFESPKKKAKVE

SEQ ID NO: 2589 - protein, 2094 aa, synthetic construct
MPAAKRVKLDGGDKKYSIGLDIGTNSVGWAVITDEYKVPSKKFKVLGNTDRHSIKKNLIGALLFDSGETAEATRLKRTARRRYTRRKNRICYLQEIFSNEMAKVDDSFFHRLEESFLVEEDKKHERHPIFGNIVDEVAYHEKYPTIYHLRKKLVDSTDKADLRLIYLALAHMIKFRGHFLIEGDLNPDNSDVDKLFIQLVQTYNQLFEENPINASGVDAKAILSARLSKSRRLENLIAQLPGEKKNGLFGNLIALSLGLTPNFKSNFDLAEDAKLQLSKDTYDDDLDNLLAQIGDQYADLFLAAKNLSDAILLSDILRVNTEITKAPLSASMIKRYDEHHQDLTLLKALVRQQLPEKYKEIFFDQSKNGYAGYIDGGASQEEFYKFIKPILEKMDGTEELLVKLNREDLLRKQRTFDNGSIPHQIHLGELHAILRRQEDFYPFLKDNREKIEKILTFRIPYYVGPLARGNSRFAWMTRKSEETITPWNFEEVVDKGASAQSFIERMTNFDKNLPNEKVLPKHSLLYEYFTVYNELTKVKYVTEGMRKPAFLSGEQKKAIVDLLFKTNRKVTVKQLKEDYFKKIECFDSVEISGVEDRFNASLGTYHDLLKIIKDKDFLDNEENEDILEDIVLTLTLFEDREMIEERLKTYAHLFDDKVMKQLKRRRYTGWGRLSRKLINGIRDKQSGKTILDFLKSDGFANRNFMQLIHDDSLTFKEDIQKAQVSGQGDSLHEHIANLAGSPAIKKGILQTVKVVDELVKVMGRHKPENIVIEMARENQTTQKGQKNSRERMKRIEEGIKELGSQILKEHPVENTQLQNEKLYLYYLQNGRDMYVDQELDINRLSDYDVDHIVPQSFLKDDSIDNKVLTRSDKARGKSDNVPSEEVVKKMKNYWRQLLNAKLITQRKFDNLTKAERGGLSELDKAGFIKRQLVETRQITKHVAQILDSRMNTKYDENDKLIREVKVITLKSKLVSDFRKDFQFYKVREINNYHHAHDAYLNAVVGTALIKKYPKLESEFVYGDYKVYDVRKMIAKSEQEIGKATAKYFFYSNIMNFFKTEITLANGEIRKRPLIETNGETGEIVWDKGRDFATVRKVLSMPQVNIVKKTEVQTGGFSKESILPKRNSDKLIARKKDWDPKKYGGFDSPTVAYSVLVVAKVEKGKSKKLKSVKELLGITIMERSSFEKNPIDFLEAKGYKEVKKDLIIKLPKYSLFELENGRKRMLASAGELQKGNELALPSKYVNFLYLASHYEKLKGSPEDNEQKQLFVEQHKHYLDEIIEQISEFSKRVILADANLDKVLSAYNKHRDKPIREQAENIIHLFTLTNLGAPAAFKYFDTTIDRKRYTSTKEVLDATLIHQSITGLYETRIDLSQLGGDGGGGGGSSPAPGGTLNIEDEYRLHETSKGPDVPLGSTWLSDFPQAWAETGGMGLAVRQAPLIIPLKATSTPVSIKQYPMSQEARLGIKPHIQRLLDQGILVPCQSPWNTPLLPVKKPGTNDYRPVQDLREVNKRVEDIHPTVPNPYNLLSGLPPSHQWYTVLDLKDAFFCLRLHPTSQSLFAFEWRDPEMGISGQLTWTRLPQGFKNSPTLFNEALHRDLADFRIQHPDLILLQYVDDLLLAATSELDCQQGTRALLQTLGDLGYRASAKKAQICQKQVKYLGYLLKEGQRWLTEARKETVMGQPTPKTPRQLREFLGKAGFCRLFIPGFAEMAAPLYPLTKPGTLFEWGPDQQKAYQEIKQALLTAPALGLPDLTKPFELFVDEKQGYAKGVLTQKLGPWRRPVAYLSKKLDPVAAGWPPCLRMVAAIAVLTKDAGKLTMGQPLVILAPHAVEALVKQPPDRWLSNARMTHYQALLLDTDRVQFGPIVALNPATLLPLPEEGLQHDCLDILAEAHGTRPDLTDQPLPDADHTWYTDGSSFLQEGQRKAGAAVTTETEVVWAKALPAGTSAQRAELIALTQALKMAEGKKLNVYTDSRYAFATAHIHGEIYRRRGWLTSEGKEIKNKDEILALLKALFLPKRLSIIHCPGHQKGNRAEARGNRMADQAAREVATRETPETSTLLAGKRTADGSEFEKRTADGSEFESPKKKAKVE

SEQ ID NO: 2590 - protein, 2091 aa, synthetic construct
MPAAKRVKLDGGDKKYSIGLDIGTNSVGWAVITDEYKVPSKKFKVLGNTDRHSIKKNLIGALLFDSGETAEATRLKRTARRRYTRRKNRICYLQEIFSNEMAKVDDSFFHRLEESFLVEEDKKHERHPIFGNIVDEVAYHEKYPTIYHLRKKLVDSTDKADLRLIYLALAHMIKFRGHFLIEGDLNPDNSDVDKLFIQLVQTYNQLFEENPINASGVDAKAILSARLSKSRRLENLIAQLPGEKKNGLFGNLIALSLGLTPNFKSNFDLAEDAKLQLSKDTYDDDLDNLLAQIGDQYADLFLAAKNLSDAILLSDILRVNTEITKAPLSASMIKRYDEHHQDLTLLKALVRQQLPEKYKEIFFDQSKNGYAGYIDGGASQEEFYKFIKPILEKMDGTEELLVKLNREDLLRKQRTFDNGSIPHQIHLGELHAILRRQEDFYPFLKDNREKIEKILTFRIPYYVGPLARGNSRFAWMTRKSEETITPWNFEEVVDKGASAQSFIERMTNFDKNLPNEKVLPKHSLLYEYFTVYNELTKVKYVTEGMRKPAFLSGEQKKAIVDLLFKTNRKVTVKQLKEDYFKKIECFDSVEISGVEDRFNASLGTYHDLLKIIKDKDFLDNEENEDILEDIVLTLTLFEDREMIEERLKTYAHLFDDKVMKQLKRRRYTGWGRLSRKLINGIRDKQSGKTILDFLKSDGFANRNFMQLIHDDSLTFKEDIQKAQVSGQGDSLHEHIANLAGSPAIKKGILQTVKVVDELVKVMGRHKPENIVIEMARENQTTQKGQKNSRERMKRIEEGIKELGSQILKEHPVENTQLQNEKLYLYYLQNGRDMYVDQELDINRLSDYDVDHIVPQSFLKDDSIDNKVLTRSDKARGKSDNVPSEEVVKKMKNYWRQLLNAKLITQRKFDNLTKAERGGLSELDKAGFIKRQLVETRQITKHVAQILDSRMNTKYDENDKLIREVKVITLKSKLVSDFRKDFQFYKVREINNYHHAHDAYLNAVVGTALIKKYPKLESEFVYGDYKVYDVRKMIAKSEQEIGKATAKYFFYSNIMNFFKTEITLANGEIRKRPLIETNGETGEIVWDKGRDFATVRKVLSMPQVNIVKKTEVQTGGFSKESILPKRNSDKLIARKKDWDPKKYGGFDSPTVAYSVLVVAKVEKGKSKKLKSVKELLGITIMERSSFEKNPIDFLEAKGYKEVKKDLIIKLPKYSLFELENGRKRMLASAGELQKGNELALPSKYVNFLYLASHYEKLKGSPEDNEQKQLFVEQHKHYLDEIIEQISEFSKRVILADANLDKVLSAYNKHRDKPIREQAENIIHLFTLTNLGAPAAFKYFDTTIDRKRYTSTKEVLDATLIHQSITGLYETRIDLSQLGGDGGGSSGGSGGTLNIEDEYRLHETSKGPDVPLGSTWLSDFPQAWAETGGMGLAVRQAPLIIPLKATSTPVSIKQYPMSQEARLGIKPHIQRLLDQGILVPCQSPWNTPLLPVKKPGTNDYRPVQDLREVNKRVEDIHPTVPNPYNLLSGLPPSHQWYTVLDLKDAFFCLRLHPTSQSLFAFEWRDPEMGISGQLTWTRLPQGFKNSPTLFNEALHRDLADFRIQHPDLILLQYVDDLLLAATSELDCQQGTRALLQTLGDLGYRASAKKAQICQKQVKYLGYLLKEGQRWLTEARKETVMGQPTPKTPRQLREFLGKAGFCRLFIPGFAEMAAPLYPLTKPGTLFEWGPDQQKAYQEIKQALLTAPALGLPDLTKPFELFVDEKQGYAKGVLTQKLGPWRRPVAYLSKKLDPVAAGWPPCLRMVAAIAVLTKDAGKLTMGQPLVILAPHAVEALVKQPPDRWLSNARMTHYQALLLDTDRVQFGPIVALNPATLLPLPEEGLQHDCLDILAEAHGTRPDLTDQPLPDADHTWYTDGSSFLQEGQRKAGAAVTTETEVVWAKALPAGTSAQRAELIALTQALKMAEGKKLNVYTDSRYAFATAHIHGEIYRRRGWLTSEGKEIKNKDEILALLKALFLPKRLSIIHCPGHQKGNRAEARGNRMADQAAREVATRETPETSTLLAGKRTADGSEFEKRTADGSEFESPKKKAKVE

SEQ ID NO: 2591 - protein, 2094 aa, synthetic construct
MPAAKRVKLDGGDKKYSIGLDIGTNSVGWAVITDEYKVPSKKFKVLGNTDRHSIKKNLIGALLFDSGETAEATRLKRTARRRYTRRKNRICYLQEIFSNEMAKVDDSFFHRLEESFLVEEDKKHERHPIFGNIVDEVAYHEKYPTIYHLRKKLVDSTDKADLRLIYLALAHMIKFRGHFLIEGDLNPDNSDVDKLFIQLVQTYNQLFEENPINASGVDAKAILSARLSKSRRLENLIAQLPGEKKNGLFGNLIALSLGLTPNFKSNFDLAEDAKLQLSKDTYDDDLDNLLAQIGDQYADLFLAAKNLSDAILLSDILRVNTEITKAPLSASMIKRYDEHHQDLTLLKALVRQQLPEKYKEIFFDQSKNGYAGYIDGGASQEEFYKFIKPILEKMDGTEELLVKLNREDLLRKQRTFDNGSIPHQIHLGELHAILRRQEDFYPFLKDNREKIEKILTFRIPYYVGPLARGNSRFAWMTRKSEETITPWNFEEVVDKGASAQSFIERMTNFDKNLPNEKVLPKHSLLYEYFTVYNELTKVKYVTEGMRKPAFLSGEQKKAIVDLLFKTNRKVTVKQLKEDYFKKIECFDSVEISGVEDRFNASLGTYHDLLKIIKDKDFLDNEENEDILEDIVLTLTLFEDREMIEERLKTYAHLFDDKVMKQLKRRRYTGWGRLSRKLINGIRDKQSGKTILDFLKSDGFANRNFMQLIHDDSLTFKEDIQKAQVSGQGDSLHEHIANLAGSPAIKKGILQTVKVVDELVKVMGRHKPENIVIEMARENQTTQKGQKNSRERMKRIEEGIKELGSQILKEHPVENTQLQNEKLYLYYLQNGRDMYVDQELDINRLSDYDVDHIVPQSFLKDDSIDNKVLTRSDKARGKSDNVPSEEVVKKMKNYWRQLLNAKLITQRKFDNLTKAERGGLSELDKAGFIKRQLVETRQITKHVAQILDSRMNTKYDENDKLIREVKVITLKSKLVSDFRKDFQFYKVREINNYHHAHDAYLNAVVGTALIKKYPKLESEFVYGDYKVYDVRKMIAKSEQEIGKATAKYFFYSNIMNFFKTEITLANGEIRKRPLIETNGETGEIVWDKGRDFATVRKVLSMPQVNIVKKTEVQTGGFSKESILPKRNSDKLIARKKDWDPKKYGGFDSPTVAYSVLVVAKVEKGKSKKLKSVKELLGITIMERSSFEKNPIDFLEAKGYKEVKKDLIIKLPKYSLFELENGRKRMLASAGELQKGNELALPSKYVNFLYLASHYEKLKGSPEDNEQKQLFVEQHKHYLDEIIEQISEFSKRVILADANLDKVLSAYNKHRDKPIREQAENIIHLFTLTNLGAPAAFKYFDTTIDRKRYTSTKEVLDATLIHQSITGLYETRIDLSQLGGDGGGSSGGSPAPGGTLNIEDEYRLHETSKGPDVPLGSTWLSDFPQAWAETGGMGLAVRQAPLIIPLKATSTPVSIKQYPMSQEARLGIKPHIQRLLDQGILVPCQSPWNTPLLPVKKPGTNDYRPVQDLREVNKRVEDIHPTVPNPYNLLSGLPPSHQWYTVLDLKDAFFCLRLHPTSQSLFAFEWRDPEMGISGQLTWTRLPQGFKNSPTLFNEALHRDLADFRIQHPDLILLQYVDDLLLAATSELDCQQGTRALLQTLGDLGYRASAKKAQICQKQVKYLGYLLKEGQRWLTEARKETVMGQPTPKTPRQLREFLGKAGFCRLFIPGFAEMAAPLYPLTKPGTLFEWGPDQQKAYQEIKQALLTAPALGLPDLTKPFELFVDEKQGYAKGVLTQKLGPWRRPVAYLSKKLDPVAAGWPPCLRMVAAIAVLTKDAGKLTMGQPLVILAPHAVEALVKQPPDRWLSNARMTHYQALLLDTDRVQFGPIVALNPATLLPLPEEGLQHDCLDILAEAHGTRPDLTDQPLPDADHTWYTDGSSFLQEGQRKAGAAVTTETEVVWAKALPAGTSAQRAELIALTQALKMAEGKKLNVYTDSRYAFATAHIHGEIYRRRGWLTSEGKEIKNKDEILALLKALFLPKRLSIIHCPGHQKGNRAEARGNRMADQAAREVATRETPETSTLLAGKRTADGSEFEKRTADGSEFESPKKKAKVE

SEQ ID NO: 2592 - protein, 2096 aa, synthetic construct
MPAAKRVKLDGGDKKYSIGLDIGTNSVGWAVITDEYKVPSKKFKVLGNTDRHSIKKNLIGALLFDSGETAEATRLKRTARRRYTRRKNRICYLQEIFSNEMAKVDDSFFHRLEESFLVEEDKKHERHPIFGNIVDEVAYHEKYPTIYHLRKKLVDSTDKADLRLIYLALAHMIKFRGHFLIEGDLNPDNSDVDKLFIQLVQTYNQLFEENPINASGVDAKAILSARLSKSRRLENLIAQLPGEKKNGLFGNLIALSLGLTPNFKSNFDLAEDAKLQLSKDTYDDDLDNLLAQIGDQYADLFLAAKNLSDAILLSDILRVNTEITKAPLSASMIKRYDEHHQDLTLLKALVRQQLPEKYKEIFFDQSKNGYAGYIDGGASQEEFYKFIKPILEKMDGTEELLVKLNREDLLRKQRTFDNGSIPHQIHLGELHAILRRQEDFYPFLKDNREKIEKILTFRIPYYVGPLARGNSRFAWMTRKSEETITPWNFEEVVDKGASAQSFIERMTNFDKNLPNEKVLPKHSLLYEYFTVYNELTKVKYVTEGMRKPAFLSGEQKKAIVDLLFKTNRKVTVKQLKEDYFKKIECFDSVEISGVEDRFNASLGTYHDLLKIIKDKDFLDNEENEDILEDIVLTLTLFEDREMIEERLKTYAHLFDDKVMKQLKRRRYTGWGRLSRKLINGIRDKQSGKTILDFLKSDGFANRNFMQLIHDDSLTFKEDIQKAQVSGQGDSLHEHIANLAGSPAIKKGILQTVKVVDELVKVMGRHKPENIVIEMARENQTTQKGQKNSRERMKRIEEGIKELGSQILKEHPVENTQLQNEKLYLYYLQNGRDMYVDQELDINRLSDYDVDHIVPQSFLKDDSIDNKVLTRSDKARGKSDNVPSEEVVKKMKNYWRQLLNAKLITQRKFDNLTKAERGGLSELDKAGFIKRQLVETRQITKHVAQILDSRMNTKYDENDKLIREVKVITLKSKLVSDFRKDFQFYKVREINNYHHAHDAYLNAVVGTALIKKYPKLESEFVYGDYKVYDVRKMIAKSEQEIGKATAKYFFYSNIMNFFKTEITLANGEIRKRPLIETNGETGEIVWDKGRDFATVRKVLSMPQVNIVKKTEVQTGGFSKESILPKRNSDKLIARKKDWDPKKYGGFDSPTVAYSVLVVAKVEKGKSKKLKSVKELLGITIMERSSFEKNPIDFLEAKGYKEVKKDLIIKLPKYSLFELENGRKRMLASAGELQKGNELALPSKYVNFLYLASHYEKLKGSPEDNEQKQLFVEQHKHYLDEIIEQISEFSKRVILADANLDKVLSAYNKHRDKPIREQAENIIHLFTLTNLGAPAAFKYFDTTIDRKRYTSTKEVLDATLIHQSITGLYETRIDLSQLGGDGGGGGPAPEAAAKGGTLNIEDEYRLHETSKGPDVPLGSTWLSDFPQAWAETGGMGLAVRQAPLIIPLKATSTPVSIKQYPMSQEARLGIKPHIQRLLDQGILVPCQSPWNTPLLPVKKPGTNDYRPVQDLREVNKRVEDIHPTVPNPYNLLSGLPPSHQWYTVLDLKDAFFCLRLHPTSQSLFAFEWRDPEMGISGQLTWTRLPQGFKNSPTLFNEALHRDLADFRIQHPDLILLQYVDDLLLAATSELDCQQGTRALLQTLGDLGYRASAKKAQICQKQVKYLGYLLKEGQRWLTEARKETVMGQPTPKTPRQLREFLGKAGFCRLFIPGFAEMAAPLYPLTKPGTLFEWGPDQQKAYQEIKQALLTAPALGLPDLTKPFELFVDEKQGYAKGVLTQKLGPWRRPVAYLSKKLDPVAAGWPPCLRMVAAIAVLTKDAGKLTMGQPLVILAPHAVEALVKQPPDRWLSNARMTHYQALLLDTDRVQFGPIVALNPATLLPLPEEGLQHDCLDILAEAHGTRPDLTDQPLPDADHTWYTDGSSFLQEGQRKAGAAVTTETEVVWAKALPAGTSAQRAELIALTQALKMAEGKKLNVYTDSRYAFATAHIHGEIYRRRGWLTSEGKEIKNKDEILALLKALFLPKRLSIIHCPGHQKGNRAEARGNRMADQAAREVATRETPETSTLLAGKRTADGSEFEKRTADGSEFESPKKKAKVE

SEQ ID NO: 2593 - protein, 2094 aa, synthetic construct
MPAAKRVKLDGGDKKYSIGLDIGTNSVGWAVITDEYKVPSKKFKVLGNTDRHSIKKNLIGALLFDSGETAEATRLKRTARRRYTRRKNRICYLQEIFSNEMAKVDDSFFHRLEESFLVEEDKKHERHPIFGNIVDEVAYHEKYPTIYHLRKKLVDSTDKADLRLIYLALAHMIKFRGHFLIEGDLNPDNSDVDKLFIQLVQTYNQLFEENPINASGVDAKAILSARLSKSRRLENLIAQLPGEKKNGLFGNLIALSLGLTPNFKSNFDLAEDAKLQLSKDTYDDDLDNLLAQIGDQYADLFLAAKNLSDAILLSDILRVNTEITKAPLSASMIKRYDEHHQDLTLLKALVRQQLPEKYKEIFFDQSKNGYAGYIDGGASQEEFYKFIKPILEKMDGTEELLVKLNREDLLRKQRTFDNGSIPHQIHLGELHAILRRQEDFYPFLKDNREKIEKILTFRIPYYVGPLARGNSRFAWMTRKSEETITPWNFEEVVDKGASAQSFIERMTNFDKNLPNEKVLPKHSLLYEYFTVYNELTKVKYVTEGMRKPAFLSGEQKKAIVDLLFKTNRKVTVKQLKEDYFKKIECFDSVEISGVEDRFNASLGTYHDLLKIIKDKDFLDNEENEDILEDIVLTLTLFEDREMIEERLKTYAHLFDDKVMKQLKRRRYTGWGRLSRKLINGIRDKQSGKTILDFLKSDGFANRNFMQLIHDDSLTFKEDIQKAQVSGQGDSLHEHIANLAGSPAIKKGILQTVKVVDELVKVMGRHKPENIVIEMARENQTTQKGQKNSRERMKRIEEGIKELGSQILKEHPVENTQLQNEKLYLYYLQNGRDMYVDQELDINRLSDYDVDHIVPQSFLKDDSIDNKVLTRSDKARGKSDNVPSEEVVKKMKNYWRQLLNAKLITQRKFDNLTKAERGGLSELDKAGFIKRQLVETRQITKHVAQILDSRMNTKYDENDKLIREVKVITLKSKLVSDFRKDFQFYKVREINNYHHAHDAYLNAVVGTALIKKYPKLESEFVYGDYKVYDVRKMIAKSEQEIGKATAKYFFYSNIMNFFKTEITLANGEIRKRPLIETNGETGEIVWDKGRDFATVRKVLSMPQVNIVKKTEVQTGGFSKESILPKRNSDKLIARKKDWDPKKYGGFDSPTVAYSVLVVAKVEKGKSKKLKSVKELLGITIMERSSFEKNPIDFLEAKGYKEVKKDLIIKLPKYSLFELENGRKRMLASAGELQKGNELALPSKYVNFLYLASHYEKLKGSPEDNEQKQLFVEQHKHYLDEIIEQISEFSKRVILADANLDKVLSAYNKHRDKPIREQAENIIHLFTLTNLGAPAAFKYFDTTIDRKRYTSTKEVLDATLIHQSITGLYETRIDLSQLGGDGGGGGPAPGSSGGTLNIEDEYRLHETSKGPDVPLGSTWLSDFPQAWAETGGMGLAVRQAPLIIPLKATSTPVSIKQYPMSQEARLGIKPHIQRLLDQGILVPCQSPWNTPLLPVKKPGTNDYRPVQDLREVNKRVEDIHPTVPNPYNLLSGLPPSHQWYTVLDLKDAFFCLRLHPTSQSLFAFEWRDPEMGISGQLTWTRLPQGFKNSPTLFNEALHRDLADFRIQHPDLILLQYVDDLLLAATSELDCQQGTRALLQTLGDLGYRASAKKAQICQKQVKYLGYLLKEGQRWLTEARKETVMGQPTPKTPRQLREFLGKAGFCRLFIPGFAEMAAPLYPLTKPGTLFEWGPDQQKAYQEIKQALLTAPALGLPDLTKPFELFVDEKQGYAKGVLTQKLGPWRRPVAYLSKKLDPVAAGWPPCLRMVAAIAVLTKDAGKLTMGQPLVILAPHAVEALVKQPPDRWLSNARMTHYQALLLDTDRVQFGPIVALNPATLLPLPEEGLQHDCLDILAEAHGTRPDLTDQPLPDADHTWYTDGSSFLQEGQRKAGAAVTTETEVVWAKALPAGTSAQRAELIALTQALKMAEGKKLNVYTDSRYAFATAHIHGEIYRRRGWLTSEGKEIKNKDEILALLKALFLPKRLSIIHCPGHQKGNRAEARGNRMADQAAREVATRETPETSTLLAGKRTADGSEFEKRTADGSEFESPKKKAKVE

SEQ ID NO: 2594 - protein, 2091 aa, synthetic construct
MPAAKRVKLDGGDKKYSIGLDIGTNSVGWAVITDEYKVPSKKFKVLGNTDRHSIKKNLIGALLFDSGETAEATRLKRTARRRYTRRKNRICYLQEIFSNEMAKVDDSFFHRLEESFLVEEDKKHERHPIFGNIVDEVAYHEKYPTIYHLRKKLVDSTDKADLRLIYLALAHMIKFRGHFLIEGDLNPDNSDVDKLFIQLVQTYNQLFEENPINASGVDAKAILSARLSKSRRLENLIAQLPGEKKNGLFGNLIALSLGLTPNFKSNFDLAEDAKLQLSKDTYDDDLDNLLAQIGDQYADLFLAAKNLSDAILLSDILRVNTEITKAPLSASMIKRYDEHHQDLTLLKALVRQQLPEKYKEIFFDQSKNGYAGYIDGGASQEEFYKFIKPILEKMDGTEELLVKLNREDLLRKQRTFDNGSIPHQIHLGELHAILRRQEDFYPFLKDNREKIEKILTFRIPYYVGPLARGNSRFAWMTRKSEETITPWNFEEVVDKGASAQSFIERMTNFDKNLPNEKVLPKHSLLYEYFTVYNELTKVKYVTEGMRKPAFLSGEQKKAIVDLLFKTNRKVTVKQLKEDYFKKIECFDSVEISGVEDRFNASLGTYHDLLKIIKDKDFLDNEENEDILEDIVLTLTLFEDREMIEERLKTYAHLFDDKVMKQLKRRRYTGWGRLSRKLINGIRDKQSGKTILDFLKSDGFANRNFMQLIHDDSLTFKEDIQKAQVSGQGDSLHEHIANLAGSPAIKKGILQTVKVVDELVKVMGRHKPENIVIEMARENQTTQKGQKNSRERMKRIEEGIKELGSQILKEHPVENTQLQNEKLYLYYLQNGRDMYVDQELDINRLSDYDVDHIVPQSFLKDDSIDNKVLTRSDKARGKSDNVPSEEVVKKMKNYWRQLLNAKLITQRKFDNLTKAERGGLSELDKAGFIKRQLVETRQITKHVAQILDSRMNTKYDENDKLIREVKVITLKSKLVSDFRKDFQFYKVREINNYHHAHDAYLNAVVGTALIKKYPKLESEFVYGDYKVYDVRKMIAKSEQEIGKATAKYFFYSNIMNFFKTEITLANGEIRKRPLIETNGETGEIVWDKGRDFATVRKVLSMPQVNIVKKTEVQTGGFSKESILPKRNSDKLIARKKDWDPKKYGGFDSPTVAYSVLVVAKVEKGKSKKLKSVKELLGITIMERSSFEKNPIDFLEAKGYKEVKKDLIIKLPKYSLFELENGRKRMLASAGELQKGNELALPSKYVNFLYLASHYEKLKGSPEDNEQKQLFVEQHKHYLDEIIEQISEFSKRVILADANLDKVLSAYNKHRDKPIREQAENIIHLFTLTNLGAPAAFKYFDTTIDRKRYTSTKEVLDATLIHQSITGLYETRIDLSQLGGDGGGSSGGGGGTLNIEDEYRLHETSKGPDVPLGSTWLSDFPQAWAETGGMGLAVRQAPLIIPLKATSTPVSIKQYPMSQEARLGIKPHIQRLLDQGILVPCQSPWNTPLLPVKKPGTNDYRPVQDLREVNKRVEDIHPTVPNPYNLLSGLPPSHQWYTVLDLKDAFFCLRLHPTSQSLFAFEWRDPEMGISGQLTWTRLPQGFKNSPTLFNEALHRDLADFRIQHPDLILLQYVDDLLLAATSELDCQQGTRALLQTLGDLGYRASAKKAQICQKQVKYLGYLLKEGQRWLTEARKETVMGQPTPKTPRQLREFLGKAGFCRLFIPGFAEMAAPLYPLTKPGTLFEWGPDQQKAYQEIKQALLTAPALGLPDLTKPFELFVDEKQGYAKGVLTQKLGPWRRPVAYLSKKLDPVAAGWPPCLRMVAAIAVLTKDAGKLTMGQPLVILAPHAVEALVKQPPDRWLSNARMTHYQALLLDTDRVQFGPIVALNPATLLPLPEEGLQHDCLDILAEAHGTRPDLTDQPLPDADHTWYTDGSSFLQEGQRKAGAAVTTETEVVWAKALPAGTSAQRAELIALTQALKMAEGKKLNVYTDSRYAFATAHIHGEIYRRRGWLTSEGKEIKNKDEILALLKALFLPKRLSIIHCPGHQKGNRAEARGNRMADQAAREVATRETPETSTLLAGKRTADGSEFEKRTADGSEFESPKKKAKVE

SEQ ID NO: 2595 - protein, 2103 aa, synthetic construct
MPAAKRVKLDGGDKKYSIGLDIGTNSVGWAVITDEYKVPSKKFKVLGNTDRHSIKKNLIGALLFDSGETAEATRLKRTARRRYTRRKNRICYLQEIFSNEMAKVDDSFFHRLEESFLVEEDKKHERHPIFGNIVDEVAYHEKYPTIYHLRKKLVDSTDKADLRLIYLALAHMIKFRGHFLIEGDLNPDNSDVDKLFIQLVQTYNQLFEENPINASGVDAKAILSARLSKSRRLENLIAQLPGEKKNGLFGNLIALSLGLTPNFKSNFDLAEDAKLQLSKDTYDDDLDNLLAQIGDQYADLFLAAKNLSDAILLSDILRVNTEITKAPLSASMIKRYDEHHQDLTLLKALVRQQLPEKYKEIFFDQSKNGYAGYIDGGASQEEFYKFIKPILEKMDGTEELLVKLNREDLLRKQRTFDNGSIPHQIHLGELHAILRRQEDFYPFLKDNREKIEKILTFRIPYYVGPLARGNSRFAWMTRKSEETITPWNFEEVVDKGASAQSFIERMTNFDKNLPNEKVLPKHSLLYEYFTVYNELTKVKYVTEGMRKPAFLSGEQKKAIVDLLFKTNRKVTVKQLKEDYFKKIECFDSVEISGVEDRFNASLGTYHDLLKIIKDKDFLDNEENEDILEDIVLTLTLFEDREMIEERLKTYAHLFDDKVMKQLKRRRYTGWGRLSRKLINGIRDKQSGKTILDFLKSDGFANRNFMQLIHDDSLTFKEDIQKAQVSGQGDSLHEHIANLAGSPAIKKGILQTVKVVDELVKVMGRHKPENIVIEMARENQTTQKGQKNSRERMKRIEEGIKELGSQILKEHPVENTQLQNEKLYLYYLQNGRDMYVDQELDINRLSDYDVDHIVPQSFLKDDSIDNKVLTRSDKARGKSDNVPSEEVVKKMKNYWRQLLNAKLITQRKFDNLTKAERGGLSELDKAGFIKRQLVETRQITKHVAQILDSRMNTKYDENDKLIREVKVITLKSKLVSDFRKDFQFYKVREINNYHHAHDAYLNAVVGTALIKKYPKLESEFVYGDYKVYDVRKMIAKSEQEIGKATAKYFFYSNIMNFFKTEITLANGEIRKRPLIETNGETGEIVWDKGRDFATVRKVLSMPQVNIVKKTEVQTGGFSKESILPKRNSDKLIARKKDWDPKKYGGFDSPTVAYSVLVVAKVEKGKSKKLKSVKELLGITIMERSSFEKNPIDFLEAKGYKEVKKDLIIKLPKYSLFELENGRKRMLASAGELQKGNELALPSKYVNFLYLASHYEKLKGSPEDNEQKQLFVEQHKHYLDEIIEQISEFSKRVILADANLDKVLSAYNKHRDKPIREQAENIIHLFTLTNLGAPAAFKYFDTTIDRKRYTSTKEVLDATLIHQSITGLYETRIDLSQLGGDGGGSSGSSGSSGSSGSSGSSGGTLNIEDEYRLHETSKGPDVPLGSTWLSDFPQAWAETGGMGLAVRQAPLIIPLKATSTPVSIKQYPMSQEARLGIKPHIQRLLDQGILVPCQSPWNTPLLPVKKPGTNDYRPVQDLREVNKRVEDIHPTVPNPYNLLSGLPPSHQWYTVLDLKDAFFCLRLHPTSQSLFAFEWRDPEMGISGQLTWTRLPQGFKNSPTLFNEALHRDLADFRIQHPDLILLQYVDDLLLAATSELDCQQGTRALLQTLGDLGYRASAKKAQICQKQVKYLGYLLKEGQRWLTEARKETVMGQPTPKTPRQLREFLGKAGFCRLFIPGFAEMAAPLYPLTKPGTLFEWGPDQQKAYQEIKQALLTAPALGLPDLTKPFELFVDEKQGYAKGVLTQKLGPWRRPVAYLSKKLDPVAAGWPPCLRMVAAIAVLTKDAGKLTMGQPLVILAPHAVEALVKQPPDRWLSNARMTHYQALLLDTDRVQFGPIVALNPATLLPLPEEGLQHDCLDILAEAHGTRPDLTDQPLPDADHTWYTDGSSFLQEGQRKAGAAVTTETEVVWAKALPAGTSAQRAELIALTQALKMAEGKKLNVYTDSRYAFATAHIHGEIYRRRGWLTSEGKEIKNKDEILALLKALFLPKRLSIIHCPGHQKGNRAEARGNRMADQAAREVATRETPETSTLLAGKRTADGSEFEKRTADGSEFESPKKKAKVE

SEQ ID NO: 2596 - protein, 2088 aa, synthetic construct
MPAAKRVKLDGGDKKYSIGLDIGTNSVGWAVITDEYKVPSKKFKVLGNTDRHSIKKNLIGALLFDSGETAEATRLKRTARRRYTRRKNRICYLQEIFSNEMAKVDDSFFHRLEESFLVEEDKKHERHPIFGNIVDEVAYHEKYPTIYHLRKKLVDSTDKADLRLIYLALAHMIKFRGHFLIEGDLNPDNSDVDKLFIQLVQTYNQLFEENPINASGVDAKAILSARLSKSRRLENLIAQLPGEKKNGLFGNLIALSLGLTPNFKSNFDLAEDAKLQLSKDTYDDDLDNLLAQIGDQYADLFLAAKNLSDAILLSDILRVNTEITKAPLSASMIKRYDEHHQDLTLLKALVRQQLPEKYKEIFFDQSKNGYAGYIDGGASQEEFYKFIKPILEKMDGTEELLVKLNREDLLRKQRTFDNGSIPHQIHLGELHAILRRQEDFYPFLKDNREKIEKILTFRIPYYVGPLARGNSRFAWMTRKSEETITPWNFEEVVDKGASAQSFIERMTNFDKNLPNEKVLPKHSLLYEYFTVYNELTKVKYVTEGMRKPAFLSGEQKKAIVDLLFKTNRKVTVKQLKEDYFKKIECFDSVEISGVEDRFNASLGTYHDLLKIIKDKDFLDNEENEDILEDIVLTLTLFEDREMIEERLKTYAHLFDDKVMKQLKRRRYTGWGRLSRKLINGIRDKQSGKTILDFLKSDGFANRNFMQLIHDDSLTFKEDIQKAQVSGQGDSLHEHIANLAGSPAIKKGILQTVKVVDELVKVMGRHKPENIVIEMARENQTTQKGQKNSRERMKRIEEGIKELGSQILKEHPVENTQLQNEKLYLYYLQNGRDMYVDQELDINRLSDYDVDHIVPQSFLKDDSIDNKVLTRSDKARGKSDNVPSEEVVKKMKNYWRQLLNAKLITQRKFDNLTKAERGGLSELDKAGFIKRQLVETRQITKHVAQILDSRMNTKYDENDKLIREVKVITLKSKLVSDFRKDFQFYKVREINNYHHAHDAYLNAVVGTALIKKYPKLESEFVYGDYKVYDVRKMIAKSEQEIGKATAKYFFYSNIMNFFKTEITLANGEIRKRPLIETNGETGEIVWDKGRDFATVRKVLSMPQVNIVKKTEVQTGGFSKESILPKRNSDKLIARKKDWDPKKYGGFDSPTVAYSVLVVAKVEKGKSKKLKSVKELLGITIMERSSFEKNPIDFLEAKGYKEVKKDLIIKLPKYSLFELENGRKRMLASAGELQKGNELALPSKYVNFLYLASHYEKLKGSPEDNEQKQLFVEQHKHYLDEIIEQISEFSKRVILADANLDKVLSAYNKHRDKPIREQAENIIHLFTLTNLGAPAAFKYFDTTIDRKRYTSTKEVLDATLIHQSITGLYETRIDLSQLGGDGGGGGGGTLNIEDEYRLHETSKGPDVPLGSTWLSDFPQAWAETGGMGLAVRQAPLIIPLKATSTPVSIKQYPMSQEARLGIKPHIQRLLDQGILVPCQSPWNTPLLPVKKPGTNDYRPVQDLREVNKRVEDIHPTVPNPYNLLSGLPPSHQWYTVLDLKDAFFCLRLHPTSQSLFAFEWRDPEMGISGQLTWTRLPQGFKNSPTLFNEALHRDLADFRIQHPDLILLQYVDDLLLAATSELDCQQGTRALLQTLGDLGYRASAKKAQICQKQVKYLGYLLKEGQRWLTEARKETVMGQPTPKTPRQLREFLGKAGFCRLFIPGFAEMAAPLYPLTKPGTLFEWGPDQQKAYQEIKQALLTAPALGLPDLTKPFELFVDEKQGYAKGVLTQKLGPWRRPVAYLSKKLDPVAAGWPPCLRMVAAIAVLTKDAGKLTMGQPLVILAPHAVEALVKQPPDRWLSNARMTHYQALLLDTDRVQFGPIVALNPATLLPLPEEGLQHDCLDILAEAHGTRPDLTDQPLPDADHTWYTDGSSFLQEGQRKAGAAVTTETEVVWAKALPAGTSAQRAELIALTQALKMAEGKKLNVYTDSRYAFATAHIHGEIYRRRGWLTSEGKEIKNKDEILALLKALFLPKRLSIIHCPGHQKGNRAEARGNRMADQAAREVATRETPETSTLLAGKRTADGSEFEKRTADGSEFESPKKKAKVE

SEQ ID NO: 2597 - protein, 2096 aa, synthetic construct
MPAAKRVKLDGGDKKYSIGLDIGTNSVGWAVITDEYKVPSKKFKVLGNTDRHSIKKNLIGALLFDSGETAEATRLKRTARRRYTRRKNRICYLQEIFSNEMAKVDDSFFHRLEESFLVEEDKKHERHPIFGNIVDEVAYHEKYPTIYHLRKKLVDSTDKADLRLIYLALAHMIKFRGHFLIEGDLNPDNSDVDKLFIQLVQTYNQLFEENPINASGVDAKAILSARLSKSRRLENLIAQLPGEKKNGLFGNLIALSLGLTPNFKSNFDLAEDAKLQLSKDTYDDDLDNLLAQIGDQYADLFLAAKNLSDAILLSDILRVNTEITKAPLSASMIKRYDEHHQDLTLLKALVRQQLPEKYKEIFFDQSKNGYAGYIDGGASQEEFYKFIKPILEKMDGTEELLVKLNREDLLRKQRTFDNGSIPHQIHLGELHAILRRQEDFYPFLKDNREKIEKILTFRIPYYVGPLARGNSRFAWMTRKSEETITPWNFEEVVDKGASAQSFIERMTNFDKNLPNEKVLPKHSLLYEYFTVYNELTKVKYVTEGMRKPAFLSGEQKKAIVDLLFKTNRKVTVKQLKEDYFKKIECFDSVEISGVEDRFNASLGTYHDLLKIIKDKDFLDNEENEDILEDIVLTLTLFEDREMIEERLKTYAHLFDDKVMKQLKRRRYTGWGRLSRKLINGIRDKQSGKTILDFLKSDGFANRNFMQLIHDDSLTFKEDIQKAQVSGQGDSLHEHIANLAGSPAIKKGILQTVKVVDELVKVMGRHKPENIVIEMARENQTTQKGQKNSRERMKRIEEGIKELGSQILKEHPVENTQLQNEKLYLYYLQNGRDMYVDQELDINRLSDYDVDHIVPQSFLKDDSIDNKVLTRSDKARGKSDNVPSEEVVKKMKNYWRQLLNAKLITQRKFDNLTKAERGGLSELDKAGFIKRQLVETRQITKHVAQILDSRMNTKYDENDKLIREVKVITLKSKLVSDFRKDFQFYKVREINNYHHAHDAYLNAVVGTALIKKYPKLESEFVYGDYKVYDVRKMIAKSEQEIGKATAKYFFYSNIMNFFKTEITLANGEIRKRPLIETNGETGEIVWDKGRDFATVRKVLSMPQVNIVKKTEVQTGGFSKESILPKRNSDKLIARKKDWDPKKYGGFDSPTVAYSVLVVAKVEKGKSKKLKSVKELLGITIMERSSFEKNPIDFLEAKGYKEVKKDLIIKLPKYSLFELENGRKRMLASAGELQKGNELALPSKYVNFLYLASHYEKLKGSPEDNEQKQLFVEQHKHYLDEIIEQISEFSKRVILADANLDKVLSAYNKHRDKPIREQAENIIHLFTLTNLGAPAAFKYFDTTIDRKRYTSTKEVLDATLIHQSITGLYETRIDLSQLGGDGGGGGGGSEAAAKGGTLNIEDEYRLHETSKGPDVPLGSTWLSDFPQAWAETGGMGLAVRQAPLIIPLKATSTPVSIKQYPMSQEARLGIKPHIQRLLDQGILVPCQSPWNTPLLPVKKPGTNDYRPVQDLREVNKRVEDIHPTVPNPYNLLSGLPPSHQWYTVLDLKDAFFCLRLHPTSQSLFAFEWRDPEMGISGQLTWTRLPQGFKNSPTLFNEALHRDLADFRIQHPDLILLQYVDDLLLAATSELDCQQGTRALLQTLGDLGYRASAKKAQICQKQVKYLGYLLKEGQRWLTEARKETVMGQPTPKTPRQLREFLGKAGFCRLFIPGFAEMAAPLYPLTKPGTLFEWGPDQQKAYQEIKQALLTAPALGLPDLTKPFELFVDEKQGYAKGVLTQKLGPWRRPVAYLSKKLDPVAAGWPPCLRMVAAIAVLTKDAGKLTMGQPLVILAPHAVEALVKQPPDRWLSNARMTHYQALLLDTDRVQFGPIVALNPATLLPLPEEGLQHDCLDILAEAHGTRPDLTDQPLPDADHTWYTDGSSFLQEGQRKAGAAVTTETEVVWAKALPAGTSAQRAELIALTQALKMAEGKKLNVYTDSRYAFATAHIHGEIYRRRGWLTSEGKEIKNKDEILALLKALFLPKRLSIIHCPGHQKGNRAEARGNRMADQAAREVATRETPETSTLLAGKRTADGSEFEKRTADGSEFESPKKKAKVE

SEQ ID NO: 2598 - protein, 2110 aa, synthetic construct
MPAAKRVKLDGGDKKYSIGLDIGTNSVGWAVITDEYKVPSKKFKVLGNTDRHSIKKNLIGALLFDSGETAEATRLKRTARRRYTRRKNRICYLQEIFSNEMAKVDDSFFHRLEESFLVEEDKKHERHPIFGNIVDEVAYHEKYPTIYHLRKKLVDSTDKADLRLIYLALAHMIKFRGHFLIEGDLNPDNSDVDKLFIQLVQTYNQLFEENPINASGVDAKAILSARLSKSRRLENLIAQLPGEKKNGLFGNLIALSLGLTPNFKSNFDLAEDAKLQLSKDTYDDDLDNLLAQIGDQYADLFLAAKNLSDAILLSDILRVNTEITKAPLSASMIKRYDEHHQDLTLLKALVRQQLPEKYKEIFFDQSKNGYAGYIDGGASQEEFYKFIKPILEKMDGTEELLVKLNREDLLRKQRTFDNGSIPHQIHLGELHAILRRQEDFYPFLKDNREKIEKILTFRIPYYVGPLARGNSRFAWMTRKSEETITPWNFEEVVDKGASAQSFIERMTNFDKNLPNEKVLPKHSLLYEYFTVYNELTKVKYVTEGMRKPAFLSGEQKKAIVDLLFKTNRKVTVKQLKEDYFKKIECFDSVEISGVEDRFNASLGTYHDLLKIIKDKDFLDNEENEDILEDIVLTLTLFEDREMIEERLKTYAHLFDDKVMKQLKRRRYTGWGRLSRKLINGIRDKQSGKTILDFLKSDGFANRNFMQLIHDDSLTFKEDIQKAQVSGQGDSLHEHIANLAGSPAIKKGILQTVKVVDELVKVMGRHKPENIVIEMARENQTTQKGQKNSRERMKRIEEGIKELGSQILKEHPVENTQLQNEKLYLYYLQNGRDMYVDQELDINRLSDYDVDHIVPQSFLKDDSIDNKVLTRSDKARGKSDNVPSEEVVKKMKNYWRQLLNAKLITQRKFDNLTKAERGGLSELDKAGFIKRQLVETRQITKHVAQILDSRMNTKYDENDKLIREVKVITLKSKLVSDFRKDFQFYKVREINNYHHAHDAYLNAVVGTALIKKYPKLESEFVYGDYKVYDVRKMIAKSEQEIGKATAKYFFYSNIMNFFKTEITLANGEIRKRPLIETNGETGEIVWDKGRDFATVRKVLSMPQVNIVKKTEVQTGGFSKESILPKRNSDKLIARKKDWDPKKYGGFDSPTVAYSVLVVAKVEKGKSKKLKSVKELLGITIMERSSFEKNPIDFLEAKGYKEVKKDLIIKLPKYSLFELENGRKRMLASAGELQKGNELALPSKYVNFLYLASHYEKLKGSPEDNEQKQLFVEQHKHYLDEIIEQISEFSKRVILADANLDKVLSAYNKHRDKPIREQAENIIHLFTLTNLGAPAAFKYFDTTIDRKRYTSTKEVLDATLIHQSITGLYETRIDLSQLGGDGGGGGGSGGGGSGGGGSGGGGSGGGGSGGTLNIEDEYRLHETSKGPDVPLGSTWLSDFPQAWAETGGMGLAVRQAPLIIPLKATSTPVSIKQYPMSQEARLGIKPHIQRLLDQGILVPCQSPWNTPLLPVKKPGTNDYRPVQDLREVNKRVEDIHPTVPNPYNLLSGLPPSHQWYTVLDLKDAFFCLRLHPTSQSLFAFEWRDPEMGISGQLTWTRLPQGFKNSPTLFNEALHRDLADFRIQHPDLILLQYVDDLLLAATSELDCQQGTRALLQTLGDLGYRASAKKAQICQKQVKYLGYLLKEGQRWLTEARKETVMGQPTPKTPRQLREFLGKAGFCRLFIPGFAEMAAPLYPLTKPGTLFEWGPDQQKAYQEIKQALLTAPALGLPDLTKPFELFVDEKQGYAKGVLTQKLGPWRRPVAYLSKKLDPVAAGWPPCLRMVAAIAVLTKDAGKLTMGQPLVILAPHAVEALVKQPPDRWLSNARMTHYQALLLDTDRVQFGPIVALNPATLLPLPEEGLQHDCLDILAEAHGTRPDLTDQPLPDADHTWYTDGSSFLQEGQRKAGAAVTTETEVVWAKALPAGTSAQRAELIALTQALKMAEGKKLNVYTDSRYAFATAHIHGEIYRRRGWLTSEGKEIKNKDEILALLKALFLPKRLSIIHCPGHQKGNRAEARGNRMADQAAREVATRETPETSTLLAGKRTADGSEFEKRTADGSEFESPKKKAKVE

SEQ ID NO: 2599 - protein, 2096 aa, synthetic construct
MPAAKRVKLDGGDKKYSIGLDIGTNSVGWAVITDEYKVPSKKFKVLGNTDRHSIKKNLIGALLFDSGETAEATRLKRTARRRYTRRKNRICYLQEIFSNEMAKVDDSFFHRLEESFLVEEDKKHERHPIFGNIVDEVAYHEKYPTIYHLRKKLVDSTDKADLRLIYLALAHMIKFRGHFLIEGDLNPDNSDVDKLFIQLVQTYNQLFEENPINASGVDAKAILSARLSKSRRLENLIAQLPGEKKNGLFGNLIALSLGLTPNFKSNFDLAEDAKLQLSKDTYDDDLDNLLAQIGDQYADLFLAAKNLSDAILLSDILRVNTEITKAPLSASMIKRYDEHHQDLTLLKALVRQQLPEKYKEIFFDQSKNGYAGYIDGGASQEEFYKFIKPILEKMDGTEELLVKLNREDLLRKQRTFDNGSIPHQIHLGELHAILRRQEDFYPFLKDNREKIEKILTFRIPYYVGPLARGNSRFAWMTRKSEETITPWNFEEVVDKGASAQSFIERMTNFDKNLPNEKVLPKHSLLYEYFTVYNELTKVKYVTEGMRKPAFLSGEQKKAIVDLLFKTNRKVTVKQLKEDYFKKIECFDSVEISGVEDRFNASLGTYHDLLKIIKDKDFLDNEENEDILEDIVLTLTLFEDREMIEERLKTYAHLFDDKVMKQLKRRRYTGWGRLSRKLINGIRDKQSGKTILDFLKSDGFANRNFMQLIHDDSLTFKEDIQKAQVSGQGDSLHEHIANLAGSPAIKKGILQTVKVVDELVKVMGRHKPENIVIEMARENQTTQKGQKNSRERMKRIEEGIKELGSQILKEHPVENTQLQNEKLYLYYLQNGRDMYVDQELDINRLSDYDVDHIVPQSFLKDDSIDNKVLTRSDKARGKSDNVPSEEVVKKMKNYWRQLLNAKLITQRKFDNLTKAERGGLSELDKAGFIKRQLVETRQITKHVAQILDSRMNTKYDENDKLIREVKVITLKSKLVSDFRKDFQFYKVREINNYHHAHDAYLNAVVGTALIKKYPKLESEFVYGDYKVYDVRKMIAKSEQEIGKATAKYFFYSNIMNFFKTEITLANGEIRKRPLIETNGETGEIVWDKGRDFATVRKVLSMPQVNIVKKTEVQTGGFSKESILPKRNSDKLIARKKDWDPKKYGGFDSPTVAYSVLVVAKVEKGKSKKLKSVKELLGITIMERSSFEKNPIDFLEAKGYKEVKKDLIIKLPKYSLFELENGRKRMLASAGELQKGNELALPSKYVNFLYLASHYEKLKGSPEDNEQKQLFVEQHKHYLDEIIEQISEFSKRVILADANLDKVLSAYNKHRDKPIREQAENIIHLFTLTNLGAPAAFKYFDTTIDRKRYTSTKEVLDATLIHQSITGLYETRIDLSQLGGDGGGSSPAPEAAAKGGTLNIEDEYRLHETSKGPDVPLGSTWLSDFPQAWAETGGMGLAVRQAPLIIPLKATSTPVSIKQYPMSQEARLGIKPHIQRLLDQGILVPCQSPWNTPLLPVKKPGTNDYRPVQDLREVNKRVEDIHPTVPNPYNLLSGLPPSHQWYTVLDLKDAFFCLRLHPTSQSLFAFEWRDPEMGISGQLTWTRLPQGFKNSPTLFNEALHRDLADFRIQHPDLILLQYVDDLLLAATSELDCQQGTRALLQTLGDLGYRASAKKAQICQKQVKYLGYLLKEGQRWLTEARKETVMGQPTPKTPRQLREFLGKAGFCRLFIPGFAEMAAPLYPLTKPGTLFEWGPDQQKAYQEIKQALLTAPALGLPDLTKPFELFVDEKQGYAKGVLTQKLGPWRRPVAYLSKKLDPVAAGWPPCLRMVAAIAVLTKDAGKLTMGQPLVILAPHAVEALVKQPPDRWLSNARMTHYQALLLDTDRVQFGPIVALNPATLLPLPEEGLQHDCLDILAEAHGTRPDLTDQPLPDADHTWYTDGSSFLQEGQRKAGAAVTTETEVVWAKALPAGTSAQRAELIALTQALKMAEGKKLNVYTDSRYAFATAHIHGEIYRRRGWLTSEGKEIKNKDEILALLKALFLPKRLSIIHCPGHQKGNRAEARGNRMADQAAREVATRETPETSTLLAGKRTADGSEFEKRTADGSEFESPKKKAKVE

SEQ ID NO: 2600 - protein, 2093 aa, synthetic construct
MPAAKRVKLDGGDKKYSIGLDIGTNSVGWAVITDEYKVPSKKFKVLGNTDRHSIKKNLIGALLFDSGETAEATRLKRTARRRYTRRKNRICYLQEIFSNEMAKVDDSFFHRLEESFLVEEDKKHERHPIFGNIVDEVAYHEKYPTIYHLRKKLVDSTDKADLRLIYLALAHMIKFRGHFLIEGDLNPDNSDVDKLFIQLVQTYNQLFEENPINASGVDAKAILSARLSKSRRLENLIAQLPGEKKNGLFGNLIALSLGLTPNFKSNFDLAEDAKLQLSKDTYDDDLDNLLAQIGDQYADLFLAAKNLSDAILLSDILRVNTEITKAPLSASMIKRYDEHHQDLTLLKALVRQQLPEKYKEIFFDQSKNGYAGYIDGGASQEEFYKFIKPILEKMDGTEELLVKLNREDLLRKQRTFDNGSIPHQIHLGELHAILRRQEDFYPFLKDNREKIEKILTFRIPYYVGPLARGNSRFAWMTRKSEETITPWNFEEVVDKGASAQSFIERMTNFDKNLPNEKVLPKHSLLYEYFTVYNELTKVKYVTEGMRKPAFLSGEQKKAIVDLLFKTNRKVTVKQLKEDYFKKIECFDSVEISGVEDRFNASLGTYHDLLKIIKDKDFLDNEENEDILEDIVLTLTLFEDREMIEERLKTYAHLFDDKVMKQLKRRRYTGWGRLSRKLINGIRDKQSGKTILDFLKSDGFANRNFMQLIHDDSLTFKEDIQKAQVSGQGDSLHEHIANLAGSPAIKKGILQTVKVVDELVKVMGRHKPENIVIEMARENQTTQKGQKNSRERMKRIEEGIKELGSQILKEHPVENTQLQNEKLYLYYLQNGRDMYVDQELDINRLSDYDVDHIVPQSFLKDDSIDNKVLTRSDKARGKSDNVPSEEVVKKMKNYWRQLLNAKLITQRKFDNLTKAERGGLSELDKAGFIKRQLVETRQITKHVAQILDSRMNTKYDENDKLIREVKVITLKSKLVSDFRKDFQFYKVREINNYHHAHDAYLNAVVGTALIKKYPKLESEFVYGDYKVYDVRKMIAKSEQEIGKATAKYFFYSNIMNFFKTEITLANGEIRKRPLIETNGETGEIVWDKGRDFATVRKVLSMPQVNIVKKTEVQTGGFSKESILPKRNSDKLIARKKDWDPKKYGGFDSPTVAYSVLVVAKVEKGKSKKLKSVKELLGITIMERSSFEKNPIDFLEAKGYKEVKKDLIIKLPKYSLFELENGRKRMLASAGELQKGNELALPSKYVNFLYLASHYEKLKGSPEDNEQKQLFVEQHKHYLDEIIEQISEFSKRVILADANLDKVLSAYNKHRDKPIREQAENIIHLFTLTNLGAPAAFKYFDTTIDRKRYTSTKEVLDATLIHQSITGLYETRIDLSQLGGDGGGGSEAAAKGGTLNIEDEYRLHETSKGPDVPLGSTWLSDFPQAWAETGGMGLAVRQAPLIIPLKATSTPVSIKQYPMSQEARLGIKPHIQRLLDQGILVPCQSPWNTPLLPVKKPGTNDYRPVQDLREVNKRVEDIHPTVPNPYNLLSGLPPSHQWYTVLDLKDAFFCLRLHPTSQSLFAFEWRDPEMGISGQLTWTRLPQGFKNSPTLFNEALHRDLADFRIQHPDLILLQYVDDLLLAATSELDCQQGTRALLQTLGDLGYRASAKKAQICQKQVKYLGYLLKEGQRWLTEARKETVMGQPTPKTPRQLREFLGKAGFCRLFIPGFAEMAAPLYPLTKPGTLFEWGPDQQKAYQEIKQALLTAPALGLPDLTKPFELFVDEKQGYAKGVLTQKLGPWRRPVAYLSKKLDPVAAGWPPCLRMVAAIAVLTKDAGKLTMGQPLVILAPHAVEALVKQPPDRWLSNARMTHYQALLLDTDRVQFGPIVALNPATLLPLPEEGLQHDCLDILAEAHGTRPDLTDQPLPDADHTWYTDGSSFLQEGQRKAGAAVTTETEVVWAKALPAGTSAQRAELIALTQALKMAEGKKLNVYTDSRYAFATAHIHGEIYRRRGWLTSEGKEIKNKDEILALLKALFLPKRLSIIHCPGHQKGNRAEARGNRMADQAAREVATRETPETSTLLAGKRTADGSEFEKRTADGSEFESPKKKAKVE

SEQ ID NO: 2601 - protein, 2094 aa, synthetic construct
MPAAKRVKLDGGDKKYSIGLDIGTNSVGWAVITDEYKVPSKKFKVLGNTDRHSIKKNLIGALLFDSGETAEATRLKRTARRRYTRRKNRICYLQEIFSNEMAKVDDSFFHRLEESFLVEEDKKHERHPIFGNIVDEVAYHEKYPTIYHLRKKLVDSTDKADLRLIYLALAHMIKFRGHFLIEGDLNPDNSDVDKLFIQLVQTYNQLFEENPINASGVDAKAILSARLSKSRRLENLIAQLPGEKKNGLFGNLIALSLGLTPNFKSNFDLAEDAKLQLSKDTYDDDLDNLLAQIGDQYADLFLAAKNLSDAILLSDILRVNTEITKAPLSASMIKRYDEHHQDLTLLKALVRQQLPEKYKEIFFDQSKNGYAGYIDGGASQEEFYKFIKPILEKMDGTEELLVKLNREDLLRKQRTFDNGSIPHQIHLGELHAILRRQEDFYPFLKDNREKIEKILTFRIPYYVGPLARGNSRFAWMTRKSEETITPWNFEEVVDKGASAQSFIERMTNFDKNLPNEKVLPKHSLLYEYFTVYNELTKVKYVTEGMRKPAFLSGEQKKAIVDLLFKTNRKVTVKQLKEDYFKKIECFDSVEISGVEDRFNASLGTYHDLLKIIKDKDFLDNEENEDILEDIVLTLTLFEDREMIEERLKTYAHLFDDKVMKQLKRRRYTGWGRLSRKLINGIRDKQSGKTILDFLKSDGFANRNFMQLIHDDSLTFKEDIQKAQVSGQGDSLHEHIANLAGSPAIKKGILQTVKVVDELVKVMGRHKPENIVIEMARENQTTQKGQKNSRERMKRIEEGIKELGSQILKEHPVENTQLQNEKLYLYYLQNGRDMYVDQELDINRLSDYDVDHIVPQSFLKDDSIDNKVLTRSDKARGKSDNVPSEEVVKKMKNYWRQLLNAKLITQRKFDNLTKAERGGLSELDKAGFIKRQLVETRQITKHVAQILDSRMNTKYDENDKLIREVKVITLKSKLVSDFRKDFQFYKVREINNYHHAHDAYLNAVVGTALIKKYPKLESEFVYGDYKVYDVRKMIAKSEQEIGKATAKYFFYSNIMNFFKTEITLANGEIRKRPLIETNGETGEIVWDKGRDFATVRKVLSMPQVNIVKKTEVQTGGFSKESILPKRNSDKLIARKKDWDPKKYGGFDSPTVAYSVLVVAKVEKGKSKKLKSVKELLGITIMERSSFEKNPIDFLEAKGYKEVKKDLIIKLPKYSLFELENGRKRMLASAGELQKGNELALPSKYVNFLYLASHYEKLKGSPEDNEQKQLFVEQHKHYLDEIIEQISEFSKRVILADANLDKVLSAYNKHRDKPIREQAENIIHLFTLTNLGAPAAFKYFDTTIDRKRYTSTKEVLDATLIHQSITGLYETRIDLSQLGGDGGGGSGGGGSSGGTLNIEDEYRLHETSKGPDVPLGSTWLSDFPQAWAETGGMGLAVRQAPLIIPLKATSTPVSIKQYPMSQEARLGIKPHIQRLLDQGILVPCQSPWNTPLLPVKKPGTNDYRPVQDLREVNKRVEDIHPTVPNPYNLLSGLPPSHQWYTVLDLKDAFFCLRLHPTSQSLFAFEWRDPEMGISGQLTWTRLPQGFKNSPTLFNEALHRDLADFRIQHPDLILLQYVDDLLLAATSELDCQQGTRALLQTLGDLGYRASAKKAQICQKQVKYLGYLLKEGQRWLTEARKETVMGQPTPKTPRQLREFLGKAGFCRLFIPGFAEMAAPLYPLTKPGTLFEWGPDQQKAYQEIKQALLTAPALGLPDLTKPFELFVDEKQGYAKGVLTQKLGPWRRPVAYLSKKLDPVAAGWPPCLRMVAAIAVLTKDAGKLTMGQPLVILAPHAVEALVKQPPDRWLSNARMTHYQALLLDTDRVQFGPIVALNPATLLPLPEEGLQHDCLDILAEAHGTRPDLTDQPLPDADHTWYTDGSSFLQEGQRKAGAAVTTETEVVWAKALPAGTSAQRAELIALTQALKMAEGKKLNVYTDSRYAFATAHIHGEIYRRRGWLTSEGKEIKNKDEILALLKALFLPKRLSIIHCPGHQKGNRAEARGNRMADQAAREVATRETPETSTLLAGKRTADGSEFEKRTADGSEFESPKKKAKVE

SEQ ID NO: 2602 - protein, 2089 aa, synthetic construct
MPAAKRVKLDGGDKKYSIGLDIGTNSVGWAVITDEYKVPSKKFKVLGNTDRHSIKKNLIGALLFDSGETAEATRLKRTARRRYTRRKNRICYLQEIFSNEMAKVDDSFFHRLEESFLVEEDKKHERHPIFGNIVDEVAYHEKYPTIYHLRKKLVDSTDKADLRLIYLALAHMIKFRGHFLIEGDLNPDNSDVDKLFIQLVQTYNQLFEENPINASGVDAKAILSARLSKSRRLENLIAQLPGEKKNGLFGNLIALSLGLTPNFKSNFDLAEDAKLQLSKDTYDDDLDNLLAQIGDQYADLFLAAKNLSDAILLSDILRVNTEITKAPLSASMIKRYDEHHQDLTLLKALVRQQLPEKYKEIFFDQSKNGYAGYIDGGASQEEFYKFIKPILEKMDGTEELLVKLNREDLLRKQRTFDNGSIPHQIHLGELHAILRRQEDFYPFLKDNREKIEKILTFRIPYYVGPLARGNSRFAWMTRKSEETITPWNFEEVVDKGASAQSFIERMTNFDKNLPNEKVLPKHSLLYEYFTVYNELTKVKYVTEGMRKPAFLSGEQKKAIVDLLFKTNRKVTVKQLKEDYFKKIECFDSVEISGVEDRFNASLGTYHDLLKIIKDKDFLDNEENEDILEDIVLTLTLFEDREMIEERLKTYAHLFDDKVMKQLKRRRYTGWGRLSRKLINGIRDKQSGKTILDFLKSDGFANRNFMQLIHDDSLTFKEDIQKAQVSGQGDSLHEHIANLAGSPAIKKGILQTVKVVDELVKVMGRHKPENIVIEMARENQTTQKGQKNSRERMKRIEEGIKELGSQILKEHPVENTQLQNEKLYLYYLQNGRDMYVDQELDINRLSDYDVDHIVPQSFLKDDSIDNKVLTRSDKARGKSDNVPSEEVVKKMKNYWRQLLNAKLITQRKFDNLTKAERGGLSELDKAGFIKRQLVETRQITKHVAQILDSRMNTKYDENDKLIREVKVITLKSKLVSDFRKDFQFYKVREINNYHHAHDAYLNAVVGTALIKKYPKLESEFVYGDYKVYDVRKMIAKSEQEIGKATAKYFFYSNIMNFFKTEITLANGEIRKRPLIETNGETGEIVWDKGRDFATVRKVLSMPQVNIVKKTEVQTGGFSKESILPKRNSDKLIARKKDWDPKKYGGFDSPTVAYSVLVVAKVEKGKSKKLKSVKELLGITIMERSSFEKNPIDFLEAKGYKEVKKDLIIKLPKYSLFELENGRKRMLASAGELQKGNELALPSKYVNFLYLASHYEKLKGSPEDNEQKQLFVEQHKHYLDEIIEQISEFSKRVILADANLDKVLSAYNKHRDKPIREQAENIIHLFTLTNLGAPAAFKYFDTTIDRKRYTSTKEVLDATLIHQSITGLYETRIDLSQLGGDGGGGGGGGTLNIEDEYRLHETSKGPDVPLGSTWLSDFPQAWAETGGMGLAVRQAPLIIPLKATSTPVSIKQYPMSQEARLGIKPHIQRLLDQGILVPCQSPWNTPLLPVKKPGTNDYRPVQDLREVNKRVEDIHPTVPNPYNLLSGLPPSHQWYTVLDLKDAFFCLRLHPTSQSLFAFEWRDPEMGISGQLTWTRLPQGFKNSPTLFNEALHRDLADFRIQHPDLILLQYVDDLLLAATSELDCQQGTRALLQTLGDLGYRASAKKAQICQKQVKYLGYLLKEGQRWLTEARKETVMGQPTPKTPRQLREFLGKAGFCRLFIPGFAEMAAPLYPLTKPGTLFEWGPDQQKAYQEIKQALLTAPALGLPDLTKPFELFVDEKQGYAKGVLTQKLGPWRRPVAYLSKKLDPVAAGWPPCLRMVAAIAVLTKDAGKLTMGQPLVILAPHAVEALVKQPPDRWLSNARMTHYQALLLDTDRVQFGPIVALNPATLLPLPEEGLQHDCLDILAEAHGTRPDLTDQPLPDADHTWYTDGSSFLQEGQRKAGAAVTTETEVVWAKALPAGTSAQRAELIALTQALKMAEGKKLNVYTDSRYAFATAHIHGEIYRRRGWLTSEGKEIKNKDEILALLKALFLPKRLSIIHCPGHQKGNRAEARGNRMADQAAREVATRETPETSTLLAGKRTADGSEFEKRTADGSEFESPKKKAKVE

SEQ ID NO: 2603 - protein, 2096 aa, synthetic construct
MPAAKRVKLDGGDKKYSIGLDIGTNSVGWAVITDEYKVPSKKFKVLGNTDRHSIKKNLIGALLFDSGETAEATRLKRTARRRYTRRKNRICYLQEIFSNEMAKVDDSFFHRLEESFLVEEDKKHERHPIFGNIVDEVAYHEKYPTIYHLRKKLVDSTDKADLRLIYLALAHMIKFRGHFLIEGDLNPDNSDVDKLFIQLVQTYNQLFEENPINASGVDAKAILSARLSKSRRLENLIAQLPGEKKNGLFGNLIALSLGLTPNFKSNFDLAEDAKLQLSKDTYDDDLDNLLAQIGDQYADLFLAAKNLSDAILLSDILRVNTEITKAPLSASMIKRYDEHHQDLTLLKALVRQQLPEKYKEIFFDQSKNGYAGYIDGGASQEEFYKFIKPILEKMDGTEELLVKLNREDLLRKQRTFDNGSIPHQIHLGELHAILRRQEDFYPFLKDNREKIEKILTFRIPYYVGPLARGNSRFAWMTRKSEETITPWNFEEVVDKGASAQSFIERMTNFDKNLPNEKVLPKHSLLYEYFTVYNELTKVKYVTEGMRKPAFLSGEQKKAIVDLLFKTNRKVTVKQLKEDYFKKIECFDSVEISGVEDRFNASLGTYHDLLKIIKDKDFLDNEENEDILEDIVLTLTLFEDREMIEERLKTYAHLFDDKVMKQLKRRRYTGWGRLSRKLINGIRDKQSGKTILDFLKSDGFANRNFMQLIHDDSLTFKEDIQKAQVSGQGDSLHEHIANLAGSPAIKKGILQTVKVVDELVKVMGRHKPENIVIEMARENQTTQKGQKNSRERMKRIEEGIKELGSQILKEHPVENTQLQNEKLYLYYLQNGRDMYVDQELDINRLSDYDVDHIVPQSFLKDDSIDNKVLTRSDKARGKSDNVPSEEVVKKMKNYWRQLLNAKLITQRKFDNLTKAERGGLSELDKAGFIKRQLVETRQITKHVAQILDSRMNTKYDENDKLIREVKVITLKSKLVSDFRKDFQFYKVREINNYHHAHDAYLNAVVGTALIKKYPKLESEFVYGDYKVYDVRKMIAKSEQEIGKATAKYFFYSNIMNFFKTEITLANGEIRKRPLIETNGETGEIVWDKGRDFATVRKVLSMPQVNIVKKTEVQTGGFSKESILPKRNSDKLIARKKDWDPKKYGGFDSPTVAYSVLVVAKVEKGKSKKLKSVKELLGITIMERSSFEKNPIDFLEAKGYKEVKKDLIIKLPKYSLFELENGRKRMLASAGELQKGNELALPSKYVNFLYLASHYEKLKGSPEDNEQKQLFVEQHKHYLDEIIEQISEFSKRVILADANLDKVLSAYNKHRDKPIREQAENIIHLFTLTNLGAPAAFKYFDTTIDRKRYTSTKEVLDATLIHQSITGLYETRIDLSQLGGDGGGGSGGGEAAAKGGTLNIEDEYRLHETSKGPDVPLGSTWLSDFPQAWAETGGMGLAVRQAPLIIPLKATSTPVSIKQYPMSQEARLGIKPHIQRLLDQGILVPCQSPWNTPLLPVKKPGTNDYRPVQDLREVNKRVEDIHPTVPNPYNLLSGLPPSHQWYTVLDLKDAFFCLRLHPTSQSLFAFEWRDPEMGISGQLTWTRLPQGFKNSPTLFNEALHRDLADFRIQHPDLILLQYVDDLLLAATSELDCQQGTRALLQTLGDLGYRASAKKAQICQKQVKYLGYLLKEGQRWLTEARKETVMGQPTPKTPRQLREFLGKAGFCRLFIPGFAEMAAPLYPLTKPGTLFEWGPDQQKAYQEIKQALLTAPALGLPDLTKPFELFVDEKQGYAKGVLTQKLGPWRRPVAYLSKKLDPVAAGWPPCLRMVAAIAVLTKDAGKLTMGQPLVILAPHAVEALVKQPPDRWLSNARMTHYQALLLDTDRVQFGPIVALNPATLLPLPEEGLQHDCLDILAEAHGTRPDLTDQPLPDADHTWYTDGSSFLQEGQRKAGAAVTTETEVVWAKALPAGTSAQRAELIALTQALKMAEGKKLNVYTDSRYAFATAHIHGEIYRRRGWLTSEGKEIKNKDEILALLKALFLPKRLSIIHCPGHQKGNRAEARGNRMADQAAREVATRETPETSTLLAGKRTADGSEFEKRTADGSEFESPKKKAKVE

SEQ ID NO: 2604 - protein, 2091 aa, synthetic construct
MPAAKRVKLDGGDKKYSIGLDIGTNSVGWAVITDEYKVPSKKFKVLGNTDRHSIKKNLIGALLFDSGETAEATRLKRTARRRYTRRKNRICYLQEIFSNEMAKVDDSFFHRLEESFLVEEDKKHERHPIFGNIVDEVAYHEKYPTIYHLRKKLVDSTDKADLRLIYLALAHMIKFRGHFLIEGDLNPDNSDVDKLFIQLVQTYNQLFEENPINASGVDAKAILSARLSKSRRLENLIAQLPGEKKNGLFGNLIALSLGLTPNFKSNFDLAEDAKLQLSKDTYDDDLDNLLAQIGDQYADLFLAAKNLSDAILLSDILRVNTEITKAPLSASMIKRYDEHHQDLTLLKALVRQQLPEKYKEIFFDQSKNGYAGYIDGGASQEEFYKFIKPILEKMDGTEELLVKLNREDLLRKQRTFDNGSIPHQIHLGELHAILRRQEDFYPFLKDNREKIEKILTFRIPYYVGPLARGNSRFAWMTRKSEETITPWNFEEVVDKGASAQSFIERMTNFDKNLPNEKVLPKHSLLYEYFTVYNELTKVKYVTEGMRKPAFLSGEQKKAIVDLLFKTNRKVTVKQLKEDYFKKIECFDSVEISGVEDRFNASLGTYHDLLKIIKDKDFLDNEENEDILEDIVLTLTLFEDREMIEERLKTYAHLFDDKVMKQLKRRRYTGWGRLSRKLINGIRDKQSGKTILDFLKSDGFANRNFMQLIHDDSLTFKEDIQKAQVSGQGDSLHEHIANLAGSPAIKKGILQTVKVVDELVKVMGRHKPENIVIEMARENQTTQKGQKNSRERMKRIEEGIKELGSQILKEHPVENTQLQNEKLYLYYLQNGRDMYVDQELDINRLSDYDVDHIVPQSFLKDDSIDNKVLTRSDKARGKSDNVPSEEVVKKMKNYWRQLLNAKLITQRKFDNLTKAERGGLSELDKAGFIKRQLVETRQITKHVAQILDSRMNTKYDENDKLIREVKVITLKSKLVSDFRKDFQFYKVREINNYHHAHDAYLNAVVGTALIKKYPKLESEFVYGDYKVYDVRKMIAKSEQEIGKATAKYFFYSNIMNFFKTEITLANGEIRKRPLIETNGETGEIVWDKGRDFATVRKVLSMPQVNIVKKTEVQTGGFSKESILPKRNSDKLIARKKDWDPKKYGGFDSPTVAYSVLVVAKVEKGKSKKLKSVKELLGITIMERSSFEKNPIDFLEAKGYKEVKKDLIIKLPKYSLFELENGRKRMLASAGELQKGNELALPSKYVNFLYLASHYEKLKGSPEDNEQKQLFVEQHKHYLDEIIEQISEFSKRVILADANLDKVLSAYNKHRDKPIREQAENIIHLFTLTNLGAPAAFKYFDTTIDRKRYTSTKEVLDATLIHQSITGLYETRIDLSQLGGDGGGGSGGSGGTLNIEDEYRLHETSKGPDVPLGSTWLSDFPQAWAETGGMGLAVRQAPLIIPLKATSTPVSIKQYPMSQEARLGIKPHIQRLLDQGILVPCQSPWNTPLLPVKKPGTNDYRPVQDLREVNKRVEDIHPTVPNPYNLLSGLPPSHQWYTVLDLKDAFFCLRLHPTSQSLFAFEWRDPEMGISGQLTWTRLPQGFKNSPTLFNEALHRDLADFRIQHPDLILLQYVDDLLLAATSELDCQQGTRALLQTLGDLGYRASAKKAQICQKQVKYLGYLLKEGQRWLTEARKETVMGQPTPKTPRQLREFLGKAGFCRLFIPGFAEMAAPLYPLTKPGTLFEWGPDQQKAYQEIKQALLTAPALGLPDLTKPFELFVDEKQGYAKGVLTQKLGPWRRPVAYLSKKLDPVAAGWPPCLRMVAAIAVLTKDAGKLTMGQPLVILAPHAVEALVKQPPDRWLSNARMTHYQALLLDTDRVQFGPIVALNPATLLPLPEEGLQHDCLDILAEAHGTRPDLTDQPLPDADHTWYTDGSSFLQEGQRKAGAAVTTETEVVWAKALPAGTSAQRAELIALTQALKMAEGKKLNVYTDSRYAFATAHIHGEIYRRRGWLTSEGKEIKNKDEILALLKALFLPKRLSIIHCPGHQKGNRAEARGNRMADQAAREVATRETPETSTLLAGKRTADGSEFEKRTADGSEFESPKKKAKVE

SEQ ID NO: 2605 - protein, 2094 aa, synthetic construct
MPAAKRVKLDGGDKKYSIGLDIGTNSVGWAVITDEYKVPSKKFKVLGNTDRHSIKKNLIGALLFDSGETAEATRLKRTARRRYTRRKNRICYLQEIFSNEMAKVDDSFFHRLEESFLVEEDKKHERHPIFGNIVDEVAYHEKYPTIYHLRKKLVDSTDKADLRLIYLALAHMIKFRGHFLIEGDLNPDNSDVDKLFIQLVQTYNQLFEENPINASGVDAKAILSARLSKSRRLENLIAQLPGEKKNGLFGNLIALSLGLTPNFKSNFDLAEDAKLQLSKDTYDDDLDNLLAQIGDQYADLFLAAKNLSDAILLSDILRVNTEITKAPLSASMIKRYDEHHQDLTLLKALVRQQLPEKYKEIFFDQSKNGYAGYIDGGASQEEFYKFIKPILEKMDGTEELLVKLNREDLLRKQRTFDNGSIPHQIHLGELHAILRRQEDFYPFLKDNREKIEKILTFRIPYYVGPLARGNSRFAWMTRKSEETITPWNFEEVVDKGASAQSFIERMTNFDKNLPNEKVLPKHSLLYEYFTVYNELTKVKYVTEGMRKPAFLSGEQKKAIVDLLFKTNRKVTVKQLKEDYFKKIECFDSVEISGVEDRFNASLGTYHDLLKIIKDKDFLDNEENEDILEDIVLTLTLFEDREMIEERLKTYAHLFDDKVMKQLKRRRYTGWGRLSRKLINGIRDKQSGKTILDFLKSDGFANRNFMQLIHDDSLTFKEDIQKAQVSGQGDSLHEHIANLAGSPAIKKGILQTVKVVDELVKVMGRHKPENIVIEMARENQTTQKGQKNSRERMKRIEEGIKELGSQILKEHPVENTQLQNEKLYLYYLQNGRDMYVDQELDINRLSDYDVDHIVPQSFLKDDSIDNKVLTRSDKARGKSDNVPSEEVVKKMKNYWRQLLNAKLITQRKFDNLTKAERGGLSELDKAGFIKRQLVETRQITKHVAQILDSRMNTKYDENDKLIREVKVITLKSKLVSDFRKDFQFYKVREINNYHHAHDAYLNAVVGTALIKKYPKLESEFVYGDYKVYDVRKMIAKSEQEIGKATAKYFFYSNIMNFFKTEITLANGEIRKRPLIETNGETGEIVWDKGRDFATVRKVLSMPQVNIVKKTEVQTGGFSKESILPKRNSDKLIARKKDWDPKKYGGFDSPTVAYSVLVVAKVEKGKSKKLKSVKELLGITIMERSSFEKNPIDFLEAKGYKEVKKDLIIKLPKYSLFELENGRKRMLASAGELQKGNELALPSKYVNFLYLASHYEKLKGSPEDNEQKQLFVEQHKHYLDEIIEQISEFSKRVILADANLDKVLSAYNKHRDKPIREQAENIIHLFTLTNLGAPAAFKYFDTTIDRKRYTSTKEVLDATLIHQSITGLYETRIDLSQLGGDGGGGGGGSGSSGGTLNIEDEYRLHETSKGPDVPLGSTWLSDFPQAWAETGGMGLAVRQAPLIIPLKATSTPVSIKQYPMSQEARLGIKPHIQRLLDQGILVPCQSPWNTPLLPVKKPGTNDYRPVQDLREVNKRVEDIHPTVPNPYNLLSGLPPSHQWYTVLDLKDAFFCLRLHPTSQSLFAFEWRDPEMGISGQLTWTRLPQGFKNSPTLFNEALHRDLADFRIQHPDLILLQYVDDLLLAATSELDCQQGTRALLQTLGDLGYRASAKKAQICQKQVKYLGYLLKEGQRWLTEARKETVMGQPTPKTPRQLREFLGKAGFCRLFIPGFAEMAAPLYPLTKPGTLFEWGPDQQKAYQEIKQALLTAPALGLPDLTKPFELFVDEKQGYAKGVLTQKLGPWRRPVAYLSKKLDPVAAGWPPCLRMVAAIAVLTKDAGKLTMGQPLVILAPHAVEALVKQPPDRWLSNARMTHYQALLLDTDRVQFGPIVALNPATLLPLPEEGLQHDCLDILAEAHGTRPDLTDQPLPDADHTWYTDGSSFLQEGQRKAGAAVTTETEVVWAKALPAGTSAQRAELIALTQALKMAEGKKLNVYTDSRYAFATAHIHGEIYRRRGWLTSEGKEIKNKDEILALLKALFLPKRLSIIHCPGHQKGNRAEARGNRMADQAAREVATRETPETSTLLAGKRTADGSEFEKRTADGSEFESPKKKAKVE

SEQ ID NO: 2606 - protein, 2091 aa, synthetic construct
MPAAKRVKLDGGDKKYSIGLDIGTNSVGWAVITDEYKVPSKKFKVLGNTDRHSIKKNLIGALLFDSGETAEATRLKRTARRRYTRRKNRICYLQEIFSNEMAKVDDSFFHRLEESFLVEEDKKHERHPIFGNIVDEVAYHEKYPTIYHLRKKLVDSTDKADLRLIYLALAHMIKFRGHFLIEGDLNPDNSDVDKLFIQLVQTYNQLFEENPINASGVDAKAILSARLSKSRRLENLIAQLPGEKKNGLFGNLIALSLGLTPNFKSNFDLAEDAKLQLSKDTYDDDLDNLLAQIGDQYADLFLAAKNLSDAILLSDILRVNTEITKAPLSASMIKRYDEHHQDLTLLKALVRQQLPEKYKEIFFDQSKNGYAGYIDGGASQEEFYKFIKPILEKMDGTEELLVKLNREDLLRKQRTFDNGSIPHQIHLGELHAILRRQEDFYPFLKDNREKIEKILTFRIPYYVGPLARGNSRFAWMTRKSEETITPWNFEEVVDKGASAQSFIERMTNFDKNLPNEKVLPKHSLLYEYFTVYNELTKVKYVTEGMRKPAFLSGEQKKAIVDLLFKTNRKVTVKQLKEDYFKKIECFDSVEISGVEDRFNASLGTYHDLLKIIKDKDFLDNEENEDILEDIVLTLTLFEDREMIEERLKTYAHLFDDKVMKQLKRRRYTGWGRLSRKLINGIRDKQSGKTILDFLKSDGFANRNFMQLIHDDSLTFKEDIQKAQVSGQGDSLHEHIANLAGSPAIKKGILQTVKVVDELVKVMGRHKPENIVIEMARENQTTQKGQKNSRERMKRIEEGIKELGSQILKEHPVENTQLQNEKLYLYYLQNGRDMYVDQELDINRLSDYDVDHIVPQSFLKDDSIDNKVLTRSDKARGKSDNVPSEEVVKKMKNYWRQLLNAKLITQRKFDNLTKAERGGLSELDKAGFIKRQLVETRQITKHVAQILDSRMNTKYDENDKLIREVKVITLKSKLVSDFRKDFQFYKVREINNYHHAHDAYLNAVVGTALIKKYPKLESEFVYGDYKVYDVRKMIAKSEQEIGKATAKYFFYSNIMNFFKTEITLANGEIRKRPLIETNGETGEIVWDKGRDFATVRKVLSMPQVNIVKKTEVQTGGFSKESILPKRNSDKLIARKKDWDPKKYGGFDSPTVAYSVLVVAKVEKGKSKKLKSVKELLGITIMERSSFEKNPIDFLEAKGYKEVKKDLIIKLPKYSLFELENGRKRMLASAGELQKGNELALPSKYVNFLYLASHYEKLKGSPEDNEQKQLFVEQHKHYLDEIIEQISEFSKRVILADANLDKVLSAYNKHRDKPIREQAENIIHLFTLTNLGAPAAFKYFDTTIDRKRYTSTKEVLDATLIHQSITGLYETRIDLSQLGGDGGPAPGSSGGTLNIEDEYRLHETSKGPDVPLGSTWLSDFPQAWAETGGMGLAVRQAPLIIPLKATSTPVSIKQYPMSQEARLGIKPHIQRLLDQGILVPCQSPWNTPLLPVKKPGTNDYRPVQDLREVNKRVEDIHPTVPNPYNLLSGLPPSHQWYTVLDLKDAFFCLRLHPTSQSLFAFEWRDPEMGISGQLTWTRLPQGFKNSPTLFNEALHRDLADFRIQHPDLILLQYVDDLLLAATSELDCQQGTRALLQTLGDLGYRASAKKAQICQKQVKYLGYLLKEGQRWLTEARKETVMGQPTPKTPRQLREFLGKAGFCRLFIPGFAEMAAPLYPLTKPGTLFEWGPDQQKAYQEIKQALLTAPALGLPDLTKPFELFVDEKQGYAKGVLTQKLGPWRRPVAYLSKKLDPVAAGWPPCLRMVAAIAVLTKDAGKLTMGQPLVILAPHAVEALVKQPPDRWLSNARMTHYQALLLDTDRVQFGPIVALNPATLLPLPEEGLQHDCLDILAEAHGTRPDLTDQPLPDADHTWYTDGSSFLQEGQRKAGAAVTTETEVVWAKALPAGTSAQRAELIALTQALKMAEGKKLNVYTDSRYAFATAHIHGEIYRRRGWLTSEGKEIKNKDEILALLKALFLPKRLSIIHCPGHQKGNRAEARGNRMADQAAREVATRETPETSTLLAGKRTADGSEFEKRTADGSEFESPKKKAKVE

SEQ ID NO: 2607 - protein, 2093 aa, synthetic construct
MPAAKRVKLDGGDKKYSIGLDIGTNSVGWAVITDEYKVPSKKFKVLGNTDRHSIKKNLIGALLFDSGETAEATRLKRTARRRYTRRKNRICYLQEIFSNEMAKVDDSFFHRLEESFLVEEDKKHERHPIFGNIVDEVAYHEKYPTIYHLRKKLVDSTDKADLRLIYLALAHMIKFRGHFLIEGDLNPDNSDVDKLFIQLVQTYNQLFEENPINASGVDAKAILSARLSKSRRLENLIAQLPGEKKNGLFGNLIALSLGLTPNFKSNFDLAEDAKLQLSKDTYDDDLDNLLAQIGDQYADLFLAAKNLSDAILLSDILRVNTEITKAPLSASMIKRYDEHHQDLTLLKALVRQQLPEKYKEIFFDQSKNGYAGYIDGGASQEEFYKFIKPILEKMDGTEELLVKLNREDLLRKQRTFDNGSIPHQIHLGELHAILRRQEDFYPFLKDNREKIEKILTFRIPYYVGPLARGNSRFAWMTRKSEETITPWNFEEVVDKGASAQSFIERMTNFDKNLPNEKVLPKHSLLYEYFTVYNELTKVKYVTEGMRKPAFLSGEQKKAIVDLLFKTNRKVTVKQLKEDYFKKIECFDSVEISGVEDRFNASLGTYHDLLKIIKDKDFLDNEENEDILEDIVLTLTLFEDREMIEERLKTYAHLFDDKVMKQLKRRRYTGWGRLSRKLINGIRDKQSGKTILDFLKSDGFANRNFMQLIHDDSLTFKEDIQKAQVSGQGDSLHEHIANLAGSPAIKKGILQTVKVVDELVKVMGRHKPENIVIEMARENQTTQKGQKNSRERMKRIEEGIKELGSQILKEHPVENTQLQNEKLYLYYLQNGRDMYVDQELDINRLSDYDVDHIVPQSFLKDDSIDNKVLTRSDKARGKSDNVPSEEVVKKMKNYWRQLLNAKLITQRKFDNLTKAERGGLSELDKAGFIKRQLVETRQITKHVAQILDSRMNTKYDENDKLIREVKVITLKSKLVSDFRKDFQFYKVREINNYHHAHDAYLNAVVGTALIKKYPKLESEFVYGDYKVYDVRKMIAKSEQEIGKATAKYFFYSNIMNFFKTEITLANGEIRKRPLIETNGETGEIVWDKGRDFATVRKVLSMPQVNIVKKTEVQTGGFSKESILPKRNSDKLIARKKDWDPKKYGGFDSPTVAYSVLVVAKVEKGKSKKLKSVKELLGITIMERSSFEKNPIDFLEAKGYKEVKKDLIIKLPKYSLFELENGRKRMLASAGELQKGNELALPSKYVNFLYLASHYEKLKGSPEDNEQKQLFVEQHKHYLDEIIEQISEFSKRVILADANLDKVLSAYNKHRDKPIREQAENIIHLFTLTNLGAPAAFKYFDTTIDRKRYTSTKEVLDATLIHQSITGLYETRIDLSQLGGDGGGGGEAAAKGGTLNIEDEYRLHETSKGPDVPLGSTWLSDFPQAWAETGGMGLAVRQAPLIIPLKATSTPVSIKQYPMSQEARLGIKPHIQRLLDQGILVPCQSPWNTPLLPVKKPGTNDYRPVQDLREVNKRVEDIHPTVPNPYNLLSGLPPSHQWYTVLDLKDAFFCLRLHPTSQSLFAFEWRDPEMGISGQLTWTRLPQGFKNSPTLFNEALHRDLADFRIQHPDLILLQYVDDLLLAATSELDCQQGTRALLQTLGDLGYRASAKKAQICQKQVKYLGYLLKEGQRWLTEARKETVMGQPTPKTPRQLREFLGKAGFCRLFIPGFAEMAAPLYPLTKPGTLFEWGPDQQKAYQEIKQALLTAPALGLPDLTKPFELFVDEKQGYAKGVLTQKLGPWRRPVAYLSKKLDPVAAGWPPCLRMVAAIAVLTKDAGKLTMGQPLVILAPHAVEALVKQPPDRWLSNARMTHYQALLLDTDRVQFGPIVALNPATLLPLPEEGLQHDCLDILAEAHGTRPDLTDQPLPDADHTWYTDGSSFLQEGQRKAGAAVTTETEVVWAKALPAGTSAQRAELIALTQALKMAEGKKLNVYTDSRYAFATAHIHGEIYRRRGWLTSEGKEIKNKDEILALLKALFLPKRLSIIHCPGHQKGNRAEARGNRMADQAAREVATRETPETSTLLAGKRTADGSEFEKRTADGSEFESPKKKAKVE

SEQ ID NO: 2608 - protein, 2096 aa, synthetic construct
MPAAKRVKLDGGDKKYSIGLDIGTNSVGWAVITDEYKVPSKKFKVLGNTDRHSIKKNLIGALLFDSGETAEATRLKRTARRRYTRRKNRICYLQEIFSNEMAKVDDSFFHRLEESFLVEEDKKHERHPIFGNIVDEVAYHEKYPTIYHLRKKLVDSTDKADLRLIYLALAHMIKFRGHFLIEGDLNPDNSDVDKLFIQLVQTYNQLFEENPINASGVDAKAILSARLSKSRRLENLIAQLPGEKKNGLFGNLIALSLGLTPNFKSNFDLAEDAKLQLSKDTYDDDLDNLLAQIGDQYADLFLAAKNLSDAILLSDILRVNTEITKAPLSASMIKRYDEHHQDLTLLKALVRQQLPEKYKEIFFDQSKNGYAGYIDGGASQEEFYKFIKPILEKMDGTEELLVKLNREDLLRKQRTFDNGSIPHQIHLGELHAILRRQEDFYPFLKDNREKIEKILTFRIPYYVGPLARGNSRFAWMTRKSEETITPWNFEEVVDKGASAQSFIERMTNFDKNLPNEKVLPKHSLLYEYFTVYNELTKVKYVTEGMRKPAFLSGEQKKAIVDLLFKTNRKVTVKQLKEDYFKKIECFDSVEISGVEDRFNASLGTYHDLLKIIKDKDFLDNEENEDILEDIVLTLTLFEDREMIEERLKTYAHLFDDKVMKQLKRRRYTGWGRLSRKLINGIRDKQSGKTILDFLKSDGFANRNFMQLIHDDSLTFKEDIQKAQVSGQGDSLHEHIANLAGSPAIKKGILQTVKVVDELVKVMGRHKPENIVIEMARENQTTQKGQKNSRERMKRIEEGIKELGSQILKEHPVENTQLQNEKLYLYYLQNGRDMYVDQELDINRLSDYDVDHIVPQSFLKDDSIDNKVLTRSDKARGKSDNVPSEEVVKKMKNYWRQLLNAKLITQRKFDNLTKAERGGLSELDKAGFIKRQLVETRQITKHVAQILDSRMNTKYDENDKLIREVKVITLKSKLVSDFRKDFQFYKVREINNYHHAHDAYLNAVVGTALIKKYPKLESEFVYGDYKVYDVRKMIAKSEQEIGKATAKYFFYSNIMNFFKTEITLANGEIRKRPLIETNGETGEIVWDKGRDFATVRKVLSMPQVNIVKKTEVQTGGFSKESILPKRNSDKLIARKKDWDPKKYGGFDSPTVAYSVLVVAKVEKGKSKKLKSVKELLGITIMERSSFEKNPIDFLEAKGYKEVKKDLIIKLPKYSLFELENGRKRMLASAGELQKGNELALPSKYVNFLYLASHYEKLKGSPEDNEQKQLFVEQHKHYLDEIIEQISEFSKRVILADANLDKVLSAYNKHRDKPIREQAENIIHLFTLTNLGAPAAFKYFDTTIDRKRYTSTKEVLDATLIHQSITGLYETRIDLSQLGGDGGGGSEAAAKGSSGGTLNIEDEYRLHETSKGPDVPLGSTWLSDFPQAWAETGGMGLAVRQAPLIIPLKATSTPVSIKQYPMSQEARLGIKPHIQRLLDQGILVPCQSPWNTPLLPVKKPGTNDYRPVQDLREVNKRVEDIHPTVPNPYNLLSGLPPSHQWYTVLDLKDAFFCLRLHPTSQSLFAFEWRDPEMGISGQLTWTRLPQGFKNSPTLFNEALHRDLADFRIQHPDLILLQYVDDLLLAATSELDCQQGTRALLQTLGDLGYRASAKKAQICQKQVKYLGYLLKEGQRWLTEARKETVMGQPTPKTPRQLREFLGKAGFCRLFIPGFAEMAAPLYPLTKPGTLFEWGPDQQKAYQEIKQALLTAPALGLPDLTKPFELFVDEKQGYAKGVLTQKLGPWRRPVAYLSKKLDPVAAGWPPCLRMVAAIAVLTKDAGKLTMGQPLVILAPHAVEALVKQPPDRWLSNARMTHYQALLLDTDRVQFGPIVALNPATLLPLPEEGLQHDCLDILAEAHGTRPDLTDQPLPDADHTWYTDGSSFLQEGQRKAGAAVTTETEVVWAKALPAGTSAQRAELIALTQALKMAEGKKLNVYTDSRYAFATAHIHGEIYRRRGWLTSEGKEIKNKDEILALLKALFLPKRLSIIHCPGHQKGNRAEARGNRMADQAAREVATRETPETSTLLAGKRTADGSEFEKRTADGSEFESPKKKAKVE

SEQ ID NO: 2609 - protein, 2118 aa, synthetic construct
MPAAKRVKLDGGDKKYSIGLDIGTNSVGWAVITDEYKVPSKKFKVLGNTDRHSIKKNLIGALLFDSGETAEATRLKRTARRRYTRRKNRICYLQEIFSNEMAKVDDSFFHRLEESFLVEEDKKHERHPIFGNIVDEVAYHEKYPTIYHLRKKLVDSTDKADLRLIYLALAHMIKFRGHFLIEGDLNPDNSDVDKLFIQLVQTYNQLFEENPINASGVDAKAILSARLSKSRRLENLIAQLPGEKKNGLFGNLIALSLGLTPNFKSNFDLAEDAKLQLSKDTYDDDLDNLLAQIGDQYADLFLAAKNLSDAILLSDILRVNTEITKAPLSASMIKRYDEHHQDLTLLKALVRQQLPEKYKEIFFDQSKNGYAGYIDGGASQEEFYKFIKPILEKMDGTEELLVKLNREDLLRKQRTFDNGSIPHQIHLGELHAILRRQEDFYPFLKDNREKIEKILTFRIPYYVGPLARGNSRFAWMTRKSEETITPWNFEEVVDKGASAQSFIERMTNFDKNLPNEKVLPKHSLLYEYFTVYNELTKVKYVTEGMRKPAFLSGEQKKAIVDLLFKTNRKVTVKQLKEDYFKKIECFDSVEISGVEDRFNASLGTYHDLLKIIKDKDFLDNEENEDILEDIVLTLTLFEDREMIEERLKTYAHLFDDKVMKQLKRRRYTGWGRLSRKLINGIRDKQSGKTILDFLKSDGFANRNFMQLIHDDSLTFKEDIQKAQVSGQGDSLHEHIANLAGSPAIKKGILQTVKVVDELVKVMGRHKPENIVIEMARENQTTQKGQKNSRERMKRIEEGIKELGSQILKEHPVENTQLQNEKLYLYYLQNGRDMYVDQELDINRLSDYDVDHIVPQSFLKDDSIDNKVLTRSDKARGKSDNVPSEEVVKKMKNYWRQLLNAKLITQRKFDNLTKAERGGLSELDKAGFIKRQLVETRQITKHVAQILDSRMNTKYDENDKLIREVKVITLKSKLVSDFRKDFQFYKVREINNYHHAHDAYLNAVVGTALIKKYPKLESEFVYGDYKVYDVRKMIAKSEQEIGKATAKYFFYSNIMNFFKTEITLANGEIRKRPLIETNGETGEIVWDKGRDFATVRKVLSMPQVNIVKKTEVQTGGFSKESILPKRNSDKLIARKKDWDPKKYGGFDSPTVAYSVLVVAKVEKGKSKKLKSVKELLGITIMERSSFEKNPIDFLEAKGYKEVKKDLIIKLPKYSLFELENGRKRMLASAGELQKGNELALPSKYVNFLYLASHYEKLKGSPEDNEQKQLFVEQHKHYLDEIIEQISEFSKRVILADANLDKVLSAYNKHRDKPIREQAENIIHLFTLTNLGAPAAFKYFDTTIDRKRYTSTKEVLDATLIHQSITGLYETRIDLSQLGGDGGSGGSSGGSSGSETPGTSESATPESSGGSSGGSSGGTLNIEDEYRLHETSKGPDVPLGSTWLSDFPQAWAETGGMGLAVRQAPLIIPLKATSTPVSIKQYPMSQEARLGIKPHIQRLLDQGILVPCQSPWNTPLLPVKKPGTNDYRPVQDLREVNKRVEDIHPTVPNPYNLLSGLPPSHQWYTVLDLKDAFFCLRLHPTSQSLFAFEWRDPEMGISGQLTWTRLPQGFKNSPTLFNEALHRDLADFRIQHPDLILLQYVDDLLLAATSELDCQQGTRALLQTLGDLGYRASAKKAQICQKQVKYLGYLLKEGQRWLTEARKETVMGQPTPKTPRQLREFLGKAGFCRLFIPGFAEMAAPLYPLTKPGTLFEWGPDQQKAYQEIKQALLTAPALGLPDLTKPFELFVDEKQGYAKGVLTQKLGPWRRPVAYLSKKLDPVAAGWPPCLRMVAAIAVLTKDAGKLTMGQPLVILAPHAVEALVKQPPDRWLSNARMTHYQALLLDTDRVQFGPIVALNPATLLPLPEEGLQHDCLDILAEAHGTRPDLTDQPLPDADHTWYTDGSSFLQEGQRKAGAAVTTETEVVWAKALPAGTSAQRAELIALTQALKMAEGKKLNVYTDSRYAFATAHIHGEIYRRRGWLTSEGKEIKNKDEILALLKALFLPKRLSIIHCPGHQKGNRAEARGNRMADQAAREVATRETPETSTLLAGKRTADGSEFEKRTADGSEFESPKKKAKVE

SEQ ID NO: 2610 - protein, 2125 aa, synthetic construct
MPAAKRVKLDGGDKKYSIGLDIGTNSVGWAVITDEYKVPSKKFKVLGNTDRHSIKKNLIGALLFDSGETAEATRLKRTARRRYTRRKNRICYLQEIFSNEMAKVDDSFFHRLEESFLVEEDKKHERHPIFGNIVDEVAYHEKYPTIYHLRKKLVDSTDKADLRLIYLALAHMIKFRGHFLIEGDLNPDNSDVDKLFIQLVQTYNQLFEENPINASGVDAKAILSARLSKSRRLENLIAQLPGEKKNGLFGNLIALSLGLTPNFKSNFDLAEDAKLQLSKDTYDDDLDNLLAQIGDQYADLFLAAKNLSDAILLSDILRVNTEITKAPLSASMIKRYDEHHQDLTLLKALVRQQLPEKYKEIFFDQSKNGYAGYIDGGASQEEFYKFIKPILEKMDGTEELLVKLNREDLLRKQRTFDNGSIPHQIHLGELHAILRRQEDFYPFLKDNREKIEKILTFRIPYYVGPLARGNSRFAWMTRKSEETITPWNFEEVVDKGASAQSFIERMTNFDKNLPNEKVLPKHSLLYEYFTVYNELTKVKYVTEGMRKPAFLSGEQKKAIVDLLFKTNRKVTVKQLKEDYFKKIECFDSVEISGVEDRFNASLGTYHDLLKIIKDKDFLDNEENEDILEDIVLTLTLFEDREMIEERLKTYAHLFDDKVMKQLKRRRYTGWGRLSRKLINGIRDKQSGKTILDFLKSDGFANRNFMQLIHDDSLTFKEDIQKAQVSGQGDSLHEHIANLAGSPAIKKGILQTVKVVDELVKVMGRHKPENIVIEMARENQTTQKGQKNSRERMKRIEEGIKELGSQILKEHPVENTQLQNEKLYLYYLQNGRDMYVDQELDINRLSDYDVDHIVPQSFLKDDSIDNKVLTRSDKARGKSDNVPSEEVVKKMKNYWRQLLNAKLITQRKFDNLTKAERGGLSELDKAGFIKRQLVETRQITKHVAQILDSRMNTKYDENDKLIREVKVITLKSKLVSDFRKDFQFYKVREINNYHHAHDAYLNAVVGTALIKKYPKLESEFVYGDYKVYDVRKMIAKSEQEIGKATAKYFFYSNIMNFFKTEITLANGEIRKRPLIETNGETGEIVWDKGRDFATVRKVLSMPQVNIVKKTEVQTGGFSKESILPKRNSDKLIARKKDWDPKKYGGFDSPTVAYSVLVVAKVEKGKSKKLKSVKELLGITIMERSSFEKNPIDFLEAKGYKEVKKDLIIKLPKYSLFELENGRKRMLASAGELQKGNELALPSKYVNFLYLASHYEKLKGSPEDNEQKQLFVEQHKHYLDEIIEQISEFSKRVILADANLDKVLSAYNKHRDKPIREQAENIIHLFTLTNLGAPAAFKYFDTTIDRKRYTSTKEVLDATLIHQSITGLYETRIDLSQLGGDGGEAAAKEAAAKEAAAKEAAAKGGTLNIEDEYRLHETSKEPDVSLGSTWLSDFPQAWAETGGMGLAVRQAPLIIPLKATSTPVSIKQYPMSQEARLGIKPHIQRLLDQGILVPCQSPWNTPLLPVKKPGTNDYRPVQDLREVNKRVEDIHPTVPNPYNLLSGLPPSHQWYTVLDLKDAFFCLRLHPTSQPLFAFEWRDPEMGISGQLTWTRLPQGFKNSPTLFNEALHRDLADFRIQHPDLILLQYVDDLLLAATSELDCQQGTRALLQTLGNLGYRASAKKAQICQKQVKYLGYLLKEGQRWLTEARKETVMGQPTPKTPRQLREFLGKAGFCRLFIPGFAEMAAPLYPLTKPGTLFNWGPDQQKAYQEIKQALLTAPALGLPDLTKPFELFVDEKQGYAKGVLTQKLGPWRRPVAYLSKKLDPVAAGWPPCLRMVAAIAVLTKDAGKLTMGQPLVILAPHAVEALVKQPPDRWLSNARMTHYQALLLDTDRVQFGPVVALNPATLLPLPEEGLQHNCLDILAEAHGTRPDLTDQPLPDADHTWYTDGSSLLQEGQRKAGAAVTTETEVIWAKALPAGTSAQRAELIALTQALKMAEGKKLNVYTDSRYAFATAHIHGEIYRRRGWLTSEGKEIKNKDEILALLKALFLPKRLSIIHCPGHQKGHSAEARGNRMADQAARKAAITETPDTSTLLIENSSPSGGSKRTADGSEFEAGKRTADGSEFEKRTADGSEFESPKKKAKVE

SEQ ID NO: 2611 - protein, 2151 aa, synthetic construct
MPAAKRVKLDGGDKKYSIGLDIGTNSVGWAVITDEYKVPSKKFKVLGNTDRHSIKKNLIGALLFDSGETAEATRLKRTARRRYTRRKNRICYLQEIFSNEMAKVDDSFFHRLEESFLVEEDKKHERHPIFGNIVDEVAYHEKYPTIYHLRKKLVDSTDKADLRLIYLALAHMIKFRGHFLIEGDLNPDNSDVDKLFIQLVQTYNQLFEENPINASGVDAKAILSARLSKSRRLENLIAQLPGEKKNGLFGNLIALSLGLTPNFKSNFDLAEDAKLQLSKDTYDDDLDNLLAQIGDQYADLFLAAKNLSDAILLSDILRVNTEITKAPLSASMIKRYDEHHQDLTLLKALVRQQLPEKYKEIFFDQSKNGYAGYIDGGASQEEFYKFIKPILEKMDGTEELLVKLNREDLLRKQRTFDNGSIPHQIHLGELHAILRRQEDFYPFLKDNREKIEKILTFRIPYYVGPLARGNSRFAWMTRKSEETITPWNFEEVVDKGASAQSFIERMTNFDKNLPNEKVLPKHSLLYEYFTVYNELTKVKYVTEGMRKPAFLSGEQKKAIVDLLFKTNRKVTVKQLKEDYFKKIECFDSVEISGVEDRFNASLGTYHDLLKIIKDKDFLDNEENEDILEDIVLTLTLFEDREMIEERLKTYAHLFDDKVMKQLKRRRYTGWGRLSRKLINGIRDKQSGKTILDFLKSDGFANRNFMQLIHDDSLTFKEDIQKAQVSGQGDSLHEHIANLAGSPAIKKGILQTVKVVDELVKVMGRHKPENIVIEMARENQTTQKGQKNSRERMKRIEEGIKELGSQILKEHPVENTQLQNEKLYLYYLQNGRDMYVDQELDINRLSDYDVDHIVPQSFLKDDSIDNKVLTRSDKARGKSDNVPSEEVVKKMKNYWRQLLNAKLITQRKFDNLTKAERGGLSELDKAGFIKRQLVETRQITKHVAQILDSRMNTKYDENDKLIREVKVITLKSKLVSDFRKDFQFYKVREINNYHHAHDAYLNAVVGTALIKKYPKLESEFVYGDYKVYDVRKMIAKSEQEIGKATAKYFFYSNIMNFFKTEITLANGEIRKRPLIETNGETGEIVWDKGRDFATVRKVLSMPQVNIVKKTEVQTGGFSKESILPKRNSDKLIARKKDWDPKKYGGFDSPTVAYSVLVVAKVEKGKSKKLKSVKELLGITIMERSSFEKNPIDFLEAKGYKEVKKDLIIKLPKYSLFELENGRKRMLASAGELQKGNELALPSKYVNFLYLASHYEKLKGSPEDNEQKQLFVEQHKHYLDEIIEQISEFSKRVILADANLDKVLSAYNKHRDKPIREQAENIIHLFTLTNLGAPAAFKYFDTTIDRKRYTSTKEVLDATLIHQSITGLYETRIDLSQLGGDGGAEAAAKEAAAKEAAAKEAAAKALEAEAAAKEAAAKEAAAKEAAAKAGGTLNIEDEYRLHETSKEPDVSLGSTWLSDFPQAWAETGGMGLAVRQAPLIIPLKATSTPVSIKQYPMSQEARLGIKPHIQRLLDQGILVPCQSPWNTPLLPVKKPGTNDYRPVQDLREVNKRVEDIHPTVPNPYNLLSGLPPSHQWYTVLDLKDAFFCLRLHPTSQPLFAFEWRDPEMGISGQLTWTRLPQGFKNSPTLFNEALHRDLADFRIQHPDLILLQYVDDLLLAATSELDCQQGTRALLQTLGNLGYRASAKKAQICQKQVKYLGYLLKEGQRWLTEARKETVMGQPTPKTPRQLREFLGKAGFCRLFIPGFAEMAAPLYPLTKPGTLFNWGPDQQKAYQEIKQALLTAPALGLPDLTKPFELFVDEKQGYAKGVLTQKLGPWRRPVAYLSKKLDPVAAGWPPCLRMVAAIAVLTKDAGKLTMGQPLVILAPHAVEALVKQPPDRWLSNARMTHYQALLLDTDRVQFGPVVALNPATLLPLPEEGLQHNCLDILAEAHGTRPDLTDQPLPDADHTWYTDGSSLLQEGQRKAGAAVTTETEVIWAKALPAGTSAQRAELIALTQALKMAEGKKLNVYTDSRYAFATAHIHGEIYRRRGWLTSEGKEIKNKDEILALLKALFLPKRLSIIHCPGHQKGHSAEARGNRMADQAARKAAITETPDTSTLLIENSSPSGGSKRTADGSEFEAGKRTADGSEFEKRTADGSEFESPKKKAKVE

SEQ ID NO: 2612 - protein, 2123 aa, synthetic construct
MPAAKRVKLDGGDKKYSIGLDIGTNSVGWAVITDEYKVPSKKFKVLGNTDRHSIKKNLIGALLFDSGETAEATRLKRTARRRYTRRKNRICYLQEIFSNEMAKVDDSFFHRLEESFLVEEDKKHERHPIFGNIVDEVAYHEKYPTIYHLRKKLVDSTDKADLRLIYLALAHMIKFRGHFLIEGDLNPDNSDVDKLFIQLVQTYNQLFEENPINASGVDAKAILSARLSKSRRLENLIAQLPGEKKNGLFGNLIALSLGLTPNFKSNFDLAEDAKLQLSKDTYDDDLDNLLAQIGDQYADLFLAAKNLSDAILLSDILRVNTEITKAPLSASMIKRYDEHHQDLTLLKALVRQQLPEKYKEIFFDQSKNGYAGYIDGGASQEEFYKFIKPILEKMDGTEELLVKLNREDLLRKQRTFDNGSIPHQIHLGELHAILRRQEDFYPFLKDNREKIEKILTFRIPYYVGPLARGNSRFAWMTRKSEETITPWNFEEVVDKGASAQSFIERMTNFDKNLPNEKVLPKHSLLYEYFTVYNELTKVKYVTEGMRKPAFLSGEQKKAIVDLLFKTNRKVTVKQLKEDYFKKIECFDSVEISGVEDRFNASLGTYHDLLKIIKDKDFLDNEENEDILEDIVLTLTLFEDREMIEERLKTYAHLFDDKVMKQLKRRRYTGWGRLSRKLINGIRDKQSGKTILDFLKSDGFANRNFMQLIHDDSLTFKEDIQKAQVSGQGDSLHEHIANLAGSPAIKKGILQTVKVVDELVKVMGRHKPENIVIEMARENQTTQKGQKNSRERMKRIEEGIKELGSQILKEHPVENTQLQNEKLYLYYLQNGRDMYVDQELDINRLSDYDVDHIVPQSFLKDDSIDNKVLTRSDKARGKSDNVPSEEVVKKMKNYWRQLLNAKLITQRKFDNLTKAERGGLSELDKAGFIKRQLVETRQITKHVAQILDSRMNTKYDENDKLIREVKVITLKSKLVSDFRKDFQFYKVREINNYHHAHDAYLNAVVGTALIKKYPKLESEFVYGDYKVYDVRKMIAKSEQEIGKATAKYFFYSNIMNFFKTEITLANGEIRKRPLIETNGETGEIVWDKGRDFATVRKVLSMPQVNIVKKTEVQTGGFSKESILPKRNSDKLIARKKDWDPKKYGGFDSPTVAYSVLVVAKVEKGKSKKLKSVKELLGITIMERSSFEKNPIDFLEAKGYKEVKKDLIIKLPKYSLFELENGRKRMLASAGELQKGNELALPSKYVNFLYLASHYEKLKGSPEDNEQKQLFVEQHKHYLDEIIEQISEFSKRVILADANLDKVLSAYNKHRDKPIREQAENIIHLFTLTNLGAPAAFKYFDTTIDRKRYTSTKEVLDATLIHQSITGLYETRIDLSQLGGDGGGSSGSSGSSGSSGSSGSSGGTLNIEDEYRLHETSKEPDVSLGSTWLSDFPQAWAETGGMGLAVRQAPLIIPLKATSTPVSIKQYPMSQEARLGIKPHIQRLLDQGILVPCQSPWNTPLLPVKKPGTNDYRPVQDLREVNKRVEDIHPTVPNPYNLLSGLPPSHQWYTVLDLKDAFFCLRLHPTSQPLFAFEWRDPEMGISGQLTWTRLPQGFKNSPTLFNEALHRDLADFRIQHPDLILLQYVDDLLLAATSELDCQQGTRALLQTLGNLGYRASAKKAQICQKQVKYLGYLLKEGQRWLTEARKETVMGQPTPKTPRQLREFLGKAGFCRLFIPGFAEMAAPLYPLTKPGTLFNWGPDQQKAYQEIKQALLTAPALGLPDLTKPFELFVDEKQGYAKGVLTQKLGPWRRPVAYLSKKLDPVAAGWPPCLRMVAAIAVLTKDAGKLTMGQPLVILAPHAVEALVKQPPDRWLSNARMTHYQALLLDTDRVQFGPVVALNPATLLPLPEEGLQHNCLDILAEAHGTRPDLTDQPLPDADHTWYTDGSSLLQEGQRKAGAAVTTETEVIWAKALPAGTSAQRAELIALTQALKMAEGKKLNVYTDSRYAFATAHIHGEIYRRRGWLTSEGKEIKNKDEILALLKALFLPKRLSIIHCPGHQKGHSAEARGNRMADQAARKAAITETPDTSTLLIENSSPSGGSKRTADGSEFEAGKRTADGSEFEKRTADGSEFESPKKKAKVE

SEQ ID NO: 2613 - protein, 2130 aa, synthetic construct
MPAAKRVKLDGGDKKYSIGLDIGTNSVGWAVITDEYKVPSKKFKVLGNTDRHSIKKNLIGALLFDSGETAEATRLKRTARRRYTRRKNRICYLQEIFSNEMAKVDDSFFHRLEESFLVEEDKKHERHPIFGNIVDEVAYHEKYPTIYHLRKKLVDSTDKADLRLIYLALAHMIKFRGHFLIEGDLNPDNSDVDKLFIQLVQTYNQLFEENPINASGVDAKAILSARLSKSRRLENLIAQLPGEKKNGLFGNLIALSLGLTPNFKSNFDLAEDAKLQLSKDTYDDDLDNLLAQIGDQYADLFLAAKNLSDAILLSDILRVNTEITKAPLSASMIKRYDEHHQDLTLLKALVRQQLPEKYKEIFFDQSKNGYAGYIDGGASQEEFYKFIKPILEKMDGTEELLVKLNREDLLRKQRTFDNGSIPHQIHLGELHAILRRQEDFYPFLKDNREKIEKILTFRIPYYVGPLARGNSRFAWMTRKSEETITPWNFEEVVDKGASAQSFIERMTNFDKNLPNEKVLPKHSLLYEYFTVYNELTKVKYVTEGMRKPAFLSGEQKKAIVDLLFKTNRKVTVKQLKEDYFKKIECFDSVEISGVEDRFNASLGTYHDLLKIIKDKDFLDNEENEDILEDIVLTLTLFEDREMIEERLKTYAHLFDDKVMKQLKRRRYTGWGRLSRKLINGIRDKQSGKTILDFLKSDGFANRNFMQLIHDDSLTFKEDIQKAQVSGQGDSLHEHIANLAGSPAIKKGILQTVKVVDELVKVMGRHKPENIVIEMARENQTTQKGQKNSRERMKRIEEGIKELGSQILKEHPVENTQLQNEKLYLYYLQNGRDMYVDQELDINRLSDYDVDHIVPQSFLKDDSIDNKVLTRSDKARGKSDNVPSEEVVKKMKNYWRQLLNAKLITQRKFDNLTKAERGGLSELDKAGFIKRQLVETRQITKHVAQILDSRMNTKYDENDKLIREVKVITLKSKLVSDFRKDFQFYKVREINNYHHAHDAYLNAVVGTALIKKYPKLESEFVYGDYKVYDVRKMIAKSEQEIGKATAKYFFYSNIMNFFKTEITLANGEIRKRPLIETNGETGEIVWDKGRDFATVRKVLSMPQVNIVKKTEVQTGGFSKESILPKRNSDKLIARKKDWDPKKYGGFDSPTVAYSVLVVAKVEKGKSKKLKSVKELLGITIMERSSFEKNPIDFLEAKGYKEVKKDLIIKLPKYSLFELENGRKRMLASAGELQKGNELALPSKYVNFLYLASHYEKLKGSPEDNEQKQLFVEQHKHYLDEIIEQISEFSKRVILADANLDKVLSAYNKHRDKPIREQAENIIHLFTLTNLGAPAAFKYFDTTIDRKRYTSTKEVLDATLIHQSITGLYETRIDLSQLGGDGGGGGGSGGGGSGGGGSGGGGSGGGGSGGTLNIEDEYRLHETSKEPDVSLGSTWLSDFPQAWAETGGMGLAVRQAPLIIPLKATSTPVSIKQYPMSQEARLGIKPHIQRLLDQGILVPCQSPWNTPLLPVKKPGTNDYRPVQDLREVNKRVEDIHPTVPNPYNLLSGLPPSHQWYTVLDLKDAFFCLRLHPTSQPLFAFEWRDPEMGISGQLTWTRLPQGFKNSPTLFNEALHRDLADFRIQHPDLILLQYVDDLLLAATSELDCQQGTRALLQTLGNLGYRASAKKAQICQKQVKYLGYLLKEGQRWLTEARKETVMGQPTPKTPRQLREFLGKAGFCRLFIPGFAEMAAPLYPLTKPGTLFNWGPDQQKAYQEIKQALLTAPALGLPDLTKPFELFVDEKQGYAKGVLTQKLGPWRRPVAYLSKKLDPVAAGWPPCLRMVAAIAVLTKDAGKLTMGQPLVILAPHAVEALVKQPPDRWLSNARMTHYQALLLDTDRVQFGPVVALNPATLLPLPEEGLQHNCLDILAEAHGTRPDLTDQPLPDADHTWYTDGSSLLQEGQRKAGAAVTTETEVIWAKALPAGTSAQRAELIALTQALKMAEGKKLNVYTDSRYAFATAHIHGEIYRRRGWLTSEGKEIKNKDEILALLKALFLPKRLSIIHCPGHQKGHSAEARGNRMADQAARKAAITETPDTSTLLIENSSPSGGSKRTADGSEFEAGKRTADGSEFEKRTADGSEFESPKKKAKVE

SEQ ID NO: 2614 - protein, 2116 aa, synthetic construct
MPAAKRVKLDGGDKKYSIGLDIGTNSVGWAVITDEYKVPSKKFKVLGNTDRHSIKKNLIGALLFDSGETAEATRLKRTARRRYTRRKNRICYLQEIFSNEMAKVDDSFFHRLEESFLVEEDKKHERHPIFGNIVDEVAYHEKYPTIYHLRKKLVDSTDKADLRLIYLALAHMIKFRGHFLIEGDLNPDNSDVDKLFIQLVQTYNQLFEENPINASGVDAKAILSARLSKSRRLENLIAQLPGEKKNGLFGNLIALSLGLTPNFKSNFDLAEDAKLQLSKDTYDDDLDNLLAQIGDQYADLFLAAKNLSDAILLSDILRVNTEITKAPLSASMIKRYDEHHQDLTLLKALVRQQLPEKYKEIFFDQSKNGYAGYIDGGASQEEFYKFIKPILEKMDGTEELLVKLNREDLLRKQRTFDNGSIPHQIHLGELHAILRRQEDFYPFLKDNREKIEKILTFRIPYYVGPLARGNSRFAWMTRKSEETITPWNFEEVVDKGASAQSFIERMTNFDKNLPNEKVLPKHSLLYEYFTVYNELTKVKYVTEGMRKPAFLSGEQKKAIVDLLFKTNRKVTVKQLKEDYFKKIECFDSVEISGVEDRFNASLGTYHDLLKIIKDKDFLDNEENEDILEDIVLTLTLFEDREMIEERLKTYAHLFDDKVMKQLKRRRYTGWGRLSRKLINGIRDKQSGKTILDFLKSDGFANRNFMQLIHDDSLTFKEDIQKAQVSGQGDSLHEHIANLAGSPAIKKGILQTVKVVDELVKVMGRHKPENIVIEMARENQTTQKGQKNSRERMKRIEEGIKELGSQILKEHPVENTQLQNEKLYLYYLQNGRDMYVDQELDINRLSDYDVDHIVPQSFLKDDSIDNKVLTRSDKARGKSDNVPSEEVVKKMKNYWRQLLNAKLITQRKFDNLTKAERGGLSELDKAGFIKRQLVETRQITKHVAQILDSRMNTKYDENDKLIREVKVITLKSKLVSDFRKDFQFYKVREINNYHHAHDAYLNAVVGTALIKKYPKLESEFVYGDYKVYDVRKMIAKSEQEIGKATAKYFFYSNIMNFFKTEITLANGEIRKRPLIETNGETGEIVWDKGRDFATVRKVLSMPQVNIVKKTEVQTGGFSKESILPKRNSDKLIARKKDWDPKKYGGFDSPTVAYSVLVVAKVEKGKSKKLKSVKELLGITIMERSSFEKNPIDFLEAKGYKEVKKDLIIKLPKYSLFELENGRKRMLASAGELQKGNELALPSKYVNFLYLASHYEKLKGSPEDNEQKQLFVEQHKHYLDEIIEQISEFSKRVILADANLDKVLSAYNKHRDKPIREQAENIIHLFTLTNLGAPAAFKYFDTTIDRKRYTSTKEVLDATLIHQSITGLYETRIDLSQLGGDGGEAAAKGGGPAPGGTLNIEDEYRLHETSKEPDVSLGSTWLSDFPQAWAETGGMGLAVRQAPLIIPLKATSTPVSIKQYPMSQEARLGIKPHIQRLLDQGILVPCQSPWNTPLLPVKKPGTNDYRPVQDLREVNKRVEDIHPTVPNPYNLLSGLPPSHQWYTVLDLKDAFFCLRLHPTSQPLFAFEWRDPEMGISGQLTWTRLPQGFKNSPTLFNEALHRDLADFRIQHPDLILLQYVDDLLLAATSELDCQQGTRALLQTLGNLGYRASAKKAQICQKQVKYLGYLLKEGQRWLTEARKETVMGQPTPKTPRQLREFLGKAGFCRLFIPGFAEMAAPLYPLTKPGTLFNWGPDQQKAYQEIKQALLTAPALGLPDLTKPFELFVDEKQGYAKGVLTQKLGPWRRPVAYLSKKLDPVAAGWPPCLRMVAAIAVLTKDAGKLTMGQPLVILAPHAVEALVKQPPDRWLSNARMTHYQALLLDTDRVQFGPVVALNPATLLPLPEEGLQHNCLDILAEAHGTRPDLTDQPLPDADHTWYTDGSSLLQEGQRKAGAAVTTETEVIWAKALPAGTSAQRAELIALTQALKMAEGKKLNVYTDSRYAFATAHIHGEIYRRRGWLTSEGKEIKNKDEILALLKALFLPKRLSIIHCPGHQKGHSAEARGNRMADQAARKAAITETPDTSTLLIENSSPSGGSKRTADGSEFEAGKRTADGSEFEKRTADGSEFESPKKKAKVE

SEQ ID NO: 2615 - protein, 2125 aa, synthetic construct
MPAAKRVKLDGGDKKYSIGLDIGTNSVGWAVITDEYKVPSKKFKVLGNTDRHSIKKNLIGALLFDSGETAEATRLKRTARRRYTRRKNRICYLQEIFSNEMAKVDDSFFHRLEESFLVEEDKKHERHPIFGNIVDEVAYHEKYPTIYHLRKKLVDSTDKADLRLIYLALAHMIKFRGHFLIEGDLNPDNSDVDKLFIQLVQTYNQLFEENPINASGVDAKAILSARLSKSRRLENLIAQLPGEKKNGLFGNLIALSLGLTPNFKSNFDLAEDAKLQLSKDTYDDDLDNLLAQIGDQYADLFLAAKNLSDAILLSDILRVNTEITKAPLSASMIKRYDEHHQDLTLLKALVRQQLPEKYKEIFFDQSKNGYAGYIDGGASQEEFYKFIKPILEKMDGTEELLVKLNREDLLRKQRTFDNGSIPHQIHLGELHAILRRQEDFYPFLKDNREKIEKILTFRIPYYVGPLARGNSRFAWMTRKSEETITPWNFEEVVDKGASAQSFIERMTNFDKNLPNEKVLPKHSLLYEYFTVYNELTKVKYVTEGMRKPAFLSGEQKKAIVDLLFKTNRKVTVKQLKEDYFKKIECFDSVEISGVEDRFNASLGTYHDLLKIIKDKDFLDNEENEDILEDIVLTLTLFEDREMIEERLKTYAHLFDDKVMKQLKRRRYTGWGRLSRKLINGIRDKQSGKTILDFLKSDGFANRNFMQLIHDDSLTFKEDIQKAQVSGQGDSLHEHIANLAGSPAIKKGILQTVKVVDELVKVMGRHKPENIVIEMARENQTTQKGQKNSRERMKRIEEGIKELGSQILKEHPVENTQLQNEKLYLYYLQNGRDMYVDQELDINRLSDYDVDHIVPQSFLKDDSIDNKVLTRSDKARGKSDNVPSEEVVKKMKNYWRQLLNAKLITQRKFDNLTKAERGGLSELDKAGFIKRQLVETRQITKHVAQILDSRMNTKYDENDKLIREVKVITLKSKLVSDFRKDFQFYKVREINNYHHAHDAYLNAVVGTALIKKYPKLESEFVYGDYKVYDVRKMIAKSEQEIGKATAKYFFYSNIMNFFKTEITLANGEIRKRPLIETNGETGEIVWDKGRDFATVRKVLSMPQVNIVKKTEVQTGGFSKESILPKRNSDKLIARKKDWDPKKYGGFDSPTVAYSVLVVAKVEKGKSKKLKSVKELLGITIMERSSFEKNPIDFLEAKGYKEVKKDLIIKLPKYSLFELENGRKRMLASAGELQKGNELALPSKYVNFLYLASHYEKLKGSPEDNEQKQLFVEQHKHYLDEIIEQISEFSKRVILADANLDKVLSAYNKHRDKPIREQAENIIHLFTLTNLGAPAAFKYFDTTIDRKRYTSTKEVLDATLIHQSITGLYETRIDLSQLGGDGGGGGGSGGGGSGGGGSGGGGSGGTLNIEDEYRLHETSKEPDVSLGSTWLSDFPQAWAETGGMGLAVRQAPLIIPLKATSTPVSIKQYPMSQEARLGIKPHIQRLLDQGILVPCQSPWNTPLLPVKKPGTNDYRPVQDLREVNKRVEDIHPTVPNPYNLLSGLPPSHQWYTVLDLKDAFFCLRLHPTSQPLFAFEWRDPEMGISGQLTWTRLPQGFKNSPTLFNEALHRDLADFRIQHPDLILLQYVDDLLLAATSELDCQQGTRALLQTLGNLGYRASAKKAQICQKQVKYLGYLLKEGQRWLTEARKETVMGQPTPKTPRQLREFLGKAGFCRLFIPGFAEMAAPLYPLTKPGTLFNWGPDQQKAYQEIKQALLTAPALGLPDLTKPFELFVDEKQGYAKGVLTQKLGPWRRPVAYLSKKLDPVAAGWPPCLRMVAAIAVLTKDAGKLTMGQPLVILAPHAVEALVKQPPDRWLSNARMTHYQALLLDTDRVQFGPVVALNPATLLPLPEEGLQHNCLDILAEAHGTRPDLTDQPLPDADHTWYTDGSSLLQEGQRKAGAAVTTETEVIWAKALPAGTSAQRAELIALTQALKMAEGKKLNVYTDSRYAFATAHIHGEIYRRRGWLTSEGKEIKNKDEILALLKALFLPKRLSIIHCPGHQKGHSAEARGNRMADQAARKAAITETPDTSTLLIENSSPSGGSKRTADGSEFEAGKRTADGSEFEKRTADGSEFESPKKKAKVE

SEQ ID NO: 2616 - protein, 2114 aa, synthetic construct
MPAAKRVKLDGGDKKYSIGLDIGTNSVGWAVITDEYKVPSKKFKVLGNTDRHSIKKNLIGALLFDSGETAEATRLKRTARRRYTRRKNRICYLQEIFSNEMAKVDDSFFHRLEESFLVEEDKKHERHPIFGNIVDEVAYHEKYPTIYHLRKKLVDSTDKADLRLIYLALAHMIKFRGHFLIEGDLNPDNSDVDKLFIQLVQTYNQLFEENPINASGVDAKAILSARLSKSRRLENLIAQLPGEKKNGLFGNLIALSLGLTPNFKSNFDLAEDAKLQLSKDTYDDDLDNLLAQIGDQYADLFLAAKNLSDAILLSDILRVNTEITKAPLSASMIKRYDEHHQDLTLLKALVRQQLPEKYKEIFFDQSKNGYAGYIDGGASQEEFYKFIKPILEKMDGTEELLVKLNREDLLRKQRTFDNGSIPHQIHLGELHAILRRQEDFYPFLKDNREKIEKILTFRIPYYVGPLARGNSRFAWMTRKSEETITPWNFEEVVDKGASAQSFIERMTNFDKNLPNEKVLPKHSLLYEYFTVYNELTKVKYVTEGMRKPAFLSGEQKKAIVDLLFKTNRKVTVKQLKEDYFKKIECFDSVEISGVEDRFNASLGTYHDLLKIIKDKDFLDNEENEDILEDIVLTLTLFEDREMIEERLKTYAHLFDDKVMKQLKRRRYTGWGRLSRKLINGIRDKQSGKTILDFLKSDGFANRNFMQLIHDDSLTFKEDIQKAQVSGQGDSLHEHIANLAGSPAIKKGILQTVKVVDELVKVMGRHKPENIVIEMARENQTTQKGQKNSRERMKRIEEGIKELGSQILKEHPVENTQLQNEKLYLYYLQNGRDMYVDQELDINRLSDYDVDHIVPQSFLKDDSIDNKVLTRSDKARGKSDNVPSEEVVKKMKNYWRQLLNAKLITQRKFDNLTKAERGGLSELDKAGFIKRQLVETRQITKHVAQILDSRMNTKYDENDKLIREVKVITLKSKLVSDFRKDFQFYKVREINNYHHAHDAYLNAVVGTALIKKYPKLESEFVYGDYKVYDVRKMIAKSEQEIGKATAKYFFYSNIMNFFKTEITLANGEIRKRPLIETNGETGEIVWDKGRDFATVRKVLSMPQVNIVKKTEVQTGGFSKESILPKRNSDKLIARKKDWDPKKYGGFDSPTVAYSVLVVAKVEKGKSKKLKSVKELLGITIMERSSFEKNPIDFLEAKGYKEVKKDLIIKLPKYSLFELENGRKRMLASAGELQKGNELALPSKYVNFLYLASHYEKLKGSPEDNEQKQLFVEQHKHYLDEIIEQISEFSKRVILADANLDKVLSAYNKHRDKPIREQAENIIHLFTLTNLGAPAAFKYFDTTIDRKRYTSTKEVLDATLIHQSITGLYETRIDLSQLGGDGGPAPGSSGGGGGTLNIEDEYRLHETSKEPDVSLGSTWLSDFPQAWAETGGMGLAVRQAPLIIPLKATSTPVSIKQYPMSQEARLGIKPHIQRLLDQGILVPCQSPWNTPLLPVKKPGTNDYRPVQDLREVNKRVEDIHPTVPNPYNLLSGLPPSHQWYTVLDLKDAFFCLRLHPTSQPLFAFEWRDPEMGISGQLTWTRLPQGFKNSPTLFNEALHRDLADFRIQHPDLILLQYVDDLLLAATSELDCQQGTRALLQTLGNLGYRASAKKAQICQKQVKYLGYLLKEGQRWLTEARKETVMGQPTPKTPRQLREFLGKAGFCRLFIPGFAEMAAPLYPLTKPGTLFNWGPDQQKAYQEIKQALLTAPALGLPDLTKPFELFVDEKQGYAKGVLTQKLGPWRRPVAYLSKKLDPVAAGWPPCLRMVAAIAVLTKDAGKLTMGQPLVILAPHAVEALVKQPPDRWLSNARMTHYQALLLDTDRVQFGPVVALNPATLLPLPEEGLQHNCLDILAEAHGTRPDLTDQPLPDADHTWYTDGSSLLQEGQRKAGAAVTTETEVIWAKALPAGTSAQRAELIALTQALKMAEGKKLNVYTDSRYAFATAHIHGEIYRRRGWLTSEGKEIKNKDEILALLKALFLPKRLSIIHCPGHQKGHSAEARGNRMADQAARKAAITETPDTSTLLIENSSPSGGSKRTADGSEFEAGKRTADGSEFEKRTADGSEFESPKKKAKVE

SEQ ID NO: 2617 - protein, 2114 aa, synthetic construct
MPAAKRVKLDGGDKKYSIGLDIGTNSVGWAVITDEYKVPSKKFKVLGNTDRHSIKKNLIGALLFDSGETAEATRLKRTARRRYTRRKNRICYLQEIFSNEMAKVDDSFFHRLEESFLVEEDKKHERHPIFGNIVDEVAYHEKYPTIYHLRKKLVDSTDKADLRLIYLALAHMIKFRGHFLIEGDLNPDNSDVDKLFIQLVQTYNQLFEENPINASGVDAKAILSARLSKSRRLENLIAQLPGEKKNGLFGNLIALSLGLTPNFKSNFDLAEDAKLQLSKDTYDDDLDNLLAQIGDQYADLFLAAKNLSDAILLSDILRVNTEITKAPLSASMIKRYDEHHQDLTLLKALVRQQLPEKYKEIFFDQSKNGYAGYIDGGASQEEFYKFIKPILEKMDGTEELLVKLNREDLLRKQRTFDNGSIPHQIHLGELHAILRRQEDFYPFLKDNREKIEKILTFRIPYYVGPLARGNSRFAWMTRKSEETITPWNFEEVVDKGASAQSFIERMTNFDKNLPNEKVLPKHSLLYEYFTVYNELTKVKYVTEGMRKPAFLSGEQKKAIVDLLFKTNRKVTVKQLKEDYFKKIECFDSVEISGVEDRFNASLGTYHDLLKIIKDKDFLDNEENEDILEDIVLTLTLFEDREMIEERLKTYAHLFDDKVMKQLKRRRYTGWGRLSRKLINGIRDKQSGKTILDFLKSDGFANRNFMQLIHDDSLTFKEDIQKAQVSGQGDSLHEHIANLAGSPAIKKGILQTVKVVDELVKVMGRHKPENIVIEMARENQTTQKGQKNSRERMKRIEEGIKELGSQILKEHPVENTQLQNEKLYLYYLQNGRDMYVDQELDINRLSDYDVDHIVPQSFLKDDSIDNKVLTRSDKARGKSDNVPSEEVVKKMKNYWRQLLNAKLITQRKFDNLTKAERGGLSELDKAGFIKRQLVETRQITKHVAQILDSRMNTKYDENDKLIREVKVITLKSKLVSDFRKDFQFYKVREINNYHHAHDAYLNAVVGTALIKKYPKLESEFVYGDYKVYDVRKMIAKSEQEIGKATAKYFFYSNIMNFFKTEITLANGEIRKRPLIETNGETGEIVWDKGRDFATVRKVLSMPQVNIVKKTEVQTGGFSKESILPKRNSDKLIARKKDWDPKKYGGFDSPTVAYSVLVVAKVEKGKSKKLKSVKELLGITIMERSSFEKNPIDFLEAKGYKEVKKDLIIKLPKYSLFELENGRKRMLASAGELQKGNELALPSKYVNFLYLASHYEKLKGSPEDNEQKQLFVEQHKHYLDEIIEQISEFSKRVILADANLDKVLSAYNKHRDKPIREQAENIIHLFTLTNLGAPAAFKYFDTTIDRKRYTSTKEVLDATLIHQSITGLYETRIDLSQLGGDGGGSSGGGGGSGGTLNIEDEYRLHETSKEPDVSLGSTWLSDFPQAWAETGGMGLAVRQAPLIIPLKATSTPVSIKQYPMSQEARLGIKPHIQRLLDQGILVPCQSPWNTPLLPVKKPGTNDYRPVQDLREVNKRVEDIHPTVPNPYNLLSGLPPSHQWYTVLDLKDAFFCLRLHPTSQPLFAFEWRDPEMGISGQLTWTRLPQGFKNSPTLFNEALHRDLADFRIQHPDLILLQYVDDLLLAATSELDCQQGTRALLQTLGNLGYRASAKKAQICQKQVKYLGYLLKEGQRWLTEARKETVMGQPTPKTPRQLREFLGKAGFCRLFIPGFAEMAAPLYPLTKPGTLFNWGPDQQKAYQEIKQALLTAPALGLPDLTKPFELFVDEKQGYAKGVLTQKLGPWRRPVAYLSKKLDPVAAGWPPCLRMVAAIAVLTKDAGKLTMGQPLVILAPHAVEALVKQPPDRWLSNARMTHYQALLLDTDRVQFGPVVALNPATLLPLPEEGLQHNCLDILAEAHGTRPDLTDQPLPDADHTWYTDGSSLLQEGQRKAGAAVTTETEVIWAKALPAGTSAQRAELIALTQALKMAEGKKLNVYTDSRYAFATAHIHGEIYRRRGWLTSEGKEIKNKDEILALLKALFLPKRLSIIHCPGHQKGHSAEARGNRMADQAARKAAITETPDTSTLLIENSSPSGGSKRTADGSEFEAGKRTADGSEFEKRTADGSEFESPKKKAKVE

SEQ ID NO: 2618 - protein, 2114 aa, synthetic construct
MPAAKRVKLDGGDKKYSIGLDIGTNSVGWAVITDEYKVPSKKFKVLGNTDRHSIKKNLIGALLFDSGETAEATRLKRTARRRYTRRKNRICYLQEIFSNEMAKVDDSFFHRLEESFLVEEDKKHERHPIFGNIVDEVAYHEKYPTIYHLRKKLVDSTDKADLRLIYLALAHMIKFRGHFLIEGDLNPDNSDVDKLFIQLVQTYNQLFEENPINASGVDAKAILSARLSKSRRLENLIAQLPGEKKNGLFGNLIALSLGLTPNFKSNFDLAEDAKLQLSKDTYDDDLDNLLAQIGDQYADLFLAAKNLSDAILLSDILRVNTEITKAPLSASMIKRYDEHHQDLTLLKALVRQQLPEKYKEIFFDQSKNGYAGYIDGGASQEEFYKFIKPILEKMDGTEELLVKLNREDLLRKQRTFDNGSIPHQIHLGELHAILRRQEDFYPFLKDNREKIEKILTFRIPYYVGPLARGNSRFAWMTRKSEETITPWNFEEVVDKGASAQSFIERMTNFDKNLPNEKVLPKHSLLYEYFTVYNELTKVKYVTEGMRKPAFLSGEQKKAIVDLLFKTNRKVTVKQLKEDYFKKIECFDSVEISGVEDRFNASLGTYHDLLKIIKDKDFLDNEENEDILEDIVLTLTLFEDREMIEERLKTYAHLFDDKVMKQLKRRRYTGWGRLSRKLINGIRDKQSGKTILDFLKSDGFANRNFMQLIHDDSLTFKEDIQKAQVSGQGDSLHEHIANLAGSPAIKKGILQTVKVVDELVKVMGRHKPENIVIEMARENQTTQKGQKNSRERMKRIEEGIKELGSQILKEHPVENTQLQNEKLYLYYLQNGRDMYVDQELDINRLSDYDVDHIVPQSFLKDDSIDNKVLTRSDKARGKSDNVPSEEVVKKMKNYWRQLLNAKLITQRKFDNLTKAERGGLSELDKAGFIKRQLVETRQITKHVAQILDSRMNTKYDENDKLIREVKVITLKSKLVSDFRKDFQFYKVREINNYHHAHDAYLNAVVGTALIKKYPKLESEFVYGDYKVYDVRKMIAKSEQEIGKATAKYFFYSNIMNFFKTEITLANGEIRKRPLIETNGETGEIVWDKGRDFATVRKVLSMPQVNIVKKTEVQTGGFSKESILPKRNSDKLIARKKDWDPKKYGGFDSPTVAYSVLVVAKVEKGKSKKLKSVKELLGITIMERSSFEKNPIDFLEAKGYKEVKKDLIIKLPKYSLFELENGRKRMLASAGELQKGNELALPSKYVNFLYLASHYEKLKGSPEDNEQKQLFVEQHKHYLDEIIEQISEFSKRVILADANLDKVLSAYNKHRDKPIREQAENIIHLFTLTNLGAPAAFKYFDTTIDRKRYTSTKEVLDATLIHQSITGLYETRIDLSQLGGDGGGGGPAPGGSGGTLNIEDEYRLHETSKEPDVSLGSTWLSDFPQAWAETGGMGLAVRQAPLIIPLKATSTPVSIKQYPMSQEARLGIKPHIQRLLDQGILVPCQSPWNTPLLPVKKPGTNDYRPVQDLREVNKRVEDIHPTVPNPYNLLSGLPPSHQWYTVLDLKDAFFCLRLHPTSQPLFAFEWRDPEMGISGQLTWTRLPQGFKNSPTLFNEALHRDLADFRIQHPDLILLQYVDDLLLAATSELDCQQGTRALLQTLGNLGYRASAKKAQICQKQVKYLGYLLKEGQRWLTEARKETVMGQPTPKTPRQLREFLGKAGFCRLFIPGFAEMAAPLYPLTKPGTLFNWGPDQQKAYQEIKQALLTAPALGLPDLTKPFELFVDEKQGYAKGVLTQKLGPWRRPVAYLSKKLDPVAAGWPPCLRMVAAIAVLTKDAGKLTMGQPLVILAPHAVEALVKQPPDRWLSNARMTHYQALLLDTDRVQFGPVVALNPATLLPLPEEGLQHNCLDILAEAHGTRPDLTDQPLPDADHTWYTDGSSLLQEGQRKAGAAVTTETEVIWAKALPAGTSAQRAELIALTQALKMAEGKKLNVYTDSRYAFATAHIHGEIYRRRGWLTSEGKEIKNKDEILALLKALFLPKRLSIIHCPGHQKGHSAEARGNRMADQAARKAAITETPDTSTLLIENSSPSGGSKRTADGSEFEAGKRTADGSEFEKRTADGSEFESPKKKAKVE

SEQ ID NO: 2619 - protein, 2116 aa, synthetic construct
MPAAKRVKLDGGDKKYSIGLDIGTNSVGWAVITDEYKVPSKKFKVLGNTDRHSIKKNLIGALLFDSGETAEATRLKRTARRRYTRRKNRICYLQEIFSNEMAKVDDSFFHRLEESFLVEEDKKHERHPIFGNIVDEVAYHEKYPTIYHLRKKLVDSTDKADLRLIYLALAHMIKFRGHFLIEGDLNPDNSDVDKLFIQLVQTYNQLFEENPINASGVDAKAILSARLSKSRRLENLIAQLPGEKKNGLFGNLIALSLGLTPNFKSNFDLAEDAKLQLSKDTYDDDLDNLLAQIGDQYADLFLAAKNLSDAILLSDILRVNTEITKAPLSASMIKRYDEHHQDLTLLKALVRQQLPEKYKEIFFDQSKNGYAGYIDGGASQEEFYKFIKPILEKMDGTEELLVKLNREDLLRKQRTFDNGSIPHQIHLGELHAILRRQEDFYPFLKDNREKIEKILTFRIPYYVGPLARGNSRFAWMTRKSEETITPWNFEEVVDKGASAQSFIERMTNFDKNLPNEKVLPKHSLLYEYFTVYNELTKVKYVTEGMRKPAFLSGEQKKAIVDLLFKTNRKVTVKQLKEDYFKKIECFDSVEISGVEDRFNASLGTYHDLLKIIKDKDFLDNEENEDILEDIVLTLTLFEDREMIEERLKTYAHLFDDKVMKQLKRRRYTGWGRLSRKLINGIRDKQSGKTILDFLKSDGFANRNFMQLIHDDSLTFKEDIQKAQVSGQGDSLHEHIANLAGSPAIKKGILQTVKVVDELVKVMGRHKPENIVIEMARENQTTQKGQKNSRERMKRIEEGIKELGSQILKEHPVENTQLQNEKLYLYYLQNGRDMYVDQELDINRLSDYDVDHIVPQSFLKDDSIDNKVLTRSDKARGKSDNVPSEEVVKKMKNYWRQLLNAKLITQRKFDNLTKAERGGLSELDKAGFIKRQLVETRQITKHVAQILDSRMNTKYDENDKLIREVKVITLKSKLVSDFRKDFQFYKVREINNYHHAHDAYLNAVVGTALIKKYPKLESEFVYGDYKVYDVRKMIAKSEQEIGKATAKYFFYSNIMNFFKTEITLANGEIRKRPLIETNGETGEIVWDKGRDFATVRKVLSMPQVNIVKKTEVQTGGFSKESILPKRNSDKLIARKKDWDPKKYGGFDSPTVAYSVLVVAKVEKGKSKKLKSVKELLGITIMERSSFEKNPIDFLEAKGYKEVKKDLIIKLPKYSLFELENGRKRMLASAGELQKGNELALPSKYVNFLYLASHYEKLKGSPEDNEQKQLFVEQHKHYLDEIIEQISEFSKRVILADANLDKVLSAYNKHRDKPIREQAENIIHLFTLTNLGAPAAFKYFDTTIDRKRYTSTKEVLDATLIHQSITGLYETRIDLSQLGGDGGPAPAPAPAPAPGGTLNIEDEYRLHETSKEPDVSLGSTWLSDFPQAWAETGGMGLAVRQAPLIIPLKATSTPVSIKQYPMSQEARLGIKPHIQRLLDQGILVPCQSPWNTPLLPVKKPGTNDYRPVQDLREVNKRVEDIHPTVPNPYNLLSGLPPSHQWYTVLDLKDAFFCLRLHPTSQPLFAFEWRDPEMGISGQLTWTRLPQGFKNSPTLFNEALHRDLADFRIQHPDLILLQYVDDLLLAATSELDCQQGTRALLQTLGNLGYRASAKKAQICQKQVKYLGYLLKEGQRWLTEARKETVMGQPTPKTPRQLREFLGKAGFCRLFIPGFAEMAAPLYPLTKPGTLFNWGPDQQKAYQEIKQALLTAPALGLPDLTKPFELFVDEKQGYAKGVLTQKLGPWRRPVAYLSKKLDPVAAGWPPCLRMVAAIAVLTKDAGKLTMGQPLVILAPHAVEALVKQPPDRWLSNARMTHYQALLLDTDRVQFGPVVALNPATLLPLPEEGLQHNCLDILAEAHGTRPDLTDQPLPDADHTWYTDGSSLLQEGQRKAGAAVTTETEVIWAKALPAGTSAQRAELIALTQALKMAEGKKLNVYTDSRYAFATAHIHGEIYRRRGWLTSEGKEIKNKDEILALLKALFLPKRLSIIHCPGHQKGHSAEARGNRMADQAARKAAITETPDTSTLLIENSSPSGGSKRTADGSEFEAGKRTADGSEFEKRTADGSEFESPKKKAKVE

SEQ ID NO: 2620 - protein, 2110 aa, synthetic construct
MPAAKRVKLDGGDKKYSIGLDIGTNSVGWAVITDEYKVPSKKFKVLGNTDRHSIKKNLIGALLFDSGETAEATRLKRTARRRYTRRKNRICYLQEIFSNEMAKVDDSFFHRLEESFLVEEDKKHERHPIFGNIVDEVAYHEKYPTIYHLRKKLVDSTDKADLRLIYLALAHMIKFRGHFLIEGDLNPDNSDVDKLFIQLVQTYNQLFEENPINASGVDAKAILSARLSKSRRLENLIAQLPGEKKNGLFGNLIALSLGLTPNFKSNFDLAEDAKLQLSKDTYDDDLDNLLAQIGDQYADLFLAAKNLSDAILLSDILRVNTEITKAPLSASMIKRYDEHHQDLTLLKALVRQQLPEKYKEIFFDQSKNGYAGYIDGGASQEEFYKFIKPILEKMDGTEELLVKLNREDLLRKQRTFDNGSIPHQIHLGELHAILRRQEDFYPFLKDNREKIEKILTFRIPYYVGPLARGNSRFAWMTRKSEETITPWNFEEVVDKGASAQSFIERMTNFDKNLPNEKVLPKHSLLYEYFTVYNELTKVKYVTEGMRKPAFLSGEQKKAIVDLLFKTNRKVTVKQLKEDYFKKIECFDSVEISGVEDRFNASLGTYHDLLKIIKDKDFLDNEENEDILEDIVLTLTLFEDREMIEERLKTYAHLFDDKVMKQLKRRRYTGWGRLSRKLINGIRDKQSGKTILDFLKSDGFANRNFMQLIHDDSLTFKEDIQKAQVSGQGDSLHEHIANLAGSPAIKKGILQTVKVVDELVKVMGRHKPENIVIEMARENQTTQKGQKNSRERMKRIEEGIKELGSQILKEHPVENTQLQNEKLYLYYLQNGRDMYVDQELDINRLSDYDVDHIVPQSFLKDDSIDNKVLTRSDKARGKSDNVPSEEVVKKMKNYWRQLLNAKLITQRKFDNLTKAERGGLSELDKAGFIKRQLVETRQITKHVAQILDSRMNTKYDENDKLIREVKVITLKSKLVSDFRKDFQFYKVREINNYHHAHDAYLNAVVGTALIKKYPKLESEFVYGDYKVYDVRKMIAKSEQEIGKATAKYFFYSNIMNFFKTEITLANGEIRKRPLIETNGETGEIVWDKGRDFATVRKVLSMPQVNIVKKTEVQTGGFSKESILPKRNSDKLIARKKDWDPKKYGGFDSPTVAYSVLVVAKVEKGKSKKLKSVKELLGITIMERSSFEKNPIDFLEAKGYKEVKKDLIIKLPKYSLFELENGRKRMLASAGELQKGNELALPSKYVNFLYLASHYEKLKGSPEDNEQKQLFVEQHKHYLDEIIEQISEFSKRVILADANLDKVLSAYNKHRDKPIREQAENIIHLFTLTNLGAPAAFKYFDTTIDRKRYTSTKEVLDATLIHQSITGLYETRIDLSQLGGDGGEAAAKGGTLNIEDEYRLHETSKEPDVSLGSTWLSDFPQAWAETGGMGLAVRQAPLIIPLKATSTPVSIKQYPMSQEARLGIKPHIQRLLDQGILVPCQSPWNTPLLPVKKPGTNDYRPVQDLREVNKRVEDIHPTVPNPYNLLSGLPPSHQWYTVLDLKDAFFCLRLHPTSQPLFAFEWRDPEMGISGQLTWTRLPQGFKNSPTLFNEALHRDLADFRIQHPDLILLQYVDDLLLAATSELDCQQGTRALLQTLGNLGYRASAKKAQICQKQVKYLGYLLKEGQRWLTEARKETVMGQPTPKTPRQLREFLGKAGFCRLFIPGFAEMAAPLYPLTKPGTLFNWGPDQQKAYQEIKQALLTAPALGLPDLTKPFELFVDEKQGYAKGVLTQKLGPWRRPVAYLSKKLDPVAAGWPPCLRMVAAIAVLTKDAGKLTMGQPLVILAPHAVEALVKQPPDRWLSNARMTHYQALLLDTDRVQFGPVVALNPATLLPLPEEGLQHNCLDILAEAHGTRPDLTDQPLPDADHTWYTDGSSLLQEGQRKAGAAVTTETEVIWAKALPAGTSAQRAELIALTQALKMAEGKKLNVYTDSRYAFATAHIHGEIYRRRGWLTSEGKEIKNKDEILALLKALFLPKRLSIIHCPGHQKGHSAEARGNRMADQAARKAAITETPDTSTLLIENSSPSGGSKRTADGSEFEAGKRTADGSEFEKRTADGSEFESPKKKAKVE

SEQ ID NO: 2621 - protein, 2111 aa, synthetic construct
MPAAKRVKLDGGDKKYSIGLDIGTNSVGWAVITDEYKVPSKKFKVLGNTDRHSIKKNLIGALLFDSGETAEATRLKRTARRRYTRRKNRICYLQEIFSNEMAKVDDSFFHRLEESFLVEEDKKHERHPIFGNIVDEVAYHEKYPTIYHLRKKLVDSTDKADLRLIYLALAHMIKFRGHFLIEGDLNPDNSDVDKLFIQLVQTYNQLFEENPINASGVDAKAILSARLSKSRRLENLIAQLPGEKKNGLFGNLIALSLGLTPNFKSNFDLAEDAKLQLSKDTYDDDLDNLLAQIGDQYADLFLAAKNLSDAILLSDILRVNTEITKAPLSASMIKRYDEHHQDLTLLKALVRQQLPEKYKEIFFDQSKNGYAGYIDGGASQEEFYKFIKPILEKMDGTEELLVKLNREDLLRKQRTFDNGSIPHQIHLGELHAILRRQEDFYPFLKDNREKIEKILTFRIPYYVGPLARGNSRFAWMTRKSEETITPWNFEEVVDKGASAQSFIERMTNFDKNLPNEKVLPKHSLLYEYFTVYNELTKVKYVTEGMRKPAFLSGEQKKAIVDLLFKTNRKVTVKQLKEDYFKKIECFDSVEISGVEDRFNASLGTYHDLLKIIKDKDFLDNEENEDILEDIVLTLTLFEDREMIEERLKTYAHLFDDKVMKQLKRRRYTGWGRLSRKLINGIRDKQSGKTILDFLKSDGFANRNFMQLIHDDSLTFKEDIQKAQVSGQGDSLHEHIANLAGSPAIKKGILQTVKVVDELVKVMGRHKPENIVIEMARENQTTQKGQKNSRERMKRIEEGIKELGSQILKEHPVENTQLQNEKLYLYYLQNGRDMYVDQELDINRLSDYDVDHIVPQSFLKDDSIDNKVLTRSDKARGKSDNVPSEEVVKKMKNYWRQLLNAKLITQRKFDNLTKAERGGLSELDKAGFIKRQLVETRQITKHVAQILDSRMNTKYDENDKLIREVKVITLKSKLVSDFRKDFQFYKVREINNYHHAHDAYLNAVVGTALIKKYPKLESEFVYGDYKVYDVRKMIAKSEQEIGKATAKYFFYSNIMNFFKTEITLANGEIRKRPLIETNGETGEIVWDKGRDFATVRKVLSMPQVNIVKKTEVQTGGFSKESILPKRNSDKLIARKKDWDPKKYGGFDSPTVAYSVLVVAKVEKGKSKKLKSVKELLGITIMERSSFEKNPIDFLEAKGYKEVKKDLIIKLPKYSLFELENGRKRMLASAGELQKGNELALPSKYVNFLYLASHYEKLKGSPEDNEQKQLFVEQHKHYLDEIIEQISEFSKRVILADANLDKVLSAYNKHRDKPIREQAENIIHLFTLTNLGAPAAFKYFDTTIDRKRYTSTKEVLDATLIHQSITGLYETRIDLSQLGGDGGGGGGSSGGTLNIEDEYRLHETSKEPDVSLGSTWLSDFPQAWAETGGMGLAVRQAPLIIPLKATSTPVSIKQYPMSQEARLGIKPHIQRLLDQGILVPCQSPWNTPLLPVKKPGTNDYRPVQDLREVNKRVEDIHPTVPNPYNLLSGLPPSHQWYTVLDLKDAFFCLRLHPTSQPLFAFEWRDPEMGISGQLTWTRLPQGFKNSPTLFNEALHRDLADFRIQHPDLILLQYVDDLLLAATSELDCQQGTRALLQTLGNLGYRASAKKAQICQKQVKYLGYLLKEGQRWLTEARKETVMGQPTPKTPRQLREFLGKAGFCRLFIPGFAEMAAPLYPLTKPGTLFNWGPDQQKAYQEIKQALLTAPALGLPDLTKPFELFVDEKQGYAKGVLTQKLGPWRRPVAYLSKKLDPVAAGWPPCLRMVAAIAVLTKDAGKLTMGQPLVILAPHAVEALVKQPPDRWLSNARMTHYQALLLDTDRVQFGPVVALNPATLLPLPEEGLQHNCLDILAEAHGTRPDLTDQPLPDADHTWYTDGSSLLQEGQRKAGAAVTTETEVIWAKALPAGTSAQRAELIALTQALKMAEGKKLNVYTDSRYAFATAHIHGEIYRRRGWLTSEGKEIKNKDEILALLKALFLPKRLSIIHCPGHQKGHSAEARGNRMADQAARKAAITETPDTSTLLIENSSPSGGSKRTADGSEFEAGKRTADGSEFEKRTADGSEFESPKKKAKVE

SEQ ID NO: 2622 - protein, 2114 aa, synthetic construct
MPAAKRVKLDGGDKKYSIGLDIGTNSVGWAVITDEYKVPSKKFKVLGNTDRHSIKKNLIGALLFDSGETAEATRLKRTARRRYTRRKNRICYLQEIFSNEMAKVDDSFFHRLEESFLVEEDKKHERHPIFGNIVDEVAYHEKYPTIYHLRKKLVDSTDKADLRLIYLALAHMIKFRGHFLIEGDLNPDNSDVDKLFIQLVQTYNQLFEENPINASGVDAKAILSARLSKSRRLENLIAQLPGEKKNGLFGNLIALSLGLTPNFKSNFDLAEDAKLQLSKDTYDDDLDNLLAQIGDQYADLFLAAKNLSDAILLSDILRVNTEITKAPLSASMIKRYDEHHQDLTLLKALVRQQLPEKYKEIFFDQSKNGYAGYIDGGASQEEFYKFIKPILEKMDGTEELLVKLNREDLLRKQRTFDNGSIPHQIHLGELHAILRRQEDFYPFLKDNREKIEKILTFRIPYYVGPLARGNSRFAWMTRKSEETITPWNFEEVVDKGASAQSFIERMTNFDKNLPNEKVLPKHSLLYEYFTVYNELTKVKYVTEGMRKPAFLSGEQKKAIVDLLFKTNRKVTVKQLKEDYFKKIECFDSVEISGVEDRFNASLGTYHDLLKIIKDKDFLDNEENEDILEDIVLTLTLFEDREMIEERLKTYAHLFDDKVMKQLKRRRYTGWGRLSRKLINGIRDKQSGKTILDFLKSDGFANRNFMQLIHDDSLTFKEDIQKAQVSGQGDSLHEHIANLAGSPAIKKGILQTVKVVDELVKVMGRHKPENIVIEMARENQTTQKGQKNSRERMKRIEEGIKELGSQILKEHPVENTQLQNEKLYLYYLQNGRDMYVDQELDINRLSDYDVDHIVPQSFLKDDSIDNKVLTRSDKARGKSDNVPSEEVVKKMKNYWRQLLNAKLITQRKFDNLTKAERGGLSELDKAGFIKRQLVETRQITKHVAQILDSRMNTKYDENDKLIREVKVITLKSKLVSDFRKDFQFYKVREINNYHHAHDAYLNAVVGTALIKKYPKLESEFVYGDYKVYDVRKMIAKSEQEIGKATAKYFFYSNIMNFFKTEITLANGEIRKRPLIETNGETGEIVWDKGRDFATVRKVLSMPQVNIVKKTEVQTGGFSKESILPKRNSDKLIARKKDWDPKKYGGFDSPTVAYSVLVVAKVEKGKSKKLKSVKELLGITIMERSSFEKNPIDFLEAKGYKEVKKDLIIKLPKYSLFELENGRKRMLASAGELQKGNELALPSKYVNFLYLASHYEKLKGSPEDNEQKQLFVEQHKHYLDEIIEQISEFSKRVILADANLDKVLSAYNKHRDKPIREQAENIIHLFTLTNLGAPAAFKYFDTTIDRKRYTSTKEVLDATLIHQSITGLYETRIDLSQLGGDGGGGSGGGPAPGGTLNIEDEYRLHETSKEPDVSLGSTWLSDFPQAWAETGGMGLAVRQAPLIIPLKATSTPVSIKQYPMSQEARLGIKPHIQRLLDQGILVPCQSPWNTPLLPVKKPGTNDYRPVQDLREVNKRVEDIHPTVPNPYNLLSGLPPSHQWYTVLDLKDAFFCLRLHPTSQPLFAFEWRDPEMGISGQLTWTRLPQGFKNSPTLFNEALHRDLADFRIQHPDLILLQYVDDLLLAATSELDCQQGTRALLQTLGNLGYRASAKKAQICQKQVKYLGYLLKEGQRWLTEARKETVMGQPTPKTPRQLREFLGKAGFCRLFIPGFAEMAAPLYPLTKPGTLFNWGPDQQKAYQEIKQALLTAPALGLPDLTKPFELFVDEKQGYAKGVLTQKLGPWRRPVAYLSKKLDPVAAGWPPCLRMVAAIAVLTKDAGKLTMGQPLVILAPHAVEALVKQPPDRWLSNARMTHYQALLLDTDRVQFGPVVALNPATLLPLPEEGLQHNCLDILAEAHGTRPDLTDQPLPDADHTWYTDGSSLLQEGQRKAGAAVTTETEVIWAKALPAGTSAQRAELIALTQALKMAEGKKLNVYTDSRYAFATAHIHGEIYRRRGWLTSEGKEIKNKDEILALLKALFLPKRLSIIHCPGHQKGHSAEARGNRMADQAARKAAITETPDTSTLLIENSSPSGGSKRTADGSEFEAGKRTADGSEFEKRTADGSEFESPKKKAKVE

SEQ ID NO: 2623 - protein, 2120 aa, synthetic construct
MPAAKRVKLDGGDKKYSIGLDIGTNSVGWAVITDEYKVPSKKFKVLGNTDRHSIKKNLIGALLFDSGETAEATRLKRTARRRYTRRKNRICYLQEIFSNEMAKVDDSFFHRLEESFLVEEDKKHERHPIFGNIVDEVAYHEKYPTIYHLRKKLVDSTDKADLRLIYLALAHMIKFRGHFLIEGDLNPDNSDVDKLFIQLVQTYNQLFEENPINASGVDAKAILSARLSKSRRLENLIAQLPGEKKNGLFGNLIALSLGLTPNFKSNFDLAEDAKLQLSKDTYDDDLDNLLAQIGDQYADLFLAAKNLSDAILLSDILRVNTEITKAPLSASMIKRYDEHHQDLTLLKALVRQQLPEKYKEIFFDQSKNGYAGYIDGGASQEEFYKFIKPILEKMDGTEELLVKLNREDLLRKQRTFDNGSIPHQIHLGELHAILRRQEDFYPFLKDNREKIEKILTFRIPYYVGPLARGNSRFAWMTRKSEETITPWNFEEVVDKGASAQSFIERMTNFDKNLPNEKVLPKHSLLYEYFTVYNELTKVKYVTEGMRKPAFLSGEQKKAIVDLLFKTNRKVTVKQLKEDYFKKIECFDSVEISGVEDRFNASLGTYHDLLKIIKDKDFLDNEENEDILEDIVLTLTLFEDREMIEERLKTYAHLFDDKVMKQLKRRRYTGWGRLSRKLINGIRDKQSGKTILDFLKSDGFANRNFMQLIHDDSLTFKEDIQKAQVSGQGDSLHEHIANLAGSPAIKKGILQTVKVVDELVKVMGRHKPENIVIEMARENQTTQKGQKNSRERMKRIEEGIKELGSQILKEHPVENTQLQNEKLYLYYLQNGRDMYVDQELDINRLSDYDVDHIVPQSFLKDDSIDNKVLTRSDKARGKSDNVPSEEVVKKMKNYWRQLLNAKLITQRKFDNLTKAERGGLSELDKAGFIKRQLVETRQITKHVAQILDSRMNTKYDENDKLIREVKVITLKSKLVSDFRKDFQFYKVREINNYHHAHDAYLNAVVGTALIKKYPKLESEFVYGDYKVYDVRKMIAKSEQEIGKATAKYFFYSNIMNFFKTEITLANGEIRKRPLIETNGETGEIVWDKGRDFATVRKVLSMPQVNIVKKTEVQTGGFSKESILPKRNSDKLIARKKDWDPKKYGGFDSPTVAYSVLVVAKVEKGKSKKLKSVKELLGITIMERSSFEKNPIDFLEAKGYKEVKKDLIIKLPKYSLFELENGRKRMLASAGELQKGNELALPSKYVNFLYLASHYEKLKGSPEDNEQKQLFVEQHKHYLDEIIEQISEFSKRVILADANLDKVLSAYNKHRDKPIREQAENIIHLFTLTNLGAPAAFKYFDTTIDRKRYTSTKEVLDATLIHQSITGLYETRIDLSQLGGDGGEAAAKGGGGSEAAAKGGTLNIEDEYRLHETSKEPDVSLGSTWLSDFPQAWAETGGMGLAVRQAPLIIPLKATSTPVSIKQYPMSQEARLGIKPHIQRLLDQGILVPCQSPWNTPLLPVKKPGTNDYRPVQDLREVNKRVEDIHPTVPNPYNLLSGLPPSHQWYTVLDLKDAFFCLRLHPTSQPLFAFEWRDPEMGISGQLTWTRLPQGFKNSPTLFNEALHRDLADFRIQHPDLILLQYVDDLLLAATSELDCQQGTRALLQTLGNLGYRASAKKAQICQKQVKYLGYLLKEGQRWLTEARKETVMGQPTPKTPRQLREFLGKAGFCRLFIPGFAEMAAPLYPLTKPGTLFNWGPDQQKAYQEIKQALLTAPALGLPDLTKPFELFVDEKQGYAKGVLTQKLGPWRRPVAYLSKKLDPVAAGWPPCLRMVAAIAVLTKDAGKLTMGQPLVILAPHAVEALVKQPPDRWLSNARMTHYQALLLDTDRVQFGPVVALNPATLLPLPEEGLQHNCLDILAEAHGTRPDLTDQPLPDADHTWYTDGSSLLQEGQRKAGAAVTTETEVIWAKALPAGTSAQRAELIALTQALKMAEGKKLNVYTDSRYAFATAHIHGEIYRRRGWLTSEGKEIKNKDEILALLKALFLPKRLSIIHCPGHQKGHSAEARGNRMADQAARKAAITETPDTSTLLIENSSPSGGSKRTADGSEFEAGKRTADGSEFEKRTADGSEFESPKKKAKVE

SEQ ID NO: 2624 - protein, 2108 aa, synthetic construct
MPAAKRVKLDGGDKKYSIGLDIGTNSVGWAVITDEYKVPSKKFKVLGNTDRHSIKKNLIGALLFDSGETAEATRLKRTARRRYTRRKNRICYLQEIFSNEMAKVDDSFFHRLEESFLVEEDKKHERHPIFGNIVDEVAYHEKYPTIYHLRKKLVDSTDKADLRLIYLALAHMIKFRGHFLIEGDLNPDNSDVDKLFIQLVQTYNQLFEENPINASGVDAKAILSARLSKSRRLENLIAQLPGEKKNGLFGNLIALSLGLTPNFKSNFDLAEDAKLQLSKDTYDDDLDNLLAQIGDQYADLFLAAKNLSDAILLSDILRVNTEITKAPLSASMIKRYDEHHQDLTLLKALVRQQLPEKYKEIFFDQSKNGYAGYIDGGASQEEFYKFIKPILEKMDGTEELLVKLNREDLLRKQRTFDNGSIPHQIHLGELHAILRRQEDFYPFLKDNREKIEKILTFRIPYYVGPLARGNSRFAWMTRKSEETITPWNFEEVVDKGASAQSFIERMTNFDKNLPNEKVLPKHSLLYEYFTVYNELTKVKYVTEGMRKPAFLSGEQKKAIVDLLFKTNRKVTVKQLKEDYFKKIECFDSVEISGVEDRFNASLGTYHDLLKIIKDKDFLDNEENEDILEDIVLTLTLFEDREMIEERLKTYAHLFDDKVMKQLKRRRYTGWGRLSRKLINGIRDKQSGKTILDFLKSDGFANRNFMQLIHDDSLTFKEDIQKAQVSGQGDSLHEHIANLAGSPAIKKGILQTVKVVDELVKVMGRHKPENIVIEMARENQTTQKGQKNSRERMKRIEEGIKELGSQILKEHPVENTQLQNEKLYLYYLQNGRDMYVDQELDINRLSDYDVDHIVPQSFLKDDSIDNKVLTRSDKARGKSDNVPSEEVVKKMKNYWRQLLNAKLITQRKFDNLTKAERGGLSELDKAGFIKRQLVETRQITKHVAQILDSRMNTKYDENDKLIREVKVITLKSKLVSDFRKDFQFYKVREINNYHHAHDAYLNAVVGTALIKKYPKLESEFVYGDYKVYDVRKMIAKSEQEIGKATAKYFFYSNIMNFFKTEITLANGEIRKRPLIETNGETGEIVWDKGRDFATVRKVLSMPQVNIVKKTEVQTGGFSKESILPKRNSDKLIARKKDWDPKKYGGFDSPTVAYSVLVVAKVEKGKSKKLKSVKELLGITIMERSSFEKNPIDFLEAKGYKEVKKDLIIKLPKYSLFELENGRKRMLASAGELQKGNELALPSKYVNFLYLASHYEKLKGSPEDNEQKQLFVEQHKHYLDEIIEQISEFSKRVILADANLDKVLSAYNKHRDKPIREQAENIIHLFTLTNLGAPAAFKYFDTTIDRKRYTSTKEVLDATLIHQSITGLYETRIDLSQLGGDGGPAPGGTLNIEDEYRLHETSKEPDVSLGSTWLSDFPQAWAETGGMGLAVRQAPLIIPLKATSTPVSIKQYPMSQEARLGIKPHIQRLLDQGILVPCQSPWNTPLLPVKKPGTNDYRPVQDLREVNKRVEDIHPTVPNPYNLLSGLPPSHQWYTVLDLKDAFFCLRLHPTSQPLFAFEWRDPEMGISGQLTWTRLPQGFKNSPTLFNEALHRDLADFRIQHPDLILLQYVDDLLLAATSELDCQQGTRALLQTLGNLGYRASAKKAQICQKQVKYLGYLLKEGQRWLTEARKETVMGQPTPKTPRQLREFLGKAGFCRLFIPGFAEMAAPLYPLTKPGTLFNWGPDQQKAYQEIKQALLTAPALGLPDLTKPFELFVDEKQGYAKGVLTQKLGPWRRPVAYLSKKLDPVAAGWPPCLRMVAAIAVLTKDAGKLTMGQPLVILAPHAVEALVKQPPDRWLSNARMTHYQALLLDTDRVQFGPVVALNPATLLPLPEEGLQHNCLDILAEAHGTRPDLTDQPLPDADHTWYTDGSSLLQEGQRKAGAAVTTETEVIWAKALPAGTSAQRAELIALTQALKMAEGKKLNVYTDSRYAFATAHIHGEIYRRRGWLTSEGKEIKNKDEILALLKALFLPKRLSIIHCPGHQKGHSAEARGNRMADQAARKAAITETPDTSTLLIENSSPSGGSKRTADGSEFEAGKRTADGSEFEKRTADGSEFESPKKKAKVE

SEQ ID NO: 2625 - protein, 2113 aa, synthetic construct
MPAAKRVKLDGGDKKYSIGLDIGTNSVGWAVITDEYKVPSKKFKVLGNTDRHSIKKNLIGALLFDSGETAEATRLKRTARRRYTRRKNRICYLQEIFSNEMAKVDDSFFHRLEESFLVEEDKKHERHPIFGNIVDEVAYHEKYPTIYHLRKKLVDSTDKADLRLIYLALAHMIKFRGHFLIEGDLNPDNSDVDKLFIQLVQTYNQLFEENPINASGVDAKAILSARLSKSRRLENLIAQLPGEKKNGLFGNLIALSLGLTPNFKSNFDLAEDAKLQLSKDTYDDDLDNLLAQIGDQYADLFLAAKNLSDAILLSDILRVNTEITKAPLSASMIKRYDEHHQDLTLLKALVRQQLPEKYKEIFFDQSKNGYAGYIDGGASQEEFYKFIKPILEKMDGTEELLVKLNREDLLRKQRTFDNGSIPHQIHLGELHAILRRQEDFYPFLKDNREKIEKILTFRIPYYVGPLARGNSRFAWMTRKSEETITPWNFEEVVDKGASAQSFIERMTNFDKNLPNEKVLPKHSLLYEYFTVYNELTKVKYVTEGMRKPAFLSGEQKKAIVDLLFKTNRKVTVKQLKEDYFKKIECFDSVEISGVEDRFNASLGTYHDLLKIIKDKDFLDNEENEDILEDIVLTLTLFEDREMIEERLKTYAHLFDDKVMKQLKRRRYTGWGRLSRKLINGIRDKQSGKTILDFLKSDGFANRNFMQLIHDDSLTFKEDIQKAQVSGQGDSLHEHIANLAGSPAIKKGILQTVKVVDELVKVMGRHKPENIVIEMARENQTTQKGQKNSRERMKRIEEGIKELGSQILKEHPVENTQLQNEKLYLYYLQNGRDMYVDQELDINRLSDYDVDHIVPQSFLKDDSIDNKVLTRSDKARGKSDNVPSEEVVKKMKNYWRQLLNAKLITQRKFDNLTKAERGGLSELDKAGFIKRQLVETRQITKHVAQILDSRMNTKYDENDKLIREVKVITLKSKLVSDFRKDFQFYKVREINNYHHAHDAYLNAVVGTALIKKYPKLESEFVYGDYKVYDVRKMIAKSEQEIGKATAKYFFYSNIMNFFKTEITLANGEIRKRPLIETNGETGEIVWDKGRDFATVRKVLSMPQVNIVKKTEVQTGGFSKESILPKRNSDKLIARKKDWDPKKYGGFDSPTVAYSVLVVAKVEKGKSKKLKSVKELLGITIMERSSFEKNPIDFLEAKGYKEVKKDLIIKLPKYSLFELENGRKRMLASAGELQKGNELALPSKYVNFLYLASHYEKLKGSPEDNEQKQLFVEQHKHYLDEIIEQISEFSKRVILADANLDKVLSAYNKHRDKPIREQAENIIHLFTLTNLGAPAAFKYFDTTIDRKRYTSTKEVLDATLIHQSITGLYETRIDLSQLGGDGGEAAAKGSSGGTLNIEDEYRLHETSKEPDVSLGSTWLSDFPQAWAETGGMGLAVRQAPLIIPLKATSTPVSIKQYPMSQEARLGIKPHIQRLLDQGILVPCQSPWNTPLLPVKKPGTNDYRPVQDLREVNKRVEDIHPTVPNPYNLLSGLPPSHQWYTVLDLKDAFFCLRLHPTSQPLFAFEWRDPEMGISGQLTWTRLPQGFKNSPTLFNEALHRDLADFRIQHPDLILLQYVDDLLLAATSELDCQQGTRALLQTLGNLGYRASAKKAQICQKQVKYLGYLLKEGQRWLTEARKETVMGQPTPKTPRQLREFLGKAGFCRLFIPGFAEMAAPLYPLTKPGTLFNWGPDQQKAYQEIKQALLTAPALGLPDLTKPFELFVDEKQGYAKGVLTQKLGPWRRPVAYLSKKLDPVAAGWPPCLRMVAAIAVLTKDAGKLTMGQPLVILAPHAVEALVKQPPDRWLSNARMTHYQALLLDTDRVQFGPVVALNPATLLPLPEEGLQHNCLDILAEAHGTRPDLTDQPLPDADHTWYTDGSSLLQEGQRKAGAAVTTETEVIWAKALPAGTSAQRAELIALTQALKMAEGKKLNVYTDSRYAFATAHIHGEIYRRRGWLTSEGKEIKNKDEILALLKALFLPKRLSIIHCPGHQKGHSAEARGNRMADQAARKAAITETPDTSTLLIENSSPSGGSKRTADGSEFEAGKRTADGSEFEKRTADGSEFESPKKKAKVE

SEQ ID NO: 2626 - protein, 2113 aa, synthetic construct
MPAAKRVKLDGGDKKYSIGLDIGTNSVGWAVITDEYKVPSKKFKVLGNTDRHSIKKNLIGALLFDSGETAEATRLKRTARRRYTRRKNRICYLQEIFSNEMAKVDDSFFHRLEESFLVEEDKKHERHPIFGNIVDEVAYHEKYPTIYHLRKKLVDSTDKADLRLIYLALAHMIKFRGHFLIEGDLNPDNSDVDKLFIQLVQTYNQLFEENPINASGVDAKAILSARLSKSRRLENLIAQLPGEKKNGLFGNLIALSLGLTPNFKSNFDLAEDAKLQLSKDTYDDDLDNLLAQIGDQYADLFLAAKNLSDAILLSDILRVNTEITKAPLSASMIKRYDEHHQDLTLLKALVRQQLPEKYKEIFFDQSKNGYAGYIDGGASQEEFYKFIKPILEKMDGTEELLVKLNREDLLRKQRTFDNGSIPHQIHLGELHAILRRQEDFYPFLKDNREKIEKILTFRIPYYVGPLARGNSRFAWMTRKSEETITPWNFEEVVDKGASAQSFIERMTNFDKNLPNEKVLPKHSLLYEYFTVYNELTKVKYVTEGMRKPAFLSGEQKKAIVDLLFKTNRKVTVKQLKEDYFKKIECFDSVEISGVEDRFNASLGTYHDLLKIIKDKDFLDNEENEDILEDIVLTLTLFEDREMIEERLKTYAHLFDDKVMKQLKRRRYTGWGRLSRKLINGIRDKQSGKTILDFLKSDGFANRNFMQLIHDDSLTFKEDIQKAQVSGQGDSLHEHIANLAGSPAIKKGILQTVKVVDELVKVMGRHKPENIVIEMARENQTTQKGQKNSRERMKRIEEGIKELGSQILKEHPVENTQLQNEKLYLYYLQNGRDMYVDQELDINRLSDYDVDHIVPQSFLKDDSIDNKVLTRSDKARGKSDNVPSEEVVKKMKNYWRQLLNAKLITQRKFDNLTKAERGGLSELDKAGFIKRQLVETRQITKHVAQILDSRMNTKYDENDKLIREVKVITLKSKLVSDFRKDFQFYKVREINNYHHAHDAYLNAVVGTALIKKYPKLESEFVYGDYKVYDVRKMIAKSEQEIGKATAKYFFYSNIMNFFKTEITLANGEIRKRPLIETNGETGEIVWDKGRDFATVRKVLSMPQVNIVKKTEVQTGGFSKESILPKRNSDKLIARKKDWDPKKYGGFDSPTVAYSVLVVAKVEKGKSKKLKSVKELLGITIMERSSFEKNPIDFLEAKGYKEVKKDLIIKLPKYSLFELENGRKRMLASAGELQKGNELALPSKYVNFLYLASHYEKLKGSPEDNEQKQLFVEQHKHYLDEIIEQISEFSKRVILADANLDKVLSAYNKHRDKPIREQAENIIHLFTLTNLGAPAAFKYFDTTIDRKRYTSTKEVLDATLIHQSITGLYETRIDLSQLGGDGGGGGGGGGGGGTLNIEDEYRLHETSKEPDVSLGSTWLSDFPQAWAETGGMGLAVRQAPLIIPLKATSTPVSIKQYPMSQEARLGIKPHIQRLLDQGILVPCQSPWNTPLLPVKKPGTNDYRPVQDLREVNKRVEDIHPTVPNPYNLLSGLPPSHQWYTVLDLKDAFFCLRLHPTSQPLFAFEWRDPEMGISGQLTWTRLPQGFKNSPTLFNEALHRDLADFRIQHPDLILLQYVDDLLLAATSELDCQQGTRALLQTLGNLGYRASAKKAQICQKQVKYLGYLLKEGQRWLTEARKETVMGQPTPKTPRQLREFLGKAGFCRLFIPGFAEMAAPLYPLTKPGTLFNWGPDQQKAYQEIKQALLTAPALGLPDLTKPFELFVDEKQGYAKGVLTQKLGPWRRPVAYLSKKLDPVAAGWPPCLRMVAAIAVLTKDAGKLTMGQPLVILAPHAVEALVKQPPDRWLSNARMTHYQALLLDTDRVQFGPVVALNPATLLPLPEEGLQHNCLDILAEAHGTRPDLTDQPLPDADHTWYTDGSSLLQEGQRKAGAAVTTETEVIWAKALPAGTSAQRAELIALTQALKMAEGKKLNVYTDSRYAFATAHIHGEIYRRRGWLTSEGKEIKNKDEILALLKALFLPKRLSIIHCPGHQKGHSAEARGNRMADQAARKAAITETPDTSTLLIENSSPSGGSKRTADGSEFEAGKRTADGSEFEKRTADGSEFESPKKKAKVE

SEQ ID NO: 2627 - protein, 2120 aa, synthetic construct
MPAAKRVKLDGGDKKYSIGLDIGTNSVGWAVITDEYKVPSKKFKVLGNTDRHSIKKNLIGALLFDSGETAEATRLKRTARRRYTRRKNRICYLQEIFSNEMAKVDDSFFHRLEESFLVEEDKKHERHPIFGNIVDEVAYHEKYPTIYHLRKKLVDSTDKADLRLIYLALAHMIKFRGHFLIEGDLNPDNSDVDKLFIQLVQTYNQLFEENPINASGVDAKAILSARLSKSRRLENLIAQLPGEKKNGLFGNLIALSLGLTPNFKSNFDLAEDAKLQLSKDTYDDDLDNLLAQIGDQYADLFLAAKNLSDAILLSDILRVNTEITKAPLSASMIKRYDEHHQDLTLLKALVRQQLPEKYKEIFFDQSKNGYAGYIDGGASQEEFYKFIKPILEKMDGTEELLVKLNREDLLRKQRTFDNGSIPHQIHLGELHAILRRQEDFYPFLKDNREKIEKILTFRIPYYVGPLARGNSRFAWMTRKSEETITPWNFEEVVDKGASAQSFIERMTNFDKNLPNEKVLPKHSLLYEYFTVYNELTKVKYVTEGMRKPAFLSGEQKKAIVDLLFKTNRKVTVKQLKEDYFKKIECFDSVEISGVEDRFNASLGTYHDLLKIIKDKDFLDNEENEDILEDIVLTLTLFEDREMIEERLKTYAHLFDDKVMKQLKRRRYTGWGRLSRKLINGIRDKQSGKTILDFLKSDGFANRNFMQLIHDDSLTFKEDIQKAQVSGQGDSLHEHIANLAGSPAIKKGILQTVKVVDELVKVMGRHKPENIVIEMARENQTTQKGQKNSRERMKRIEEGIKELGSQILKEHPVENTQLQNEKLYLYYLQNGRDMYVDQELDINRLSDYDVDHIVPQSFLKDDSIDNKVLTRSDKARGKSDNVPSEEVVKKMKNYWRQLLNAKLITQRKFDNLTKAERGGLSELDKAGFIKRQLVETRQITKHVAQILDSRMNTKYDENDKLIREVKVITLKSKLVSDFRKDFQFYKVREINNYHHAHDAYLNAVVGTALIKKYPKLESEFVYGDYKVYDVRKMIAKSEQEIGKATAKYFFYSNIMNFFKTEITLANGEIRKRPLIETNGETGEIVWDKGRDFATVRKVLSMPQVNIVKKTEVQTGGFSKESILPKRNSDKLIARKKDWDPKKYGGFDSPTVAYSVLVVAKVEKGKSKKLKSVKELLGITIMERSSFEKNPIDFLEAKGYKEVKKDLIIKLPKYSLFELENGRKRMLASAGELQKGNELALPSKYVNFLYLASHYEKLKGSPEDNEQKQLFVEQHKHYLDEIIEQISEFSKRVILADANLDKVLSAYNKHRDKPIREQAENIIHLFTLTNLGAPAAFKYFDTTIDRKRYTSTKEVLDATLIHQSITGLYETRIDLSQLGGDGGEAAAKEAAAKEAAAKGGTLNIEDEYRLHETSKEPDVSLGSTWLSDFPQAWAETGGMGLAVRQAPLIIPLKATSTPVSIKQYPMSQEARLGIKPHIQRLLDQGILVPCQSPWNTPLLPVKKPGTNDYRPVQDLREVNKRVEDIHPTVPNPYNLLSGLPPSHQWYTVLDLKDAFFCLRLHPTSQPLFAFEWRDPEMGISGQLTWTRLPQGFKNSPTLFNEALHRDLADFRIQHPDLILLQYVDDLLLAATSELDCQQGTRALLQTLGNLGYRASAKKAQICQKQVKYLGYLLKEGQRWLTEARKETVMGQPTPKTPRQLREFLGKAGFCRLFIPGFAEMAAPLYPLTKPGTLFNWGPDQQKAYQEIKQALLTAPALGLPDLTKPFELFVDEKQGYAKGVLTQKLGPWRRPVAYLSKKLDPVAAGWPPCLRMVAAIAVLTKDAGKLTMGQPLVILAPHAVEALVKQPPDRWLSNARMTHYQALLLDTDRVQFGPVVALNPATLLPLPEEGLQHNCLDILAEAHGTRPDLTDQPLPDADHTWYTDGSSLLQEGQRKAGAAVTTETEVIWAKALPAGTSAQRAELIALTQALKMAEGKKLNVYTDSRYAFATAHIHGEIYRRRGWLTSEGKEIKNKDEILALLKALFLPKRLSIIHCPGHQKGHSAEARGNRMADQAARKAAITETPDTSTLLIENSSPSGGSKRTADGSEFEAGKRTADGSEFEKRTADGSEFESPKKKAKVE

SEQ ID NO: 2628 - protein, 2116 aa, synthetic construct
MPAAKRVKLDGGDKKYSIGLDIGTNSVGWAVITDEYKVPSKKFKVLGNTDRHSIKKNLIGALLFDSGETAEATRLKRTARRRYTRRKNRICYLQEIFSNEMAKVDDSFFHRLEESFLVEEDKKHERHPIFGNIVDEVAYHEKYPTIYHLRKKLVDSTDKADLRLIYLALAHMIKFRGHFLIEGDLNPDNSDVDKLFIQLVQTYNQLFEENPINASGVDAKAILSARLSKSRRLENLIAQLPGEKKNGLFGNLIALSLGLTPNFKSNFDLAEDAKLQLSKDTYDDDLDNLLAQIGDQYADLFLAAKNLSDAILLSDILRVNTEITKAPLSASMIKRYDEHHQDLTLLKALVRQQLPEKYKEIFFDQSKNGYAGYIDGGASQEEFYKFIKPILEKMDGTEELLVKLNREDLLRKQRTFDNGSIPHQIHLGELHAILRRQEDFYPFLKDNREKIEKILTFRIPYYVGPLARGNSRFAWMTRKSEETITPWNFEEVVDKGASAQSFIERMTNFDKNLPNEKVLPKHSLLYEYFTVYNELTKVKYVTEGMRKPAFLSGEQKKAIVDLLFKTNRKVTVKQLKEDYFKKIECFDSVEISGVEDRFNASLGTYHDLLKIIKDKDFLDNEENEDILEDIVLTLTLFEDREMIEERLKTYAHLFDDKVMKQLKRRRYTGWGRLSRKLINGIRDKQSGKTILDFLKSDGFANRNFMQLIHDDSLTFKEDIQKAQVSGQGDSLHEHIANLAGSPAIKKGILQTVKVVDELVKVMGRHKPENIVIEMARENQTTQKGQKNSRERMKRIEEGIKELGSQILKEHPVENTQLQNEKLYLYYLQNGRDMYVDQELDINRLSDYDVDHIVPQSFLKDDSIDNKVLTRSDKARGKSDNVPSEEVVKKMKNYWRQLLNAKLITQRKFDNLTKAERGGLSELDKAGFIKRQLVETRQITKHVAQILDSRMNTKYDENDKLIREVKVITLKSKLVSDFRKDFQFYKVREINNYHHAHDAYLNAVVGTALIKKYPKLESEFVYGDYKVYDVRKMIAKSEQEIGKATAKYFFYSNIMNFFKTEITLANGEIRKRPLIETNGETGEIVWDKGRDFATVRKVLSMPQVNIVKKTEVQTGGFSKESILPKRNSDKLIARKKDWDPKKYGGFDSPTVAYSVLVVAKVEKGKSKKLKSVKELLGITIMERSSFEKNPIDFLEAKGYKEVKKDLIIKLPKYSLFELENGRKRMLASAGELQKGNELALPSKYVNFLYLASHYEKLKGSPEDNEQKQLFVEQHKHYLDEIIEQISEFSKRVILADANLDKVLSAYNKHRDKPIREQAENIIHLFTLTNLGAPAAFKYFDTTIDRKRYTSTKEVLDATLIHQSITGLYETRIDLSQLGGDGGEAAAKPAPGSSGGTLNIEDEYRLHETSKEPDVSLGSTWLSDFPQAWAETGGMGLAVRQAPLIIPLKATSTPVSIKQYPMSQEARLGIKPHIQRLLDQGILVPCQSPWNTPLLPVKKPGTNDYRPVQDLREVNKRVEDIHPTVPNPYNLLSGLPPSHQWYTVLDLKDAFFCLRLHPTSQPLFAFEWRDPEMGISGQLTWTRLPQGFKNSPTLFNEALHRDLADFRIQHPDLILLQYVDDLLLAATSELDCQQGTRALLQTLGNLGYRASAKKAQICQKQVKYLGYLLKEGQRWLTEARKETVMGQPTPKTPRQLREFLGKAGFCRLFIPGFAEMAAPLYPLTKPGTLFNWGPDQQKAYQEIKQALLTAPALGLPDLTKPFELFVDEKQGYAKGVLTQKLGPWRRPVAYLSKKLDPVAAGWPPCLRMVAAIAVLTKDAGKLTMGQPLVILAPHAVEALVKQPPDRWLSNARMTHYQALLLDTDRVQFGPVVALNPATLLPLPEEGLQHNCLDILAEAHGTRPDLTDQPLPDADHTWYTDGSSLLQEGQRKAGAAVTTETEVIWAKALPAGTSAQRAELIALTQALKMAEGKKLNVYTDSRYAFATAHIHGEIYRRRGWLTSEGKEIKNKDEILALLKALFLPKRLSIIHCPGHQKGHSAEARGNRMADQAARKAAITETPDTSTLLIENSSPSGGSKRTADGSEFEAGKRTADGSEFEKRTADGSEFESPKKKAKVE

SEQ ID NO: 2629 - protein, 2116 aa, synthetic construct
MPAAKRVKLDGGDKKYSIGLDIGTNSVGWAVITDEYKVPSKKFKVLGNTDRHSIKKNLIGALLFDSGETAEATRLKRTARRRYTRRKNRICYLQEIFSNEMAKVDDSFFHRLEESFLVEEDKKHERHPIFGNIVDEVAYHEKYPTIYHLRKKLVDSTDKADLRLIYLALAHMIKFRGHFLIEGDLNPDNSDVDKLFIQLVQTYNQLFEENPINASGVDAKAILSARLSKSRRLENLIAQLPGEKKNGLFGNLIALSLGLTPNFKSNFDLAEDAKLQLSKDTYDDDLDNLLAQIGDQYADLFLAAKNLSDAILLSDILRVNTEITKAPLSASMIKRYDEHHQDLTLLKALVRQQLPEKYKEIFFDQSKNGYAGYIDGGASQEEFYKFIKPILEKMDGTEELLVKLNREDLLRKQRTFDNGSIPHQIHLGELHAILRRQEDFYPFLKDNREKIEKILTFRIPYYVGPLARGNSRFAWMTRKSEETITPWNFEEVVDKGASAQSFIERMTNFDKNLPNEKVLPKHSLLYEYFTVYNELTKVKYVTEGMRKPAFLSGEQKKAIVDLLFKTNRKVTVKQLKEDYFKKIECFDSVEISGVEDRFNASLGTYHDLLKIIKDKDFLDNEENEDILEDIVLTLTLFEDREMIEERLKTYAHLFDDKVMKQLKRRRYTGWGRLSRKLINGIRDKQSGKTILDFLKSDGFANRNFMQLIHDDSLTFKEDIQKAQVSGQGDSLHEHIANLAGSPAIKKGILQTVKVVDELVKVMGRHKPENIVIEMARENQTTQKGQKNSRERMKRIEEGIKELGSQILKEHPVENTQLQNEKLYLYYLQNGRDMYVDQELDINRLSDYDVDHIVPQSFLKDDSIDNKVLTRSDKARGKSDNVPSEEVVKKMKNYWRQLLNAKLITQRKFDNLTKAERGGLSELDKAGFIKRQLVETRQITKHVAQILDSRMNTKYDENDKLIREVKVITLKSKLVSDFRKDFQFYKVREINNYHHAHDAYLNAVVGTALIKKYPKLESEFVYGDYKVYDVRKMIAKSEQEIGKATAKYFFYSNIMNFFKTEITLANGEIRKRPLIETNGETGEIVWDKGRDFATVRKVLSMPQVNIVKKTEVQTGGFSKESILPKRNSDKLIARKKDWDPKKYGGFDSPTVAYSVLVVAKVEKGKSKKLKSVKELLGITIMERSSFEKNPIDFLEAKGYKEVKKDLIIKLPKYSLFELENGRKRMLASAGELQKGNELALPSKYVNFLYLASHYEKLKGSPEDNEQKQLFVEQHKHYLDEIIEQISEFSKRVILADANLDKVLSAYNKHRDKPIREQAENIIHLFTLTNLGAPAAFKYFDTTIDRKRYTSTKEVLDATLIHQSITGLYETRIDLSQLGGDGGGGSEAAAKGGGGGTLNIEDEYRLHETSKEPDVSLGSTWLSDFPQAWAETGGMGLAVRQAPLIIPLKATSTPVSIKQYPMSQEARLGIKPHIQRLLDQGILVPCQSPWNTPLLPVKKPGTNDYRPVQDLREVNKRVEDIHPTVPNPYNLLSGLPPSHQWYTVLDLKDAFFCLRLHPTSQPLFAFEWRDPEMGISGQLTWTRLPQGFKNSPTLFNEALHRDLADFRIQHPDLILLQYVDDLLLAATSELDCQQGTRALLQTLGNLGYRASAKKAQICQKQVKYLGYLLKEGQRWLTEARKETVMGQPTPKTPRQLREFLGKAGFCRLFIPGFAEMAAPLYPLTKPGTLFNWGPDQQKAYQEIKQALLTAPALGLPDLTKPFELFVDEKQGYAKGVLTQKLGPWRRPVAYLSKKLDPVAAGWPPCLRMVAAIAVLTKDAGKLTMGQPLVILAPHAVEALVKQPPDRWLSNARMTHYQALLLDTDRVQFGPVVALNPATLLPLPEEGLQHNCLDILAEAHGTRPDLTDQPLPDADHTWYTDGSSLLQEGQRKAGAAVTTETEVIWAKALPAGTSAQRAELIALTQALKMAEGKKLNVYTDSRYAFATAHIHGEIYRRRGWLTSEGKEIKNKDEILALLKALFLPKRLSIIHCPGHQKGHSAEARGNRMADQAARKAAITETPDTSTLLIENSSPSGGSKRTADGSEFEAGKRTADGSEFEKRTADGSEFESPKKKAKVE

SEQ ID NO: 2630 - protein, 2135 aa, synthetic construct
MPAAKRVKLDGGDKKYSIGLDIGTNSVGWAVITDEYKVPSKKFKVLGNTDRHSIKKNLIGALLFDSGETAEATRLKRTARRRYTRRKNRICYLQEIFSNEMAKVDDSFFHRLEESFLVEEDKKHERHPIFGNIVDEVAYHEKYPTIYHLRKKLVDSTDKADLRLIYLALAHMIKFRGHFLIEGDLNPDNSDVDKLFIQLVQTYNQLFEENPINASGVDAKAILSARLSKSRRLENLIAQLPGEKKNGLFGNLIALSLGLTPNFKSNFDLAEDAKLQLSKDTYDDDLDNLLAQIGDQYADLFLAAKNLSDAILLSDILRVNTEITKAPLSASMIKRYDEHHQDLTLLKALVRQQLPEKYKEIFFDQSKNGYAGYIDGGASQEEFYKFIKPILEKMDGTEELLVKLNREDLLRKQRTFDNGSIPHQIHLGELHAILRRQEDFYPFLKDNREKIEKILTFRIPYYVGPLARGNSRFAWMTRKSEETITPWNFEEVVDKGASAQSFIERMTNFDKNLPNEKVLPKHSLLYEYFTVYNELTKVKYVTEGMRKPAFLSGEQKKAIVDLLFKTNRKVTVKQLKEDYFKKIECFDSVEISGVEDRFNASLGTYHDLLKIIKDKDFLDNEENEDILEDIVLTLTLFEDREMIEERLKTYAHLFDDKVMKQLKRRRYTGWGRLSRKLINGIRDKQSGKTILDFLKSDGFANRNFMQLIHDDSLTFKEDIQKAQVSGQGDSLHEHIANLAGSPAIKKGILQTVKVVDELVKVMGRHKPENIVIEMARENQTTQKGQKNSRERMKRIEEGIKELGSQILKEHPVENTQLQNEKLYLYYLQNGRDMYVDQELDINRLSDYDVDHIVPQSFLKDDSIDNKVLTRSDKARGKSDNVPSEEVVKKMKNYWRQLLNAKLITQRKFDNLTKAERGGLSELDKAGFIKRQLVETRQITKHVAQILDSRMNTKYDENDKLIREVKVITLKSKLVSDFRKDFQFYKVREINNYHHAHDAYLNAVVGTALIKKYPKLESEFVYGDYKVYDVRKMIAKSEQEIGKATAKYFFYSNIMNFFKTEITLANGEIRKRPLIETNGETGEIVWDKGRDFATVRKVLSMPQVNIVKKTEVQTGGFSKESILPKRNSDKLIARKKDWDPKKYGGFDSPTVAYSVLVVAKVEKGKSKKLKSVKELLGITIMERSSFEKNPIDFLEAKGYKEVKKDLIIKLPKYSLFELENGRKRMLASAGELQKGNELALPSKYVNFLYLASHYEKLKGSPEDNEQKQLFVEQHKHYLDEIIEQISEFSKRVILADANLDKVLSAYNKHRDKPIREQAENIIHLFTLTNLGAPAAFKYFDTTIDRKRYTSTKEVLDATLIHQSITGLYETRIDLSQLGGDGGEAAAKEAAAKEAAAKEAAAKEAAAKEAAAKGGTLNIEDEYRLHETSKEPDVSLGSTWLSDFPQAWAETGGMGLAVRQAPLIIPLKATSTPVSIKQYPMSQEARLGIKPHIQRLLDQGILVPCQSPWNTPLLPVKKPGTNDYRPVQDLREVNKRVEDIHPTVPNPYNLLSGLPPSHQWYTVLDLKDAFFCLRLHPTSQPLFAFEWRDPEMGISGQLTWTRLPQGFKNSPTLFNEALHRDLADFRIQHPDLILLQYVDDLLLAATSELDCQQGTRALLQTLGNLGYRASAKKAQICQKQVKYLGYLLKEGQRWLTEARKETVMGQPTPKTPRQLREFLGKAGFCRLFIPGFAEMAAPLYPLTKPGTLFNWGPDQQKAYQEIKQALLTAPALGLPDLTKPFELFVDEKQGYAKGVLTQKLGPWRRPVAYLSKKLDPVAAGWPPCLRMVAAIAVLTKDAGKLTMGQPLVILAPHAVEALVKQPPDRWLSNARMTHYQALLLDTDRVQFGPVVALNPATLLPLPEEGLQHNCLDILAEAHGTRPDLTDQPLPDADHTWYTDGSSLLQEGQRKAGAAVTTETEVIWAKALPAGTSAQRAELIALTQALKMAEGKKLNVYTDSRYAFATAHIHGEIYRRRGWLTSEGKEIKNKDEILALLKALFLPKRLSIIHCPGHQKGHSAEARGNRMADQAARKAAITETPDTSTLLIENSSPSGGSKRTADGSEFEAGKRTADGSEFEKRTADGSEFESPKKKAKVE

SEQ ID NO: 2631 - protein, 2108 aa, synthetic construct
MPAAKRVKLDGGDKKYSIGLDIGTNSVGWAVITDEYKVPSKKFKVLGNTDRHSIKKNLIGALLFDSGETAEATRLKRTARRRYTRRKNRICYLQEIFSNEMAKVDDSFFHRLEESFLVEEDKKHERHPIFGNIVDEVAYHEKYPTIYHLRKKLVDSTDKADLRLIYLALAHMIKFRGHFLIEGDLNPDNSDVDKLFIQLVQTYNQLFEENPINASGVDAKAILSARLSKSRRLENLIAQLPGEKKNGLFGNLIALSLGLTPNFKSNFDLAEDAKLQLSKDTYDDDLDNLLAQIGDQYADLFLAAKNLSDAILLSDILRVNTEITKAPLSASMIKRYDEHHQDLTLLKALVRQQLPEKYKEIFFDQSKNGYAGYIDGGASQEEFYKFIKPILEKMDGTEELLVKLNREDLLRKQRTFDNGSIPHQIHLGELHAILRRQEDFYPFLKDNREKIEKILTFRIPYYVGPLARGNSRFAWMTRKSEETITPWNFEEVVDKGASAQSFIERMTNFDKNLPNEKVLPKHSLLYEYFTVYNELTKVKYVTEGMRKPAFLSGEQKKAIVDLLFKTNRKVTVKQLKEDYFKKIECFDSVEISGVEDRFNASLGTYHDLLKIIKDKDFLDNEENEDILEDIVLTLTLFEDREMIEERLKTYAHLFDDKVMKQLKRRRYTGWGRLSRKLINGIRDKQSGKTILDFLKSDGFANRNFMQLIHDDSLTFKEDIQKAQVSGQGDSLHEHIANLAGSPAIKKGILQTVKVVDELVKVMGRHKPENIVIEMARENQTTQKGQKNSRERMKRIEEGIKELGSQILKEHPVENTQLQNEKLYLYYLQNGRDMYVDQELDINRLSDYDVDHIVPQSFLKDDSIDNKVLTRSDKARGKSDNVPSEEVVKKMKNYWRQLLNAKLITQRKFDNLTKAERGGLSELDKAGFIKRQLVETRQITKHVAQILDSRMNTKYDENDKLIREVKVITLKSKLVSDFRKDFQFYKVREINNYHHAHDAYLNAVVGTALIKKYPKLESEFVYGDYKVYDVRKMIAKSEQEIGKATAKYFFYSNIMNFFKTEITLANGEIRKRPLIETNGETGEIVWDKGRDFATVRKVLSMPQVNIVKKTEVQTGGFSKESILPKRNSDKLIARKKDWDPKKYGGFDSPTVAYSVLVVAKVEKGKSKKLKSVKELLGITIMERSSFEKNPIDFLEAKGYKEVKKDLIIKLPKYSLFELENGRKRMLASAGELQKGNELALPSKYVNFLYLASHYEKLKGSPEDNEQKQLFVEQHKHYLDEIIEQISEFSKRVILADANLDKVLSAYNKHRDKPIREQAENIIHLFTLTNLGAPAAFKYFDTTIDRKRYTSTKEVLDATLIHQSITGLYETRIDLSQLGGDGGGGSGGTLNIEDEYRLHETSKEPDVSLGSTWLSDFPQAWAETGGMGLAVRQAPLIIPLKATSTPVSIKQYPMSQEARLGIKPHIQRLLDQGILVPCQSPWNTPLLPVKKPGTNDYRPVQDLREVNKRVEDIHPTVPNPYNLLSGLPPSHQWYTVLDLKDAFFCLRLHPTSQPLFAFEWRDPEMGISGQLTWTRLPQGFKNSPTLFNEALHRDLADFRIQHPDLILLQYVDDLLLAATSELDCQQGTRALLQTLGNLGYRASAKKAQICQKQVKYLGYLLKEGQRWLTEARKETVMGQPTPKTPRQLREFLGKAGFCRLFIPGFAEMAAPLYPLTKPGTLFNWGPDQQKAYQEIKQALLTAPALGLPDLTKPFELFVDEKQGYAKGVLTQKLGPWRRPVAYLSKKLDPVAAGWPPCLRMVAAIAVLTKDAGKLTMGQPLVILAPHAVEALVKQPPDRWLSNARMTHYQALLLDTDRVQFGPVVALNPATLLPLPEEGLQHNCLDILAEAHGTRPDLTDQPLPDADHTWYTDGSSLLQEGQRKAGAAVTTETEVIWAKALPAGTSAQRAELIALTQALKMAEGKKLNVYTDSRYAFATAHIHGEIYRRRGWLTSEGKEIKNKDEILALLKALFLPKRLSIIHCPGHQKGHSAEARGNRMADQAARKAAITETPDTSTLLIENSSPSGGSKRTADGSEFEAGKRTADGSEFEKRTADGSEFESPKKKAKVE

SEQ ID NO: 2632 - protein, 2114 aa, synthetic construct
MPAAKRVKLDGGDKKYSIGLDIGTNSVGWAVITDEYKVPSKKFKVLGNTDRHSIKKNLIGALLFDSGETAEATRLKRTARRRYTRRKNRICYLQEIFSNEMAKVDDSFFHRLEESFLVEEDKKHERHPIFGNIVDEVAYHEKYPTIYHLRKKLVDSTDKADLRLIYLALAHMIKFRGHFLIEGDLNPDNSDVDKLFIQLVQTYNQLFEENPINASGVDAKAILSARLSKSRRLENLIAQLPGEKKNGLFGNLIALSLGLTPNFKSNFDLAEDAKLQLSKDTYDDDLDNLLAQIGDQYADLFLAAKNLSDAILLSDILRVNTEITKAPLSASMIKRYDEHHQDLTLLKALVRQQLPEKYKEIFFDQSKNGYAGYIDGGASQEEFYKFIKPILEKMDGTEELLVKLNREDLLRKQRTFDNGSIPHQIHLGELHAILRRQEDFYPFLKDNREKIEKILTFRIPYYVGPLARGNSRFAWMTRKSEETITPWNFEEVVDKGASAQSFIERMTNFDKNLPNEKVLPKHSLLYEYFTVYNELTKVKYVTEGMRKPAFLSGEQKKAIVDLLFKTNRKVTVKQLKEDYFKKIECFDSVEISGVEDRFNASLGTYHDLLKIIKDKDFLDNEENEDILEDIVLTLTLFEDREMIEERLKTYAHLFDDKVMKQLKRRRYTGWGRLSRKLINGIRDKQSGKTILDFLKSDGFANRNFMQLIHDDSLTFKEDIQKAQVSGQGDSLHEHIANLAGSPAIKKGILQTVKVVDELVKVMGRHKPENIVIEMARENQTTQKGQKNSRERMKRIEEGIKELGSQILKEHPVENTQLQNEKLYLYYLQNGRDMYVDQELDINRLSDYDVDHIVPQSFLKDDSIDNKVLTRSDKARGKSDNVPSEEVVKKMKNYWRQLLNAKLITQRKFDNLTKAERGGLSELDKAGFIKRQLVETRQITKHVAQILDSRMNTKYDENDKLIREVKVITLKSKLVSDFRKDFQFYKVREINNYHHAHDAYLNAVVGTALIKKYPKLESEFVYGDYKVYDVRKMIAKSEQEIGKATAKYFFYSNIMNFFKTEITLANGEIRKRPLIETNGETGEIVWDKGRDFATVRKVLSMPQVNIVKKTEVQTGGFSKESILPKRNSDKLIARKKDWDPKKYGGFDSPTVAYSVLVVAKVEKGKSKKLKSVKELLGITIMERSSFEKNPIDFLEAKGYKEVKKDLIIKLPKYSLFELENGRKRMLASAGELQKGNELALPSKYVNFLYLASHYEKLKGSPEDNEQKQLFVEQHKHYLDEIIEQISEFSKRVILADANLDKVLSAYNKHRDKPIREQAENIIHLFTLTNLGAPAAFKYFDTTIDRKRYTSTKEVLDATLIHQSITGLYETRIDLSQLGGDGGGGGGSSGGSGGTLNIEDEYRLHETSKEPDVSLGSTWLSDFPQAWAETGGMGLAVRQAPLIIPLKATSTPVSIKQYPMSQEARLGIKPHIQRLLDQGILVPCQSPWNTPLLPVKKPGTNDYRPVQDLREVNKRVEDIHPTVPNPYNLLSGLPPSHQWYTVLDLKDAFFCLRLHPTSQPLFAFEWRDPEMGISGQLTWTRLPQGFKNSPTLFNEALHRDLADFRIQHPDLILLQYVDDLLLAATSELDCQQGTRALLQTLGNLGYRASAKKAQICQKQVKYLGYLLKEGQRWLTEARKETVMGQPTPKTPRQLREFLGKAGFCRLFIPGFAEMAAPLYPLTKPGTLFNWGPDQQKAYQEIKQALLTAPALGLPDLTKPFELFVDEKQGYAKGVLTQKLGPWRRPVAYLSKKLDPVAAGWPPCLRMVAAIAVLTKDAGKLTMGQPLVILAPHAVEALVKQPPDRWLSNARMTHYQALLLDTDRVQFGPVVALNPATLLPLPEEGLQHNCLDILAEAHGTRPDLTDQPLPDADHTWYTDGSSLLQEGQRKAGAAVTTETEVIWAKALPAGTSAQRAELIALTQALKMAEGKKLNVYTDSRYAFATAHIHGEIYRRRGWLTSEGKEIKNKDEILALLKALFLPKRLSIIHCPGHQKGHSAEARGNRMADQAARKAAITETPDTSTLLIENSSPSGGSKRTADGSEFEAGKRTADGSEFEKRTADGSEFESPKKKAKVE

SEQ ID NO: 2633 - protein, 2114 aa, synthetic construct
MPAAKRVKLDGGDKKYSIGLDIGTNSVGWAVITDEYKVPSKKFKVLGNTDRHSIKKNLIGALLFDSGETAEATRLKRTARRRYTRRKNRICYLQEIFSNEMAKVDDSFFHRLEESFLVEEDKKHERHPIFGNIVDEVAYHEKYPTIYHLRKKLVDSTDKADLRLIYLALAHMIKFRGHFLIEGDLNPDNSDVDKLFIQLVQTYNQLFEENPINASGVDAKAILSARLSKSRRLENLIAQLPGEKKNGLFGNLIALSLGLTPNFKSNFDLAEDAKLQLSKDTYDDDLDNLLAQIGDQYADLFLAAKNLSDAILLSDILRVNTEITKAPLSASMIKRYDEHHQDLTLLKALVRQQLPEKYKEIFFDQSKNGYAGYIDGGASQEEFYKFIKPILEKMDGTEELLVKLNREDLLRKQRTFDNGSIPHQIHLGELHAILRRQEDFYPFLKDNREKIEKILTFRIPYYVGPLARGNSRFAWMTRKSEETITPWNFEEVVDKGASAQSFIERMTNFDKNLPNEKVLPKHSLLYEYFTVYNELTKVKYVTEGMRKPAFLSGEQKKAIVDLLFKTNRKVTVKQLKEDYFKKIECFDSVEISGVEDRFNASLGTYHDLLKIIKDKDFLDNEENEDILEDIVLTLTLFEDREMIEERLKTYAHLFDDKVMKQLKRRRYTGWGRLSRKLINGIRDKQSGKTILDFLKSDGFANRNFMQLIHDDSLTFKEDIQKAQVSGQGDSLHEHIANLAGSPAIKKGILQTVKVVDELVKVMGRHKPENIVIEMARENQTTQKGQKNSRERMKRIEEGIKELGSQILKEHPVENTQLQNEKLYLYYLQNGRDMYVDQELDINRLSDYDVDHIVPQSFLKDDSIDNKVLTRSDKARGKSDNVPSEEVVKKMKNYWRQLLNAKLITQRKFDNLTKAERGGLSELDKAGFIKRQLVETRQITKHVAQILDSRMNTKYDENDKLIREVKVITLKSKLVSDFRKDFQFYKVREINNYHHAHDAYLNAVVGTALIKKYPKLESEFVYGDYKVYDVRKMIAKSEQEIGKATAKYFFYSNIMNFFKTEITLANGEIRKRPLIETNGETGEIVWDKGRDFATVRKVLSMPQVNIVKKTEVQTGGFSKESILPKRNSDKLIARKKDWDPKKYGGFDSPTVAYSVLVVAKVEKGKSKKLKSVKELLGITIMERSSFEKNPIDFLEAKGYKEVKKDLIIKLPKYSLFELENGRKRMLASAGELQKGNELALPSKYVNFLYLASHYEKLKGSPEDNEQKQLFVEQHKHYLDEIIEQISEFSKRVILADANLDKVLSAYNKHRDKPIREQAENIIHLFTLTNLGAPAAFKYFDTTIDRKRYTSTKEVLDATLIHQSITGLYETRIDLSQLGGDGGGSSPAPGGGGGTLNIEDEYRLHETSKEPDVSLGSTWLSDFPQAWAETGGMGLAVRQAPLIIPLKATSTPVSIKQYPMSQEARLGIKPHIQRLLDQGILVPCQSPWNTPLLPVKKPGTNDYRPVQDLREVNKRVEDIHPTVPNPYNLLSGLPPSHQWYTVLDLKDAFFCLRLHPTSQPLFAFEWRDPEMGISGQLTWTRLPQGFKNSPTLFNEALHRDLADFRIQHPDLILLQYVDDLLLAATSELDCQQGTRALLQTLGNLGYRASAKKAQICQKQVKYLGYLLKEGQRWLTEARKETVMGQPTPKTPRQLREFLGKAGFCRLFIPGFAEMAAPLYPLTKPGTLFNWGPDQQKAYQEIKQALLTAPALGLPDLTKPFELFVDEKQGYAKGVLTQKLGPWRRPVAYLSKKLDPVAAGWPPCLRMVAAIAVLTKDAGKLTMGQPLVILAPHAVEALVKQPPDRWLSNARMTHYQALLLDTDRVQFGPVVALNPATLLPLPEEGLQHNCLDILAEAHGTRPDLTDQPLPDADHTWYTDGSSLLQEGQRKAGAAVTTETEVIWAKALPAGTSAQRAELIALTQALKMAEGKKLNVYTDSRYAFATAHIHGEIYRRRGWLTSEGKEIKNKDEILALLKALFLPKRLSIIHCPGHQKGHSAEARGNRMADQAARKAAITETPDTSTLLIENSSPSGGSKRTADGSEFEAGKRTADGSEFEKRTADGSEFESPKKKAKVE

SEQ ID NO: 2634 - protein, 2114 aa, synthetic construct
MPAAKRVKLDGGDKKYSIGLDIGTNSVGWAVITDEYKVPSKKFKVLGNTDRHSIKKNLIGALLFDSGETAEATRLKRTARRRYTRRKNRICYLQEIFSNEMAKVDDSFFHRLEESFLVEEDKKHERHPIFGNIVDEVAYHEKYPTIYHLRKKLVDSTDKADLRLIYLALAHMIKFRGHFLIEGDLNPDNSDVDKLFIQLVQTYNQLFEENPINASGVDAKAILSARLSKSRRLENLIAQLPGEKKNGLFGNLIALSLGLTPNFKSNFDLAEDAKLQLSKDTYDDDLDNLLAQIGDQYADLFLAAKNLSDAILLSDILRVNTEITKAPLSASMIKRYDEHHQDLTLLKALVRQQLPEKYKEIFFDQSKNGYAGYIDGGASQEEFYKFIKPILEKMDGTEELLVKLNREDLLRKQRTFDNGSIPHQIHLGELHAILRRQEDFYPFLKDNREKIEKILTFRIPYYVGPLARGNSRFAWMTRKSEETITPWNFEEVVDKGASAQSFIERMTNFDKNLPNEKVLPKHSLLYEYFTVYNELTKVKYVTEGMRKPAFLSGEQKKAIVDLLFKTNRKVTVKQLKEDYFKKIECFDSVEISGVEDRFNASLGTYHDLLKIIKDKDFLDNEENEDILEDIVLTLTLFEDREMIEERLKTYAHLFDDKVMKQLKRRRYTGWGRLSRKLINGIRDKQSGKTILDFLKSDGFANRNFMQLIHDDSLTFKEDIQKAQVSGQGDSLHEHIANLAGSPAIKKGILQTVKVVDELVKVMGRHKPENIVIEMARENQTTQKGQKNSRERMKRIEEGIKELGSQILKEHPVENTQLQNEKLYLYYLQNGRDMYVDQELDINRLSDYDVDHIVPQSFLKDDSIDNKVLTRSDKARGKSDNVPSEEVVKKMKNYWRQLLNAKLITQRKFDNLTKAERGGLSELDKAGFIKRQLVETRQITKHVAQILDSRMNTKYDENDKLIREVKVITLKSKLVSDFRKDFQFYKVREINNYHHAHDAYLNAVVGTALIKKYPKLESEFVYGDYKVYDVRKMIAKSEQEIGKATAKYFFYSNIMNFFKTEITLANGEIRKRPLIETNGETGEIVWDKGRDFATVRKVLSMPQVNIVKKTEVQTGGFSKESILPKRNSDKLIARKKDWDPKKYGGFDSPTVAYSVLVVAKVEKGKSKKLKSVKELLGITIMERSSFEKNPIDFLEAKGYKEVKKDLIIKLPKYSLFELENGRKRMLASAGELQKGNELALPSKYVNFLYLASHYEKLKGSPEDNEQKQLFVEQHKHYLDEIIEQISEFSKRVILADANLDKVLSAYNKHRDKPIREQAENIIHLFTLTNLGAPAAFKYFDTTIDRKRYTSTKEVLDATLIHQSITGLYETRIDLSQLGGDGGGSSGSSGSSGGTLNIEDEYRLHETSKEPDVSLGSTWLSDFPQAWAETGGMGLAVRQAPLIIPLKATSTPVSIKQYPMSQEARLGIKPHIQRLLDQGILVPCQSPWNTPLLPVKKPGTNDYRPVQDLREVNKRVEDIHPTVPNPYNLLSGLPPSHQWYTVLDLKDAFFCLRLHPTSQPLFAFEWRDPEMGISGQLTWTRLPQGFKNSPTLFNEALHRDLADFRIQHPDLILLQYVDDLLLAATSELDCQQGTRALLQTLGNLGYRASAKKAQICQKQVKYLGYLLKEGQRWLTEARKETVMGQPTPKTPRQLREFLGKAGFCRLFIPGFAEMAAPLYPLTKPGTLFNWGPDQQKAYQEIKQALLTAPALGLPDLTKPFELFVDEKQGYAKGVLTQKLGPWRRPVAYLSKKLDPVAAGWPPCLRMVAAIAVLTKDAGKLTMGQPLVILAPHAVEALVKQPPDRWLSNARMTHYQALLLDTDRVQFGPVVALNPATLLPLPEEGLQHNCLDILAEAHGTRPDLTDQPLPDADHTWYTDGSSLLQEGQRKAGAAVTTETEVIWAKALPAGTSAQRAELIALTQALKMAEGKKLNVYTDSRYAFATAHIHGEIYRRRGWLTSEGKEIKNKDEILALLKALFLPKRLSIIHCPGHQKGHSAEARGNRMADQAARKAAITETPDTSTLLIENSSPSGGSKRTADGSEFEAGKRTADGSEFEKRTADGSEFESPKKKAKVE

SEQ ID NO: 2635 - protein, 2112 aa, synthetic construct
MPAAKRVKLDGGDKKYSIGLDIGTNSVGWAVITDEYKVPSKKFKVLGNTDRHSIKKNLIGALLFDSGETAEATRLKRTARRRYTRRKNRICYLQEIFSNEMAKVDDSFFHRLEESFLVEEDKKHERHPIFGNIVDEVAYHEKYPTIYHLRKKLVDSTDKADLRLIYLALAHMIKFRGHFLIEGDLNPDNSDVDKLFIQLVQTYNQLFEENPINASGVDAKAILSARLSKSRRLENLIAQLPGEKKNGLFGNLIALSLGLTPNFKSNFDLAEDAKLQLSKDTYDDDLDNLLAQIGDQYADLFLAAKNLSDAILLSDILRVNTEITKAPLSASMIKRYDEHHQDLTLLKALVRQQLPEKYKEIFFDQSKNGYAGYIDGGASQEEFYKFIKPILEKMDGTEELLVKLNREDLLRKQRTFDNGSIPHQIHLGELHAILRRQEDFYPFLKDNREKIEKILTFRIPYYVGPLARGNSRFAWMTRKSEETITPWNFEEVVDKGASAQSFIERMTNFDKNLPNEKVLPKHSLLYEYFTVYNELTKVKYVTEGMRKPAFLSGEQKKAIVDLLFKTNRKVTVKQLKEDYFKKIECFDSVEISGVEDRFNASLGTYHDLLKIIKDKDFLDNEENEDILEDIVLTLTLFEDREMIEERLKTYAHLFDDKVMKQLKRRRYTGWGRLSRKLINGIRDKQSGKTILDFLKSDGFANRNFMQLIHDDSLTFKEDIQKAQVSGQGDSLHEHIANLAGSPAIKKGILQTVKVVDELVKVMGRHKPENIVIEMARENQTTQKGQKNSRERMKRIEEGIKELGSQILKEHPVENTQLQNEKLYLYYLQNGRDMYVDQELDINRLSDYDVDHIVPQSFLKDDSIDNKVLTRSDKARGKSDNVPSEEVVKKMKNYWRQLLNAKLITQRKFDNLTKAERGGLSELDKAGFIKRQLVETRQITKHVAQILDSRMNTKYDENDKLIREVKVITLKSKLVSDFRKDFQFYKVREINNYHHAHDAYLNAVVGTALIKKYPKLESEFVYGDYKVYDVRKMIAKSEQEIGKATAKYFFYSNIMNFFKTEITLANGEIRKRPLIETNGETGEIVWDKGRDFATVRKVLSMPQVNIVKKTEVQTGGFSKESILPKRNSDKLIARKKDWDPKKYGGFDSPTVAYSVLVVAKVEKGKSKKLKSVKELLGITIMERSSFEKNPIDFLEAKGYKEVKKDLIIKLPKYSLFELENGRKRMLASAGELQKGNELALPSKYVNFLYLASHYEKLKGSPEDNEQKQLFVEQHKHYLDEIIEQISEFSKRVILADANLDKVLSAYNKHRDKPIREQAENIIHLFTLTNLGAPAAFKYFDTTIDRKRYTSTKEVLDATLIHQSITGLYETRIDLSQLGGDGGGGGGGGGGGTLNIEDEYRLHETSKEPDVSLGSTWLSDFPQAWAETGGMGLAVRQAPLIIPLKATSTPVSIKQYPMSQEARLGIKPHIQRLLDQGILVPCQSPWNTPLLPVKKPGTNDYRPVQDLREVNKRVEDIHPTVPNPYNLLSGLPPSHQWYTVLDLKDAFFCLRLHPTSQPLFAFEWRDPEMGISGQLTWTRLPQGFKNSPTLFNEALHRDLADFRIQHPDLILLQYVDDLLLAATSELDCQQGTRALLQTLGNLGYRASAKKAQICQKQVKYLGYLLKEGQRWLTEARKETVMGQPTPKTPRQLREFLGKAGFCRLFIPGFAEMAAPLYPLTKPGTLFNWGPDQQKAYQEIKQALLTAPALGLPDLTKPFELFVDEKQGYAKGVLTQKLGPWRRPVAYLSKKLDPVAAGWPPCLRMVAAIAVLTKDAGKLTMGQPLVILAPHAVEALVKQPPDRWLSNARMTHYQALLLDTDRVQFGPVVALNPATLLPLPEEGLQHNCLDILAEAHGTRPDLTDQPLPDADHTWYTDGSSLLQEGQRKAGAAVTTETEVIWAKALPAGTSAQRAELIALTQALKMAEGKKLNVYTDSRYAFATAHIHGEIYRRRGWLTSEGKEIKNKDEILALLKALFLPKRLSIIHCPGHQKGHSAEARGNRMADQAARKAAITETPDTSTLLIENSSPSGGSKRTADGSEFEAGKRTADGSEFEKRTADGSEFESPKKKAKVE

SEQ ID NO: 2636 - protein, 2120 aa, synthetic construct
MPAAKRVKLDGGDKKYSIGLDIGTNSVGWAVITDEYKVPSKKFKVLGNTDRHSIKKNLIGALLFDSGETAEATRLKRTARRRYTRRKNRICYLQEIFSNEMAKVDDSFFHRLEESFLVEEDKKHERHPIFGNIVDEVAYHEKYPTIYHLRKKLVDSTDKADLRLIYLALAHMIKFRGHFLIEGDLNPDNSDVDKLFIQLVQTYNQLFEENPINASGVDAKAILSARLSKSRRLENLIAQLPGEKKNGLFGNLIALSLGLTPNFKSNFDLAEDAKLQLSKDTYDDDLDNLLAQIGDQYADLFLAAKNLSDAILLSDILRVNTEITKAPLSASMIKRYDEHHQDLTLLKALVRQQLPEKYKEIFFDQSKNGYAGYIDGGASQEEFYKFIKPILEKMDGTEELLVKLNREDLLRKQRTFDNGSIPHQIHLGELHAILRRQEDFYPFLKDNREKIEKILTFRIPYYVGPLARGNSRFAWMTRKSEETITPWNFEEVVDKGASAQSFIERMTNFDKNLPNEKVLPKHSLLYEYFTVYNELTKVKYVTEGMRKPAFLSGEQKKAIVDLLFKTNRKVTVKQLKEDYFKKIECFDSVEISGVEDRFNASLGTYHDLLKIIKDKDFLDNEENEDILEDIVLTLTLFEDREMIEERLKTYAHLFDDKVMKQLKRRRYTGWGRLSRKLINGIRDKQSGKTILDFLKSDGFANRNFMQLIHDDSLTFKEDIQKAQVSGQGDSLHEHIANLAGSPAIKKGILQTVKVVDELVKVMGRHKPENIVIEMARENQTTQKGQKNSRERMKRIEEGIKELGSQILKEHPVENTQLQNEKLYLYYLQNGRDMYVDQELDINRLSDYDVDHIVPQSFLKDDSIDNKVLTRSDKARGKSDNVPSEEVVKKMKNYWRQLLNAKLITQRKFDNLTKAERGGLSELDKAGFIKRQLVETRQITKHVAQILDSRMNTKYDENDKLIREVKVITLKSKLVSDFRKDFQFYKVREINNYHHAHDAYLNAVVGTALIKKYPKLESEFVYGDYKVYDVRKMIAKSEQEIGKATAKYFFYSNIMNFFKTEITLANGEIRKRPLIETNGETGEIVWDKGRDFATVRKVLSMPQVNIVKKTEVQTGGFSKESILPKRNSDKLIARKKDWDPKKYGGFDSPTVAYSVLVVAKVEKGKSKKLKSVKELLGITIMERSSFEKNPIDFLEAKGYKEVKKDLIIKLPKYSLFELENGRKRMLASAGELQKGNELALPSKYVNFLYLASHYEKLKGSPEDNEQKQLFVEQHKHYLDEIIEQISEFSKRVILADANLDKVLSAYNKHRDKPIREQAENIIHLFTLTNLGAPAAFKYFDTTIDRKRYTSTKEVLDATLIHQSITGLYETRIDLSQLGGDGGGGGGSEAAAKGGGGSGGTLNIEDEYRLHETSKEPDVSLGSTWLSDFPQAWAETGGMGLAVRQAPLIIPLKATSTPVSIKQYPMSQEARLGIKPHIQRLLDQGILVPCQSPWNTPLLPVKKPGTNDYRPVQDLREVNKRVEDIHPTVPNPYNLLSGLPPSHQWYTVLDLKDAFFCLRLHPTSQPLFAFEWRDPEMGISGQLTWTRLPQGFKNSPTLFNEALHRDLADFRIQHPDLILLQYVDDLLLAATSELDCQQGTRALLQTLGNLGYRASAKKAQICQKQVKYLGYLLKEGQRWLTEARKETVMGQPTPKTPRQLREFLGKAGFCRLFIPGFAEMAAPLYPLTKPGTLFNWGPDQQKAYQEIKQALLTAPALGLPDLTKPFELFVDEKQGYAKGVLTQKLGPWRRPVAYLSKKLDPVAAGWPPCLRMVAAIAVLTKDAGKLTMGQPLVILAPHAVEALVKQPPDRWLSNARMTHYQALLLDTDRVQFGPVVALNPATLLPLPEEGLQHNCLDILAEAHGTRPDLTDQPLPDADHTWYTDGSSLLQEGQRKAGAAVTTETEVIWAKALPAGTSAQRAELIALTQALKMAEGKKLNVYTDSRYAFATAHIHGEIYRRRGWLTSEGKEIKNKDEILALLKALFLPKRLSIIHCPGHQKGHSAEARGNRMADQAARKAAITETPDTSTLLIENSSPSGGSKRTADGSEFEAGKRTADGSEFEKRTADGSEFESPKKKAKVE

SEQ ID NO: 2637 - protein, 2116 aa, synthetic construct
MPAAKRVKLDGGDKKYSIGLDIGTNSVGWAVITDEYKVPSKKFKVLGNTDRHSIKKNLIGALLFDSGETAEATRLKRTARRRYTRRKNRICYLQEIFSNEMAKVDDSFFHRLEESFLVEEDKKHERHPIFGNIVDEVAYHEKYPTIYHLRKKLVDSTDKADLRLIYLALAHMIKFRGHFLIEGDLNPDNSDVDKLFIQLVQTYNQLFEENPINASGVDAKAILSARLSKSRRLENLIAQLPGEKKNGLFGNLIALSLGLTPNFKSNFDLAEDAKLQLSKDTYDDDLDNLLAQIGDQYADLFLAAKNLSDAILLSDILRVNTEITKAPLSASMIKRYDEHHQDLTLLKALVRQQLPEKYKEIFFDQSKNGYAGYIDGGASQEEFYKFIKPILEKMDGTEELLVKLNREDLLRKQRTFDNGSIPHQIHLGELHAILRRQEDFYPFLKDNREKIEKILTFRIPYYVGPLARGNSRFAWMTRKSEETITPWNFEEVVDKGASAQSFIERMTNFDKNLPNEKVLPKHSLLYEYFTVYNELTKVKYVTEGMRKPAFLSGEQKKAIVDLLFKTNRKVTVKQLKEDYFKKIECFDSVEISGVEDRFNASLGTYHDLLKIIKDKDFLDNEENEDILEDIVLTLTLFEDREMIEERLKTYAHLFDDKVMKQLKRRRYTGWGRLSRKLINGIRDKQSGKTILDFLKSDGFANRNFMQLIHDDSLTFKEDIQKAQVSGQGDSLHEHIANLAGSPAIKKGILQTVKVVDELVKVMGRHKPENIVIEMARENQTTQKGQKNSRERMKRIEEGIKELGSQILKEHPVENTQLQNEKLYLYYLQNGRDMYVDQELDINRLSDYDVDHIVPQSFLKDDSIDNKVLTRSDKARGKSDNVPSEEVVKKMKNYWRQLLNAKLITQRKFDNLTKAERGGLSELDKAGFIKRQLVETRQITKHVAQILDSRMNTKYDENDKLIREVKVITLKSKLVSDFRKDFQFYKVREINNYHHAHDAYLNAVVGTALIKKYPKLESEFVYGDYKVYDVRKMIAKSEQEIGKATAKYFFYSNIMNFFKTEITLANGEIRKRPLIETNGETGEIVWDKGRDFATVRKVLSMPQVNIVKKTEVQTGGFSKESILPKRNSDKLIARKKDWDPKKYGGFDSPTVAYSVLVVAKVEKGKSKKLKSVKELLGITIMERSSFEKNPIDFLEAKGYKEVKKDLIIKLPKYSLFELENGRKRMLASAGELQKGNELALPSKYVNFLYLASHYEKLKGSPEDNEQKQLFVEQHKHYLDEIIEQISEFSKRVILADANLDKVLSAYNKHRDKPIREQAENIIHLFTLTNLGAPAAFKYFDTTIDRKRYTSTKEVLDATLIHQSITGLYETRIDLSQLGGDGGEAAAKGGSGGGGGTLNIEDEYRLHETSKEPDVSLGSTWLSDFPQAWAETGGMGLAVRQAPLIIPLKATSTPVSIKQYPMSQEARLGIKPHIQRLLDQGILVPCQSPWNTPLLPVKKPGTNDYRPVQDLREVNKRVEDIHPTVPNPYNLLSGLPPSHQWYTVLDLKDAFFCLRLHPTSQPLFAFEWRDPEMGISGQLTWTRLPQGFKNSPTLFNEALHRDLADFRIQHPDLILLQYVDDLLLAATSELDCQQGTRALLQTLGNLGYRASAKKAQICQKQVKYLGYLLKEGQRWLTEARKETVMGQPTPKTPRQLREFLGKAGFCRLFIPGFAEMAAPLYPLTKPGTLFNWGPDQQKAYQEIKQALLTAPALGLPDLTKPFELFVDEKQGYAKGVLTQKLGPWRRPVAYLSKKLDPVAAGWPPCLRMVAAIAVLTKDAGKLTMGQPLVILAPHAVEALVKQPPDRWLSNARMTHYQALLLDTDRVQFGPVVALNPATLLPLPEEGLQHNCLDILAEAHGTRPDLTDQPLPDADHTWYTDGSSLLQEGQRKAGAAVTTETEVIWAKALPAGTSAQRAELIALTQALKMAEGKKLNVYTDSRYAFATAHIHGEIYRRRGWLTSEGKEIKNKDEILALLKALFLPKRLSIIHCPGHQKGHSAEARGNRMADQAARKAAITETPDTSTLLIENSSPSGGSKRTADGSEFEAGKRTADGSEFEKRTADGSEFESPKKKAKVE

SEQ ID NO: 2638 - protein, 2116 aa, synthetic construct
MPAAKRVKLDGGDKKYSIGLDIGTNSVGWAVITDEYKVPSKKFKVLGNTDRHSIKKNLIGALLFDSGETAEATRLKRTARRRYTRRKNRICYLQEIFSNEMAKVDDSFFHRLEESFLVEEDKKHERHPIFGNIVDEVAYHEKYPTIYHLRKKLVDSTDKADLRLIYLALAHMIKFRGHFLIEGDLNPDNSDVDKLFIQLVQTYNQLFEENPINASGVDAKAILSARLSKSRRLENLIAQLPGEKKNGLFGNLIALSLGLTPNFKSNFDLAEDAKLQLSKDTYDDDLDNLLAQIGDQYADLFLAAKNLSDAILLSDILRVNTEITKAPLSASMIKRYDEHHQDLTLLKALVRQQLPEKYKEIFFDQSKNGYAGYIDGGASQEEFYKFIKPILEKMDGTEELLVKLNREDLLRKQRTFDNGSIPHQIHLGELHAILRRQEDFYPFLKDNREKIEKILTFRIPYYVGPLARGNSRFAWMTRKSEETITPWNFEEVVDKGASAQSFIERMTNFDKNLPNEKVLPKHSLLYEYFTVYNELTKVKYVTEGMRKPAFLSGEQKKAIVDLLFKTNRKVTVKQLKEDYFKKIECFDSVEISGVEDRFNASLGTYHDLLKIIKDKDFLDNEENEDILEDIVLTLTLFEDREMIEERLKTYAHLFDDKVMKQLKRRRYTGWGRLSRKLINGIRDKQSGKTILDFLKSDGFANRNFMQLIHDDSLTFKEDIQKAQVSGQGDSLHEHIANLAGSPAIKKGILQTVKVVDELVKVMGRHKPENIVIEMARENQTTQKGQKNSRERMKRIEEGIKELGSQILKEHPVENTQLQNEKLYLYYLQNGRDMYVDQELDINRLSDYDVDHIVPQSFLKDDSIDNKVLTRSDKARGKSDNVPSEEVVKKMKNYWRQLLNAKLITQRKFDNLTKAERGGLSELDKAGFIKRQLVETRQITKHVAQILDSRMNTKYDENDKLIREVKVITLKSKLVSDFRKDFQFYKVREINNYHHAHDAYLNAVVGTALIKKYPKLESEFVYGDYKVYDVRKMIAKSEQEIGKATAKYFFYSNIMNFFKTEITLANGEIRKRPLIETNGETGEIVWDKGRDFATVRKVLSMPQVNIVKKTEVQTGGFSKESILPKRNSDKLIARKKDWDPKKYGGFDSPTVAYSVLVVAKVEKGKSKKLKSVKELLGITIMERSSFEKNPIDFLEAKGYKEVKKDLIIKLPKYSLFELENGRKRMLASAGELQKGNELALPSKYVNFLYLASHYEKLKGSPEDNEQKQLFVEQHKHYLDEIIEQISEFSKRVILADANLDKVLSAYNKHRDKPIREQAENIIHLFTLTNLGAPAAFKYFDTTIDRKRYTSTKEVLDATLIHQSITGLYETRIDLSQLGGDGGGGGEAAAKGGSGGTLNIEDEYRLHETSKEPDVSLGSTWLSDFPQAWAETGGMGLAVRQAPLIIPLKATSTPVSIKQYPMSQEARLGIKPHIQRLLDQGILVPCQSPWNTPLLPVKKPGTNDYRPVQDLREVNKRVEDIHPTVPNPYNLLSGLPPSHQWYTVLDLKDAFFCLRLHPTSQPLFAFEWRDPEMGISGQLTWTRLPQGFKNSPTLFNEALHRDLADFRIQHPDLILLQYVDDLLLAATSELDCQQGTRALLQTLGNLGYRASAKKAQICQKQVKYLGYLLKEGQRWLTEARKETVMGQPTPKTPRQLREFLGKAGFCRLFIPGFAEMAAPLYPLTKPGTLFNWGPDQQKAYQEIKQALLTAPALGLPDLTKPFELFVDEKQGYAKGVLTQKLGPWRRPVAYLSKKLDPVAAGWPPCLRMVAAIAVLTKDAGKLTMGQPLVILAPHAVEALVKQPPDRWLSNARMTHYQALLLDTDRVQFGPVVALNPATLLPLPEEGLQHNCLDILAEAHGTRPDLTDQPLPDADHTWYTDGSSLLQEGQRKAGAAVTTETEVIWAKALPAGTSAQRAELIALTQALKMAEGKKLNVYTDSRYAFATAHIHGEIYRRRGWLTSEGKEIKNKDEILALLKALFLPKRLSIIHCPGHQKGHSAEARGNRMADQAARKAAITETPDTSTLLIENSSPSGGSKRTADGSEFEAGKRTADGSEFEKRTADGSEFESPKKKAKVE

SEQ ID NO: 2639 - protein, 2115 aa, synthetic construct
MPAAKRVKLDGGDKKYSIGLDIGTNSVGWAVITDEYKVPSKKFKVLGNTDRHSIKKNLIGALLFDSGETAEATRLKRTARRRYTRRKNRICYLQEIFSNEMAKVDDSFFHRLEESFLVEEDKKHERHPIFGNIVDEVAYHEKYPTIYHLRKKLVDSTDKADLRLIYLALAHMIKFRGHFLIEGDLNPDNSDVDKLFIQLVQTYNQLFEENPINASGVDAKAILSARLSKSRRLENLIAQLPGEKKNGLFGNLIALSLGLTPNFKSNFDLAEDAKLQLSKDTYDDDLDNLLAQIGDQYADLFLAAKNLSDAILLSDILRVNTEITKAPLSASMIKRYDEHHQDLTLLKALVRQQLPEKYKEIFFDQSKNGYAGYIDGGASQEEFYKFIKPILEKMDGTEELLVKLNREDLLRKQRTFDNGSIPHQIHLGELHAILRRQEDFYPFLKDNREKIEKILTFRIPYYVGPLARGNSRFAWMTRKSEETITPWNFEEVVDKGASAQSFIERMTNFDKNLPNEKVLPKHSLLYEYFTVYNELTKVKYVTEGMRKPAFLSGEQKKAIVDLLFKTNRKVTVKQLKEDYFKKIECFDSVEISGVEDRFNASLGTYHDLLKIIKDKDFLDNEENEDILEDIVLTLTLFEDREMIEERLKTYAHLFDDKVMKQLKRRRYTGWGRLSRKLINGIRDKQSGKTILDFLKSDGFANRNFMQLIHDDSLTFKEDIQKAQVSGQGDSLHEHIANLAGSPAIKKGILQTVKVVDELVKVMGRHKPENIVIEMARENQTTQKGQKNSRERMKRIEEGIKELGSQILKEHPVENTQLQNEKLYLYYLQNGRDMYVDQELDINRLSDYDVDHIVPQSFLKDDSIDNKVLTRSDKARGKSDNVPSEEVVKKMKNYWRQLLNAKLITQRKFDNLTKAERGGLSELDKAGFIKRQLVETRQITKHVAQILDSRMNTKYDENDKLIREVKVITLKSKLVSDFRKDFQFYKVREINNYHHAHDAYLNAVVGTALIKKYPKLESEFVYGDYKVYDVRKMIAKSEQEIGKATAKYFFYSNIMNFFKTEITLANGEIRKRPLIETNGETGEIVWDKGRDFATVRKVLSMPQVNIVKKTEVQTGGFSKESILPKRNSDKLIARKKDWDPKKYGGFDSPTVAYSVLVVAKVEKGKSKKLKSVKELLGITIMERSSFEKNPIDFLEAKGYKEVKKDLIIKLPKYSLFELENGRKRMLASAGELQKGNELALPSKYVNFLYLASHYEKLKGSPEDNEQKQLFVEQHKHYLDEIIEQISEFSKRVILADANLDKVLSAYNKHRDKPIREQAENIIHLFTLTNLGAPAAFKYFDTTIDRKRYTSTKEVLDATLIHQSITGLYETRIDLSQLGGDGGGGGGSGGGGSGGTLNIEDEYRLHETSKEPDVSLGSTWLSDFPQAWAETGGMGLAVRQAPLIIPLKATSTPVSIKQYPMSQEARLGIKPHIQRLLDQGILVPCQSPWNTPLLPVKKPGTNDYRPVQDLREVNKRVEDIHPTVPNPYNLLSGLPPSHQWYTVLDLKDAFFCLRLHPTSQPLFAFEWRDPEMGISGQLTWTRLPQGFKNSPTLFNEALHRDLADFRIQHPDLILLQYVDDLLLAATSELDCQQGTRALLQTLGNLGYRASAKKAQICQKQVKYLGYLLKEGQRWLTEARKETVMGQPTPKTPRQLREFLGKAGFCRLFIPGFAEMAAPLYPLTKPGTLFNWGPDQQKAYQEIKQALLTAPALGLPDLTKPFELFVDEKQGYAKGVLTQKLGPWRRPVAYLSKKLDPVAAGWPPCLRMVAAIAVLTKDAGKLTMGQPLVILAPHAVEALVKQPPDRWLSNARMTHYQALLLDTDRVQFGPVVALNPATLLPLPEEGLQHNCLDILAEAHGTRPDLTDQPLPDADHTWYTDGSSLLQEGQRKAGAAVTTETEVIWAKALPAGTSAQRAELIALTQALKMAEGKKLNVYTDSRYAFATAHIHGEIYRRRGWLTSEGKEIKNKDEILALLKALFLPKRLSIIHCPGHQKGHSAEARGNRMADQAARKAAITETPDTSTLLIENSSPSGGSKRTADGSEFEAGKRTADGSEFEKRTADGSEFESPKKKAKVE

SEQ ID NO: 2640 - protein, 2116 aa, synthetic construct
MPAAKRVKLDGGDKKYSIGLDIGTNSVGWAVITDEYKVPSKKFKVLGNTDRHSIKKNLIGALLFDSGETAEATRLKRTARRRYTRRKNRICYLQEIFSNEMAKVDDSFFHRLEESFLVEEDKKHERHPIFGNIVDEVAYHEKYPTIYHLRKKLVDSTDKADLRLIYLALAHMIKFRGHFLIEGDLNPDNSDVDKLFIQLVQTYNQLFEENPINASGVDAKAILSARLSKSRRLENLIAQLPGEKKNGLFGNLIALSLGLTPNFKSNFDLAEDAKLQLSKDTYDDDLDNLLAQIGDQYADLFLAAKNLSDAILLSDILRVNTEITKAPLSASMIKRYDEHHQDLTLLKALVRQQLPEKYKEIFFDQSKNGYAGYIDGGASQEEFYKFIKPILEKMDGTEELLVKLNREDLLRKQRTFDNGSIPHQIHLGELHAILRRQEDFYPFLKDNREKIEKILTFRIPYYVGPLARGNSRFAWMTRKSEETITPWNFEEVVDKGASAQSFIERMTNFDKNLPNEKVLPKHSLLYEYFTVYNELTKVKYVTEGMRKPAFLSGEQKKAIVDLLFKTNRKVTVKQLKEDYFKKIECFDSVEISGVEDRFNASLGTYHDLLKIIKDKDFLDNEENEDILEDIVLTLTLFEDREMIEERLKTYAHLFDDKVMKQLKRRRYTGWGRLSRKLINGIRDKQSGKTILDFLKSDGFANRNFMQLIHDDSLTFKEDIQKAQVSGQGDSLHEHIANLAGSPAIKKGILQTVKVVDELVKVMGRHKPENIVIEMARENQTTQKGQKNSRERMKRIEEGIKELGSQILKEHPVENTQLQNEKLYLYYLQNGRDMYVDQELDINRLSDYDVDHIVPQSFLKDDSIDNKVLTRSDKARGKSDNVPSEEVVKKMKNYWRQLLNAKLITQRKFDNLTKAERGGLSELDKAGFIKRQLVETRQITKHVAQILDSRMNTKYDENDKLIREVKVITLKSKLVSDFRKDFQFYKVREINNYHHAHDAYLNAVVGTALIKKYPKLESEFVYGDYKVYDVRKMIAKSEQEIGKATAKYFFYSNIMNFFKTEITLANGEIRKRPLIETNGETGEIVWDKGRDFATVRKVLSMPQVNIVKKTEVQTGGFSKESILPKRNSDKLIARKKDWDPKKYGGFDSPTVAYSVLVVAKVEKGKSKKLKSVKELLGITIMERSSFEKNPIDFLEAKGYKEVKKDLIIKLPKYSLFELENGRKRMLASAGELQKGNELALPSKYVNFLYLASHYEKLKGSPEDNEQKQLFVEQHKHYLDEIIEQISEFSKRVILADANLDKVLSAYNKHRDKPIREQAENIIHLFTLTNLGAPAAFKYFDTTIDRKRYTSTKEVLDATLIHQSITGLYETRIDLSQLGGDGGPAPGGSEAAAKGGTLNIEDEYRLHETSKEPDVSLGSTWLSDFPQAWAETGGMGLAVRQAPLIIPLKATSTPVSIKQYPMSQEARLGIKPHIQRLLDQGILVPCQSPWNTPLLPVKKPGTNDYRPVQDLREVNKRVEDIHPTVPNPYNLLSGLPPSHQWYTVLDLKDAFFCLRLHPTSQPLFAFEWRDPEMGISGQLTWTRLPQGFKNSPTLFNEALHRDLADFRIQHPDLILLQYVDDLLLAATSELDCQQGTRALLQTLGNLGYRASAKKAQICQKQVKYLGYLLKEGQRWLTEARKETVMGQPTPKTPRQLREFLGKAGFCRLFIPGFAEMAAPLYPLTKPGTLFNWGPDQQKAYQEIKQALLTAPALGLPDLTKPFELFVDEKQGYAKGVLTQKLGPWRRPVAYLSKKLDPVAAGWPPCLRMVAAIAVLTKDAGKLTMGQPLVILAPHAVEALVKQPPDRWLSNARMTHYQALLLDTDRVQFGPVVALNPATLLPLPEEGLQHNCLDILAEAHGTRPDLTDQPLPDADHTWYTDGSSLLQEGQRKAGAAVTTETEVIWAKALPAGTSAQRAELIALTQALKMAEGKKLNVYTDSRYAFATAHIHGEIYRRRGWLTSEGKEIKNKDEILALLKALFLPKRLSIIHCPGHQKGHSAEARGNRMADQAARKAAITETPDTSTLLIENSSPSGGSKRTADGSEFEAGKRTADGSEFEKRTADGSEFESPKKKAKVE

SEQ ID NO: 2641 - protein, 2116 aa, synthetic construct
MPAAKRVKLDGGDKKYSIGLDIGTNSVGWAVITDEYKVPSKKFKVLGNTDRHSIKKNLIGALLFDSGETAEATRLKRTARRRYTRRKNRICYLQEIFSNEMAKVDDSFFHRLEESFLVEEDKKHERHPIFGNIVDEVAYHEKYPTIYHLRKKLVDSTDKADLRLIYLALAHMIKFRGHFLIEGDLNPDNSDVDKLFIQLVQTYNQLFEENPINASGVDAKAILSARLSKSRRLENLIAQLPGEKKNGLFGNLIALSLGLTPNFKSNFDLAEDAKLQLSKDTYDDDLDNLLAQIGDQYADLFLAAKNLSDAILLSDILRVNTEITKAPLSASMIKRYDEHHQDLTLLKALVRQQLPEKYKEIFFDQSKNGYAGYIDGGASQEEFYKFIKPILEKMDGTEELLVKLNREDLLRKQRTFDNGSIPHQIHLGELHAILRRQEDFYPFLKDNREKIEKILTFRIPYYVGPLARGNSRFAWMTRKSEETITPWNFEEVVDKGASAQSFIERMTNFDKNLPNEKVLPKHSLLYEYFTVYNELTKVKYVTEGMRKPAFLSGEQKKAIVDLLFKTNRKVTVKQLKEDYFKKIECFDSVEISGVEDRFNASLGTYHDLLKIIKDKDFLDNEENEDILEDIVLTLTLFEDREMIEERLKTYAHLFDDKVMKQLKRRRYTGWGRLSRKLINGIRDKQSGKTILDFLKSDGFANRNFMQLIHDDSLTFKEDIQKAQVSGQGDSLHEHIANLAGSPAIKKGILQTVKVVDELVKVMGRHKPENIVIEMARENQTTQKGQKNSRERMKRIEEGIKELGSQILKEHPVENTQLQNEKLYLYYLQNGRDMYVDQELDINRLSDYDVDHIVPQSFLKDDSIDNKVLTRSDKARGKSDNVPSEEVVKKMKNYWRQLLNAKLITQRKFDNLTKAERGGLSELDKAGFIKRQLVETRQITKHVAQILDSRMNTKYDENDKLIREVKVITLKSKLVSDFRKDFQFYKVREINNYHHAHDAYLNAVVGTALIKKYPKLESEFVYGDYKVYDVRKMIAKSEQEIGKATAKYFFYSNIMNFFKTEITLANGEIRKRPLIETNGETGEIVWDKGRDFATVRKVLSMPQVNIVKKTEVQTGGFSKESILPKRNSDKLIARKKDWDPKKYGGFDSPTVAYSVLVVAKVEKGKSKKLKSVKELLGITIMERSSFEKNPIDFLEAKGYKEVKKDLIIKLPKYSLFELENGRKRMLASAGELQKGNELALPSKYVNFLYLASHYEKLKGSPEDNEQKQLFVEQHKHYLDEIIEQISEFSKRVILADANLDKVLSAYNKHRDKPIREQAENIIHLFTLTNLGAPAAFKYFDTTIDRKRYTSTKEVLDATLIHQSITGLYETRIDLSQLGGDGGGSSEAAAKPAPGGTLNIEDEYRLHETSKEPDVSLGSTWLSDFPQAWAETGGMGLAVRQAPLIIPLKATSTPVSIKQYPMSQEARLGIKPHIQRLLDQGILVPCQSPWNTPLLPVKKPGTNDYRPVQDLREVNKRVEDIHPTVPNPYNLLSGLPPSHQWYTVLDLKDAFFCLRLHPTSQPLFAFEWRDPEMGISGQLTWTRLPQGFKNSPTLFNEALHRDLADFRIQHPDLILLQYVDDLLLAATSELDCQQGTRALLQTLGNLGYRASAKKAQICQKQVKYLGYLLKEGQRWLTEARKETVMGQPTPKTPRQLREFLGKAGFCRLFIPGFAEMAAPLYPLTKPGTLFNWGPDQQKAYQEIKQALLTAPALGLPDLTKPFELFVDEKQGYAKGVLTQKLGPWRRPVAYLSKKLDPVAAGWPPCLRMVAAIAVLTKDAGKLTMGQPLVILAPHAVEALVKQPPDRWLSNARMTHYQALLLDTDRVQFGPVVALNPATLLPLPEEGLQHNCLDILAEAHGTRPDLTDQPLPDADHTWYTDGSSLLQEGQRKAGAAVTTETEVIWAKALPAGTSAQRAELIALTQALKMAEGKKLNVYTDSRYAFATAHIHGEIYRRRGWLTSEGKEIKNKDEILALLKALFLPKRLSIIHCPGHQKGHSAEARGNRMADQAARKAAITETPDTSTLLIENSSPSGGSKRTADGSEFEAGKRTADGSEFEKRTADGSEFESPKKKAKVE

SEQ ID NO: 2642 - protein, 2111 aa, synthetic construct
MPAAKRVKLDGGDKKYSIGLDIGTNSVGWAVITDEYKVPSKKFKVLGNTDRHSIKKNLIGALLFDSGETAEATRLKRTARRRYTRRKNRICYLQEIFSNEMAKVDDSFFHRLEESFLVEEDKKHERHPIFGNIVDEVAYHEKYPTIYHLRKKLVDSTDKADLRLIYLALAHMIKFRGHFLIEGDLNPDNSDVDKLFIQLVQTYNQLFEENPINASGVDAKAILSARLSKSRRLENLIAQLPGEKKNGLFGNLIALSLGLTPNFKSNFDLAEDAKLQLSKDTYDDDLDNLLAQIGDQYADLFLAAKNLSDAILLSDILRVNTEITKAPLSASMIKRYDEHHQDLTLLKALVRQQLPEKYKEIFFDQSKNGYAGYIDGGASQEEFYKFIKPILEKMDGTEELLVKLNREDLLRKQRTFDNGSIPHQIHLGELHAILRRQEDFYPFLKDNREKIEKILTFRIPYYVGPLARGNSRFAWMTRKSEETITPWNFEEVVDKGASAQSFIERMTNFDKNLPNEKVLPKHSLLYEYFTVYNELTKVKYVTEGMRKPAFLSGEQKKAIVDLLFKTNRKVTVKQLKEDYFKKIECFDSVEISGVEDRFNASLGTYHDLLKIIKDKDFLDNEENEDILEDIVLTLTLFEDREMIEERLKTYAHLFDDKVMKQLKRRRYTGWGRLSRKLINGIRDKQSGKTILDFLKSDGFANRNFMQLIHDDSLTFKEDIQKAQVSGQGDSLHEHIANLAGSPAIKKGILQTVKVVDELVKVMGRHKPENIVIEMARENQTTQKGQKNSRERMKRIEEGIKELGSQILKEHPVENTQLQNEKLYLYYLQNGRDMYVDQELDINRLSDYDVDHIVPQSFLKDDSIDNKVLTRSDKARGKSDNVPSEEVVKKMKNYWRQLLNAKLITQRKFDNLTKAERGGLSELDKAGFIKRQLVETRQITKHVAQILDSRMNTKYDENDKLIREVKVITLKSKLVSDFRKDFQFYKVREINNYHHAHDAYLNAVVGTALIKKYPKLESEFVYGDYKVYDVRKMIAKSEQEIGKATAKYFFYSNIMNFFKTEITLANGEIRKRPLIETNGETGEIVWDKGRDFATVRKVLSMPQVNIVKKTEVQTGGFSKESILPKRNSDKLIARKKDWDPKKYGGFDSPTVAYSVLVVAKVEKGKSKKLKSVKELLGITIMERSSFEKNPIDFLEAKGYKEVKKDLIIKLPKYSLFELENGRKRMLASAGELQKGNELALPSKYVNFLYLASHYEKLKGSPEDNEQKQLFVEQHKHYLDEIIEQISEFSKRVILADANLDKVLSAYNKHRDKPIREQAENIIHLFTLTNLGAPAAFKYFDTTIDRKRYTSTKEVLDATLIHQSITGLYETRIDLSQLGGDGGGGGGGGGGTLNIEDEYRLHETSKEPDVSLGSTWLSDFPQAWAETGGMGLAVRQAPLIIPLKATSTPVSIKQYPMSQEARLGIKPHIQRLLDQGILVPCQSPWNTPLLPVKKPGTNDYRPVQDLREVNKRVEDIHPTVPNPYNLLSGLPPSHQWYTVLDLKDAFFCLRLHPTSQPLFAFEWRDPEMGISGQLTWTRLPQGFKNSPTLFNEALHRDLADFRIQHPDLILLQYVDDLLLAATSELDCQQGTRALLQTLGNLGYRASAKKAQICQKQVKYLGYLLKEGQRWLTEARKETVMGQPTPKTPRQLREFLGKAGFCRLFIPGFAEMAAPLYPLTKPGTLFNWGPDQQKAYQEIKQALLTAPALGLPDLTKPFELFVDEKQGYAKGVLTQKLGPWRRPVAYLSKKLDPVAAGWPPCLRMVAAIAVLTKDAGKLTMGQPLVILAPHAVEALVKQPPDRWLSNARMTHYQALLLDTDRVQFGPVVALNPATLLPLPEEGLQHNCLDILAEAHGTRPDLTDQPLPDADHTWYTDGSSLLQEGQRKAGAAVTTETEVIWAKALPAGTSAQRAELIALTQALKMAEGKKLNVYTDSRYAFATAHIHGEIYRRRGWLTSEGKEIKNKDEILALLKALFLPKRLSIIHCPGHQKGHSAEARGNRMADQAARKAAITETPDTSTLLIENSSPSGGSKRTADGSEFEAGKRTADGSEFEKRTADGSEFESPKKKAKVE

SEQ ID NO: 2643 - protein, 2111 aa, synthetic construct
MPAAKRVKLDGGDKKYSIGLDIGTNSVGWAVITDEYKVPSKKFKVLGNTDRHSIKKNLIGALLFDSGETAEATRLKRTARRRYTRRKNRICYLQEIFSNEMAKVDDSFFHRLEESFLVEEDKKHERHPIFGNIVDEVAYHEKYPTIYHLRKKLVDSTDKADLRLIYLALAHMIKFRGHFLIEGDLNPDNSDVDKLFIQLVQTYNQLFEENPINASGVDAKAILSARLSKSRRLENLIAQLPGEKKNGLFGNLIALSLGLTPNFKSNFDLAEDAKLQLSKDTYDDDLDNLLAQIGDQYADLFLAAKNLSDAILLSDILRVNTEITKAPLSASMIKRYDEHHQDLTLLKALVRQQLPEKYKEIFFDQSKNGYAGYIDGGASQEEFYKFIKPILEKMDGTEELLVKLNREDLLRKQRTFDNGSIPHQIHLGELHAILRRQEDFYPFLKDNREKIEKILTFRIPYYVGPLARGNSRFAWMTRKSEETITPWNFEEVVDKGASAQSFIERMTNFDKNLPNEKVLPKHSLLYEYFTVYNELTKVKYVTEGMRKPAFLSGEQKKAIVDLLFKTNRKVTVKQLKEDYFKKIECFDSVEISGVEDRFNASLGTYHDLLKIIKDKDFLDNEENEDILEDIVLTLTLFEDREMIEERLKTYAHLFDDKVMKQLKRRRYTGWGRLSRKLINGIRDKQSGKTILDFLKSDGFANRNFMQLIHDDSLTFKEDIQKAQVSGQGDSLHEHIANLAGSPAIKKGILQTVKVVDELVKVMGRHKPENIVIEMARENQTTQKGQKNSRERMKRIEEGIKELGSQILKEHPVENTQLQNEKLYLYYLQNGRDMYVDQELDINRLSDYDVDHIVPQSFLKDDSIDNKVLTRSDKARGKSDNVPSEEVVKKMKNYWRQLLNAKLITQRKFDNLTKAERGGLSELDKAGFIKRQLVETRQITKHVAQILDSRMNTKYDENDKLIREVKVITLKSKLVSDFRKDFQFYKVREINNYHHAHDAYLNAVVGTALIKKYPKLESEFVYGDYKVYDVRKMIAKSEQEIGKATAKYFFYSNIMNFFKTEITLANGEIRKRPLIETNGETGEIVWDKGRDFATVRKVLSMPQVNIVKKTEVQTGGFSKESILPKRNSDKLIARKKDWDPKKYGGFDSPTVAYSVLVVAKVEKGKSKKLKSVKELLGITIMERSSFEKNPIDFLEAKGYKEVKKDLIIKLPKYSLFELENGRKRMLASAGELQKGNELALPSKYVNFLYLASHYEKLKGSPEDNEQKQLFVEQHKHYLDEIIEQISEFSKRVILADANLDKVLSAYNKHRDKPIREQAENIIHLFTLTNLGAPAAFKYFDTTIDRKRYTSTKEVLDATLIHQSITGLYETRIDLSQLGGDGGPAPGGSGGTLNIEDEYRLHETSKEPDVSLGSTWLSDFPQAWAETGGMGLAVRQAPLIIPLKATSTPVSIKQYPMSQEARLGIKPHIQRLLDQGILVPCQSPWNTPLLPVKKPGTNDYRPVQDLREVNKRVEDIHPTVPNPYNLLSGLPPSHQWYTVLDLKDAFFCLRLHPTSQPLFAFEWRDPEMGISGQLTWTRLPQGFKNSPTLFNEALHRDLADFRIQHPDLILLQYVDDLLLAATSELDCQQGTRALLQTLGNLGYRASAKKAQICQKQVKYLGYLLKEGQRWLTEARKETVMGQPTPKTPRQLREFLGKAGFCRLFIPGFAEMAAPLYPLTKPGTLFNWGPDQQKAYQEIKQALLTAPALGLPDLTKPFELFVDEKQGYAKGVLTQKLGPWRRPVAYLSKKLDPVAAGWPPCLRMVAAIAVLTKDAGKLTMGQPLVILAPHAVEALVKQPPDRWLSNARMTHYQALLLDTDRVQFGPVVALNPATLLPLPEEGLQHNCLDILAEAHGTRPDLTDQPLPDADHTWYTDGSSLLQEGQRKAGAAVTTETEVIWAKALPAGTSAQRAELIALTQALKMAEGKKLNVYTDSRYAFATAHIHGEIYRRRGWLTSEGKEIKNKDEILALLKALFLPKRLSIIHCPGHQKGHSAEARGNRMADQAARKAAITETPDTSTLLIENSSPSGGSKRTADGSEFEAGKRTADGSEFEKRTADGSEFESPKKKAKVE

SEQ ID NO: 2644 - protein, 2135 aa, synthetic construct
MPAAKRVKLDGGDKKYSIGLDIGTNSVGWAVITDEYKVPSKKFKVLGNTDRHSIKKNLIGALLFDSGETAEATRLKRTARRRYTRRKNRICYLQEIFSNEMAKVDDSFFHRLEESFLVEEDKKHERHPIFGNIVDEVAYHEKYPTIYHLRKKLVDSTDKADLRLIYLALAHMIKFRGHFLIEGDLNPDNSDVDKLFIQLVQTYNQLFEENPINASGVDAKAILSARLSKSRRLENLIAQLPGEKKNGLFGNLIALSLGLTPNFKSNFDLAEDAKLQLSKDTYDDDLDNLLAQIGDQYADLFLAAKNLSDAILLSDILRVNTEITKAPLSASMIKRYDEHHQDLTLLKALVRQQLPEKYKEIFFDQSKNGYAGYIDGGASQEEFYKFIKPILEKMDGTEELLVKLNREDLLRKQRTFDNGSIPHQIHLGELHAILRRQEDFYPFLKDNREKIEKILTFRIPYYVGPLARGNSRFAWMTRKSEETITPWNFEEVVDKGASAQSFIERMTNFDKNLPNEKVLPKHSLLYEYFTVYNELTKVKYVTEGMRKPAFLSGEQKKAIVDLLFKTNRKVTVKQLKEDYFKKIECFDSVEISGVEDRFNASLGTYHDLLKIIKDKDFLDNEENEDILEDIVLTLTLFEDREMIEERLKTYAHLFDDKVMKQLKRRRYTGWGRLSRKLINGIRDKQSGKTILDFLKSDGFANRNFMQLIHDDSLTFKEDIQKAQVSGQGDSLHEHIANLAGSPAIKKGILQTVKVVDELVKVMGRHKPENIVIEMARENQTTQKGQKNSRERMKRIEEGIKELGSQILKEHPVENTQLQNEKLYLYYLQNGRDMYVDQELDINRLSDYDVDHIVPQSFLKDDSIDNKVLTRSDKARGKSDNVPSEEVVKKMKNYWRQLLNAKLITQRKFDNLTKAERGGLSELDKAGFIKRQLVETRQITKHVAQILDSRMNTKYDENDKLIREVKVITLKSKLVSDFRKDFQFYKVREINNYHHAHDAYLNAVVGTALIKKYPKLESEFVYGDYKVYDVRKMIAKSEQEIGKATAKYFFYSNIMNFFKTEITLANGEIRKRPLIETNGETGEIVWDKGRDFATVRKVLSMPQVNIVKKTEVQTGGFSKESILPKRNSDKLIARKKDWDPKKYGGFDSPTVAYSVLVVAKVEKGKSKKLKSVKELLGITIMERSSFEKNPIDFLEAKGYKEVKKDLIIKLPKYSLFELENGRKRMLASAGELQKGNELALPSKYVNFLYLASHYEKLKGSPEDNEQKQLFVEQHKHYLDEIIEQISEFSKRVILADANLDKVLSAYNKHRDKPIREQAENIIHLFTLTNLGAPAAFKYFDTTIDRKRYTSTKEVLDATLIHQSITGLYETRIDLSQLGGDGGGGGGSGGGGSGGGGSGGGGSGGGGSGGGGSGGTLNIEDEYRLHETSKEPDVSLGSTWLSDFPQAWAETGGMGLAVRQAPLIIPLKATSTPVSIKQYPMSQEARLGIKPHIQRLLDQGILVPCQSPWNTPLLPVKKPGTNDYRPVQDLREVNKRVEDIHPTVPNPYNLLSGLPPSHQWYTVLDLKDAFFCLRLHPTSQPLFAFEWRDPEMGISGQLTWTRLPQGFKNSPTLFNEALHRDLADFRIQHPDLILLQYVDDLLLAATSELDCQQGTRALLQTLGNLGYRASAKKAQICQKQVKYLGYLLKEGQRWLTEARKETVMGQPTPKTPRQLREFLGKAGFCRLFIPGFAEMAAPLYPLTKPGTLFNWGPDQQKAYQEIKQALLTAPALGLPDLTKPFELFVDEKQGYAKGVLTQKLGPWRRPVAYLSKKLDPVAAGWPPCLRMVAAIAVLTKDAGKLTMGQPLVILAPHAVEALVKQPPDRWLSNARMTHYQALLLDTDRVQFGPVVALNPATLLPLPEEGLQHNCLDILAEAHGTRPDLTDQPLPDADHTWYTDGSSLLQEGQRKAGAAVTTETEVIWAKALPAGTSAQRAELIALTQALKMAEGKKLNVYTDSRYAFATAHIHGEIYRRRGWLTSEGKEIKNKDEILALLKALFLPKRLSIIHCPGHQKGHSAEARGNRMADQAARKAAITETPDTSTLLIENSSPSGGSKRTADGSEFEAGKRTADGSEFEKRTADGSEFESPKKKAKVE

SEQ ID NO: 2645 - protein, 2116 aa, synthetic construct
MPAAKRVKLDGGDKKYSIGLDIGTNSVGWAVITDEYKVPSKKFKVLGNTDRHSIKKNLIGALLFDSGETAEATRLKRTARRRYTRRKNRICYLQEIFSNEMAKVDDSFFHRLEESFLVEEDKKHERHPIFGNIVDEVAYHEKYPTIYHLRKKLVDSTDKADLRLIYLALAHMIKFRGHFLIEGDLNPDNSDVDKLFIQLVQTYNQLFEENPINASGVDAKAILSARLSKSRRLENLIAQLPGEKKNGLFGNLIALSLGLTPNFKSNFDLAEDAKLQLSKDTYDDDLDNLLAQIGDQYADLFLAAKNLSDAILLSDILRVNTEITKAPLSASMIKRYDEHHQDLTLLKALVRQQLPEKYKEIFFDQSKNGYAGYIDGGASQEEFYKFIKPILEKMDGTEELLVKLNREDLLRKQRTFDNGSIPHQIHLGELHAILRRQEDFYPFLKDNREKIEKILTFRIPYYVGPLARGNSRFAWMTRKSEETITPWNFEEVVDKGASAQSFIERMTNFDKNLPNEKVLPKHSLLYEYFTVYNELTKVKYVTEGMRKPAFLSGEQKKAIVDLLFKTNRKVTVKQLKEDYFKKIECFDSVEISGVEDRFNASLGTYHDLLKIIKDKDFLDNEENEDILEDIVLTLTLFEDREMIEERLKTYAHLFDDKVMKQLKRRRYTGWGRLSRKLINGIRDKQSGKTILDFLKSDGFANRNFMQLIHDDSLTFKEDIQKAQVSGQGDSLHEHIANLAGSPAIKKGILQTVKVVDELVKVMGRHKPENIVIEMARENQTTQKGQKNSRERMKRIEEGIKELGSQILKEHPVENTQLQNEKLYLYYLQNGRDMYVDQELDINRLSDYDVDHIVPQSFLKDDSIDNKVLTRSDKARGKSDNVPSEEVVKKMKNYWRQLLNAKLITQRKFDNLTKAERGGLSELDKAGFIKRQLVETRQITKHVAQILDSRMNTKYDENDKLIREVKVITLKSKLVSDFRKDFQFYKVREINNYHHAHDAYLNAVVGTALIKKYPKLESEFVYGDYKVYDVRKMIAKSEQEIGKATAKYFFYSNIMNFFKTEITLANGEIRKRPLIETNGETGEIVWDKGRDFATVRKVLSMPQVNIVKKTEVQTGGFSKESILPKRNSDKLIARKKDWDPKKYGGFDSPTVAYSVLVVAKVEKGKSKKLKSVKELLGITIMERSSFEKNPIDFLEAKGYKEVKKDLIIKLPKYSLFELENGRKRMLASAGELQKGNELALPSKYVNFLYLASHYEKLKGSPEDNEQKQLFVEQHKHYLDEIIEQISEFSKRVILADANLDKVLSAYNKHRDKPIREQAENIIHLFTLTNLGAPAAFKYFDTTIDRKRYTSTKEVLDATLIHQSITGLYETRIDLSQLGGDGGPAPEAAAKGSSGGTLNIEDEYRLHETSKEPDVSLGSTWLSDFPQAWAETGGMGLAVRQAPLIIPLKATSTPVSIKQYPMSQEARLGIKPHIQRLLDQGILVPCQSPWNTPLLPVKKPGTNDYRPVQDLREVNKRVEDIHPTVPNPYNLLSGLPPSHQWYTVLDLKDAFFCLRLHPTSQPLFAFEWRDPEMGISGQLTWTRLPQGFKNSPTLFNEALHRDLADFRIQHPDLILLQYVDDLLLAATSELDCQQGTRALLQTLGNLGYRASAKKAQICQKQVKYLGYLLKEGQRWLTEARKETVMGQPTPKTPRQLREFLGKAGFCRLFIPGFAEMAAPLYPLTKPGTLFNWGPDQQKAYQEIKQALLTAPALGLPDLTKPFELFVDEKQGYAKGVLTQKLGPWRRPVAYLSKKLDPVAAGWPPCLRMVAAIAVLTKDAGKLTMGQPLVILAPHAVEALVKQPPDRWLSNARMTHYQALLLDTDRVQFGPVVALNPATLLPLPEEGLQHNCLDILAEAHGTRPDLTDQPLPDADHTWYTDGSSLLQEGQRKAGAAVTTETEVIWAKALPAGTSAQRAELIALTQALKMAEGKKLNVYTDSRYAFATAHIHGEIYRRRGWLTSEGKEIKNKDEILALLKALFLPKRLSIIHCPGHQKGHSAEARGNRMADQAARKAAITETPDTSTLLIENSSPSGGSKRTADGSEFEAGKRTADGSEFEKRTADGSEFESPKKKAKVE

SEQ ID NO: 2646 - protein, 2108 aa, synthetic construct
MPAAKRVKLDGGDKKYSIGLDIGTNSVGWAVITDEYKVPSKKFKVLGNTDRHSIKKNLIGALLFDSGETAEATRLKRTARRRYTRRKNRICYLQEIFSNEMAKVDDSFFHRLEESFLVEEDKKHERHPIFGNIVDEVAYHEKYPTIYHLRKKLVDSTDKADLRLIYLALAHMIKFRGHFLIEGDLNPDNSDVDKLFIQLVQTYNQLFEENPINASGVDAKAILSARLSKSRRLENLIAQLPGEKKNGLFGNLIALSLGLTPNFKSNFDLAEDAKLQLSKDTYDDDLDNLLAQIGDQYADLFLAAKNLSDAILLSDILRVNTEITKAPLSASMIKRYDEHHQDLTLLKALVRQQLPEKYKEIFFDQSKNGYAGYIDGGASQEEFYKFIKPILEKMDGTEELLVKLNREDLLRKQRTFDNGSIPHQIHLGELHAILRRQEDFYPFLKDNREKIEKILTFRIPYYVGPLARGNSRFAWMTRKSEETITPWNFEEVVDKGASAQSFIERMTNFDKNLPNEKVLPKHSLLYEYFTVYNELTKVKYVTEGMRKPAFLSGEQKKAIVDLLFKTNRKVTVKQLKEDYFKKIECFDSVEISGVEDRFNASLGTYHDLLKIIKDKDFLDNEENEDILEDIVLTLTLFEDREMIEERLKTYAHLFDDKVMKQLKRRRYTGWGRLSRKLINGIRDKQSGKTILDFLKSDGFANRNFMQLIHDDSLTFKEDIQKAQVSGQGDSLHEHIANLAGSPAIKKGILQTVKVVDELVKVMGRHKPENIVIEMARENQTTQKGQKNSRERMKRIEEGIKELGSQILKEHPVENTQLQNEKLYLYYLQNGRDMYVDQELDINRLSDYDVDHIVPQSFLKDDSIDNKVLTRSDKARGKSDNVPSEEVVKKMKNYWRQLLNAKLITQRKFDNLTKAERGGLSELDKAGFIKRQLVETRQITKHVAQILDSRMNTKYDENDKLIREVKVITLKSKLVSDFRKDFQFYKVREINNYHHAHDAYLNAVVGTALIKKYPKLESEFVYGDYKVYDVRKMIAKSEQEIGKATAKYFFYSNIMNFFKTEITLANGEIRKRPLIETNGETGEIVWDKGRDFATVRKVLSMPQVNIVKKTEVQTGGFSKESILPKRNSDKLIARKKDWDPKKYGGFDSPTVAYSVLVVAKVEKGKSKKLKSVKELLGITIMERSSFEKNPIDFLEAKGYKEVKKDLIIKLPKYSLFELENGRKRMLASAGELQKGNELALPSKYVNFLYLASHYEKLKGSPEDNEQKQLFVEQHKHYLDEIIEQISEFSKRVILADANLDKVLSAYNKHRDKPIREQAENIIHLFTLTNLGAPAAFKYFDTTIDRKRYTSTKEVLDATLIHQSITGLYETRIDLSQLGGDGGGGGGGTLNIEDEYRLHETSKEPDVSLGSTWLSDFPQAWAETGGMGLAVRQAPLIIPLKATSTPVSIKQYPMSQEARLGIKPHIQRLLDQGILVPCQSPWNTPLLPVKKPGTNDYRPVQDLREVNKRVEDIHPTVPNPYNLLSGLPPSHQWYTVLDLKDAFFCLRLHPTSQPLFAFEWRDPEMGISGQLTWTRLPQGFKNSPTLFNEALHRDLADFRIQHPDLILLQYVDDLLLAATSELDCQQGTRALLQTLGNLGYRASAKKAQICQKQVKYLGYLLKEGQRWLTEARKETVMGQPTPKTPRQLREFLGKAGFCRLFIPGFAEMAAPLYPLTKPGTLFNWGPDQQKAYQEIKQALLTAPALGLPDLTKPFELFVDEKQGYAKGVLTQKLGPWRRPVAYLSKKLDPVAAGWPPCLRMVAAIAVLTKDAGKLTMGQPLVILAPHAVEALVKQPPDRWLSNARMTHYQALLLDTDRVQFGPVVALNPATLLPLPEEGLQHNCLDILAEAHGTRPDLTDQPLPDADHTWYTDGSSLLQEGQRKAGAAVTTETEVIWAKALPAGTSAQRAELIALTQALKMAEGKKLNVYTDSRYAFATAHIHGEIYRRRGWLTSEGKEIKNKDEILALLKALFLPKRLSIIHCPGHQKGHSAEARGNRMADQAARKAAITETPDTSTLLIENSSPSGGSKRTADGSEFEAGKRTADGSEFEKRTADGSEFESPKKKAKVE

SEQ ID NO: 2647 - protein, 2115 aa, synthetic construct
MPAAKRVKLDGGDKKYSIGLDIGTNSVGWAVITDEYKVPSKKFKVLGNTDRHSIKKNLIGALLFDSGETAEATRLKRTARRRYTRRKNRICYLQEIFSNEMAKVDDSFFHRLEESFLVEEDKKHERHPIFGNIVDEVAYHEKYPTIYHLRKKLVDSTDKADLRLIYLALAHMIKFRGHFLIEGDLNPDNSDVDKLFIQLVQTYNQLFEENPINASGVDAKAILSARLSKSRRLENLIAQLPGEKKNGLFGNLIALSLGLTPNFKSNFDLAEDAKLQLSKDTYDDDLDNLLAQIGDQYADLFLAAKNLSDAILLSDILRVNTEITKAPLSASMIKRYDEHHQDLTLLKALVRQQLPEKYKEIFFDQSKNGYAGYIDGGASQEEFYKFIKPILEKMDGTEELLVKLNREDLLRKQRTFDNGSIPHQIHLGELHAILRRQEDFYPFLKDNREKIEKILTFRIPYYVGPLARGNSRFAWMTRKSEETITPWNFEEVVDKGASAQSFIERMTNFDKNLPNEKVLPKHSLLYEYFTVYNELTKVKYVTEGMRKPAFLSGEQKKAIVDLLFKTNRKVTVKQLKEDYFKKIECFDSVEISGVEDRFNASLGTYHDLLKIIKDKDFLDNEENEDILEDIVLTLTLFEDREMIEERLKTYAHLFDDKVMKQLKRRRYTGWGRLSRKLINGIRDKQSGKTILDFLKSDGFANRNFMQLIHDDSLTFKEDIQKAQVSGQGDSLHEHIANLAGSPAIKKGILQTVKVVDELVKVMGRHKPENIVIEMARENQTTQKGQKNSRERMKRIEEGIKELGSQILKEHPVENTQLQNEKLYLYYLQNGRDMYVDQELDINRLSDYDVDHIVPQSFLKDDSIDNKVLTRSDKARGKSDNVPSEEVVKKMKNYWRQLLNAKLITQRKFDNLTKAERGGLSELDKAGFIKRQLVETRQITKHVAQILDSRMNTKYDENDKLIREVKVITLKSKLVSDFRKDFQFYKVREINNYHHAHDAYLNAVVGTALIKKYPKLESEFVYGDYKVYDVRKMIAKSEQEIGKATAKYFFYSNIMNFFKTEITLANGEIRKRPLIETNGETGEIVWDKGRDFATVRKVLSMPQVNIVKKTEVQTGGFSKESILPKRNSDKLIARKKDWDPKKYGGFDSPTVAYSVLVVAKVEKGKSKKLKSVKELLGITIMERSSFEKNPIDFLEAKGYKEVKKDLIIKLPKYSLFELENGRKRMLASAGELQKGNELALPSKYVNFLYLASHYEKLKGSPEDNEQKQLFVEQHKHYLDEIIEQISEFSKRVILADANLDKVLSAYNKHRDKPIREQAENIIHLFTLTNLGAPAAFKYFDTTIDRKRYTSTKEVLDATLIHQSITGLYETRIDLSQLGGDGGEAAAKEAAAKGGTLNIEDEYRLHETSKEPDVSLGSTWLSDFPQAWAETGGMGLAVRQAPLIIPLKATSTPVSIKQYPMSQEARLGIKPHIQRLLDQGILVPCQSPWNTPLLPVKKPGTNDYRPVQDLREVNKRVEDIHPTVPNPYNLLSGLPPSHQWYTVLDLKDAFFCLRLHPTSQPLFAFEWRDPEMGISGQLTWTRLPQGFKNSPTLFNEALHRDLADFRIQHPDLILLQYVDDLLLAATSELDCQQGTRALLQTLGNLGYRASAKKAQICQKQVKYLGYLLKEGQRWLTEARKETVMGQPTPKTPRQLREFLGKAGFCRLFIPGFAEMAAPLYPLTKPGTLFNWGPDQQKAYQEIKQALLTAPALGLPDLTKPFELFVDEKQGYAKGVLTQKLGPWRRPVAYLSKKLDPVAAGWPPCLRMVAAIAVLTKDAGKLTMGQPLVILAPHAVEALVKQPPDRWLSNARMTHYQALLLDTDRVQFGPVVALNPATLLPLPEEGLQHNCLDILAEAHGTRPDLTDQPLPDADHTWYTDGSSLLQEGQRKAGAAVTTETEVIWAKALPAGTSAQRAELIALTQALKMAEGKKLNVYTDSRYAFATAHIHGEIYRRRGWLTSEGKEIKNKDEILALLKALFLPKRLSIIHCPGHQKGHSAEARGNRMADQAARKAAITETPDTSTLLIENSSPSGGSKRTADGSEFEAGKRTADGSEFEKRTADGSEFESPKKKAKVE

SEQ ID NO: 2648 - protein, 2116 aa, synthetic construct
MPAAKRVKLDGGDKKYSIGLDIGTNSVGWAVITDEYKVPSKKFKVLGNTDRHSIKKNLIGALLFDSGETAEATRLKRTARRRYTRRKNRICYLQEIFSNEMAKVDDSFFHRLEESFLVEEDKKHERHPIFGNIVDEVAYHEKYPTIYHLRKKLVDSTDKADLRLIYLALAHMIKFRGHFLIEGDLNPDNSDVDKLFIQLVQTYNQLFEENPINASGVDAKAILSARLSKSRRLENLIAQLPGEKKNGLFGNLIALSLGLTPNFKSNFDLAEDAKLQLSKDTYDDDLDNLLAQIGDQYADLFLAAKNLSDAILLSDILRVNTEITKAPLSASMIKRYDEHHQDLTLLKALVRQQLPEKYKEIFFDQSKNGYAGYIDGGASQEEFYKFIKPILEKMDGTEELLVKLNREDLLRKQRTFDNGSIPHQIHLGELHAILRRQEDFYPFLKDNREKIEKILTFRIPYYVGPLARGNSRFAWMTRKSEETITPWNFEEVVDKGASAQSFIERMTNFDKNLPNEKVLPKHSLLYEYFTVYNELTKVKYVTEGMRKPAFLSGEQKKAIVDLLFKTNRKVTVKQLKEDYFKKIECFDSVEISGVEDRFNASLGTYHDLLKIIKDKDFLDNEENEDILEDIVLTLTLFEDREMIEERLKTYAHLFDDKVMKQLKRRRYTGWGRLSRKLINGIRDKQSGKTILDFLKSDGFANRNFMQLIHDDSLTFKEDIQKAQVSGQGDSLHEHIANLAGSPAIKKGILQTVKVVDELVKVMGRHKPENIVIEMARENQTTQKGQKNSRERMKRIEEGIKELGSQILKEHPVENTQLQNEKLYLYYLQNGRDMYVDQELDINRLSDYDVDHIVPQSFLKDDSIDNKVLTRSDKARGKSDNVPSEEVVKKMKNYWRQLLNAKLITQRKFDNLTKAERGGLSELDKAGFIKRQLVETRQITKHVAQILDSRMNTKYDENDKLIREVKVITLKSKLVSDFRKDFQFYKVREINNYHHAHDAYLNAVVGTALIKKYPKLESEFVYGDYKVYDVRKMIAKSEQEIGKATAKYFFYSNIMNFFKTEITLANGEIRKRPLIETNGETGEIVWDKGRDFATVRKVLSMPQVNIVKKTEVQTGGFSKESILPKRNSDKLIARKKDWDPKKYGGFDSPTVAYSVLVVAKVEKGKSKKLKSVKELLGITIMERSSFEKNPIDFLEAKGYKEVKKDLIIKLPKYSLFELENGRKRMLASAGELQKGNELALPSKYVNFLYLASHYEKLKGSPEDNEQKQLFVEQHKHYLDEIIEQISEFSKRVILADANLDKVLSAYNKHRDKPIREQAENIIHLFTLTNLGAPAAFKYFDTTIDRKRYTSTKEVLDATLIHQSITGLYETRIDLSQLGGDGGGSSPAPEAAAKGGTLNIEDEYRLHETSKEPDVSLGSTWLSDFPQAWAETGGMGLAVRQAPLIIPLKATSTPVSIKQYPMSQEARLGIKPHIQRLLDQGILVPCQSPWNTPLLPVKKPGTNDYRPVQDLREVNKRVEDIHPTVPNPYNLLSGLPPSHQWYTVLDLKDAFFCLRLHPTSQPLFAFEWRDPEMGISGQLTWTRLPQGFKNSPTLFNEALHRDLADFRIQHPDLILLQYVDDLLLAATSELDCQQGTRALLQTLGNLGYRASAKKAQICQKQVKYLGYLLKEGQRWLTEARKETVMGQPTPKTPRQLREFLGKAGFCRLFIPGFAEMAAPLYPLTKPGTLFNWGPDQQKAYQEIKQALLTAPALGLPDLTKPFELFVDEKQGYAKGVLTQKLGPWRRPVAYLSKKLDPVAAGWPPCLRMVAAIAVLTKDAGKLTMGQPLVILAPHAVEALVKQPPDRWLSNARMTHYQALLLDTDRVQFGPVVALNPATLLPLPEEGLQHNCLDILAEAHGTRPDLTDQPLPDADHTWYTDGSSLLQEGQRKAGAAVTTETEVIWAKALPAGTSAQRAELIALTQALKMAEGKKLNVYTDSRYAFATAHIHGEIYRRRGWLTSEGKEIKNKDEILALLKALFLPKRLSIIHCPGHQKGHSAEARGNRMADQAARKAAITETPDTSTLLIENSSPSGGSKRTADGSEFEAGKRTADGSEFEKRTADGSEFESPKKKAKVE

SEQ ID NO: 2649 - protein, 2114 aa, synthetic construct
MPAAKRVKLDGGDKKYSIGLDIGTNSVGWAVITDEYKVPSKKFKVLGNTDRHSIKKNLIGALLFDSGETAEATRLKRTARRRYTRRKNRICYLQEIFSNEMAKVDDSFFHRLEESFLVEEDKKHERHPIFGNIVDEVAYHEKYPTIYHLRKKLVDSTDKADLRLIYLALAHMIKFRGHFLIEGDLNPDNSDVDKLFIQLVQTYNQLFEENPINASGVDAKAILSARLSKSRRLENLIAQLPGEKKNGLFGNLIALSLGLTPNFKSNFDLAEDAKLQLSKDTYDDDLDNLLAQIGDQYADLFLAAKNLSDAILLSDILRVNTEITKAPLSASMIKRYDEHHQDLTLLKALVRQQLPEKYKEIFFDQSKNGYAGYIDGGASQEEFYKFIKPILEKMDGTEELLVKLNREDLLRKQRTFDNGSIPHQIHLGELHAILRRQEDFYPFLKDNREKIEKILTFRIPYYVGPLARGNSRFAWMTRKSEETITPWNFEEVVDKGASAQSFIERMTNFDKNLPNEKVLPKHSLLYEYFTVYNELTKVKYVTEGMRKPAFLSGEQKKAIVDLLFKTNRKVTVKQLKEDYFKKIECFDSVEISGVEDRFNASLGTYHDLLKIIKDKDFLDNEENEDILEDIVLTLTLFEDREMIEERLKTYAHLFDDKVMKQLKRRRYTGWGRLSRKLINGIRDKQSGKTILDFLKSDGFANRNFMQLIHDDSLTFKEDIQKAQVSGQGDSLHEHIANLAGSPAIKKGILQTVKVVDELVKVMGRHKPENIVIEMARENQTTQKGQKNSRERMKRIEEGIKELGSQILKEHPVENTQLQNEKLYLYYLQNGRDMYVDQELDINRLSDYDVDHIVPQSFLKDDSIDNKVLTRSDKARGKSDNVPSEEVVKKMKNYWRQLLNAKLITQRKFDNLTKAERGGLSELDKAGFIKRQLVETRQITKHVAQILDSRMNTKYDENDKLIREVKVITLKSKLVSDFRKDFQFYKVREINNYHHAHDAYLNAVVGTALIKKYPKLESEFVYGDYKVYDVRKMIAKSEQEIGKATAKYFFYSNIMNFFKTEITLANGEIRKRPLIETNGETGEIVWDKGRDFATVRKVLSMPQVNIVKKTEVQTGGFSKESILPKRNSDKLIARKKDWDPKKYGGFDSPTVAYSVLVVAKVEKGKSKKLKSVKELLGITIMERSSFEKNPIDFLEAKGYKEVKKDLIIKLPKYSLFELENGRKRMLASAGELQKGNELALPSKYVNFLYLASHYEKLKGSPEDNEQKQLFVEQHKHYLDEIIEQISEFSKRVILADANLDKVLSAYNKHRDKPIREQAENIIHLFTLTNLGAPAAFKYFDTTIDRKRYTSTKEVLDATLIHQSITGLYETRIDLSQLGGDGGPAPGGSGGGGGTLNIEDEYRLHETSKEPDVSLGSTWLSDFPQAWAETGGMGLAVRQAPLIIPLKATSTPVSIKQYPMSQEARLGIKPHIQRLLDQGILVPCQSPWNTPLLPVKKPGTNDYRPVQDLREVNKRVEDIHPTVPNPYNLLSGLPPSHQWYTVLDLKDAFFCLRLHPTSQPLFAFEWRDPEMGISGQLTWTRLPQGFKNSPTLFNEALHRDLADFRIQHPDLILLQYVDDLLLAATSELDCQQGTRALLQTLGNLGYRASAKKAQICQKQVKYLGYLLKEGQRWLTEARKETVMGQPTPKTPRQLREFLGKAGFCRLFIPGFAEMAAPLYPLTKPGTLFNWGPDQQKAYQEIKQALLTAPALGLPDLTKPFELFVDEKQGYAKGVLTQKLGPWRRPVAYLSKKLDPVAAGWPPCLRMVAAIAVLTKDAGKLTMGQPLVILAPHAVEALVKQPPDRWLSNARMTHYQALLLDTDRVQFGPVVALNPATLLPLPEEGLQHNCLDILAEAHGTRPDLTDQPLPDADHTWYTDGSSLLQEGQRKAGAAVTTETEVIWAKALPAGTSAQRAELIALTQALKMAEGKKLNVYTDSRYAFATAHIHGEIYRRRGWLTSEGKEIKNKDEILALLKALFLPKRLSIIHCPGHQKGHSAEARGNRMADQAARKAAITETPDTSTLLIENSSPSGGSKRTADGSEFEAGKRTADGSEFEKRTADGSEFESPKKKAKVE

SEQ ID NO: 2650 - protein, 2114 aa, synthetic construct
MPAAKRVKLDGGDKKYSIGLDIGTNSVGWAVITDEYKVPSKKFKVLGNTDRHSIKKNLIGALLFDSGETAEATRLKRTARRRYTRRKNRICYLQEIFSNEMAKVDDSFFHRLEESFLVEEDKKHERHPIFGNIVDEVAYHEKYPTIYHLRKKLVDSTDKADLRLIYLALAHMIKFRGHFLIEGDLNPDNSDVDKLFIQLVQTYNQLFEENPINASGVDAKAILSARLSKSRRLENLIAQLPGEKKNGLFGNLIALSLGLTPNFKSNFDLAEDAKLQLSKDTYDDDLDNLLAQIGDQYADLFLAAKNLSDAILLSDILRVNTEITKAPLSASMIKRYDEHHQDLTLLKALVRQQLPEKYKEIFFDQSKNGYAGYIDGGASQEEFYKFIKPILEKMDGTEELLVKLNREDLLRKQRTFDNGSIPHQIHLGELHAILRRQEDFYPFLKDNREKIEKILTFRIPYYVGPLARGNSRFAWMTRKSEETITPWNFEEVVDKGASAQSFIERMTNFDKNLPNEKVLPKHSLLYEYFTVYNELTKVKYVTEGMRKPAFLSGEQKKAIVDLLFKTNRKVTVKQLKEDYFKKIECFDSVEISGVEDRFNASLGTYHDLLKIIKDKDFLDNEENEDILEDIVLTLTLFEDREMIEERLKTYAHLFDDKVMKQLKRRRYTGWGRLSRKLINGIRDKQSGKTILDFLKSDGFANRNFMQLIHDDSLTFKEDIQKAQVSGQGDSLHEHIANLAGSPAIKKGILQTVKVVDELVKVMGRHKPENIVIEMARENQTTQKGQKNSRERMKRIEEGIKELGSQILKEHPVENTQLQNEKLYLYYLQNGRDMYVDQELDINRLSDYDVDHIVPQSFLKDDSIDNKVLTRSDKARGKSDNVPSEEVVKKMKNYWRQLLNAKLITQRKFDNLTKAERGGLSELDKAGFIKRQLVETRQITKHVAQILDSRMNTKYDENDKLIREVKVITLKSKLVSDFRKDFQFYKVREINNYHHAHDAYLNAVVGTALIKKYPKLESEFVYGDYKVYDVRKMIAKSEQEIGKATAKYFFYSNIMNFFKTEITLANGEIRKRPLIETNGETGEIVWDKGRDFATVRKVLSMPQVNIVKKTEVQTGGFSKESILPKRNSDKLIARKKDWDPKKYGGFDSPTVAYSVLVVAKVEKGKSKKLKSVKELLGITIMERSSFEKNPIDFLEAKGYKEVKKDLIIKLPKYSLFELENGRKRMLASAGELQKGNELALPSKYVNFLYLASHYEKLKGSPEDNEQKQLFVEQHKHYLDEIIEQISEFSKRVILADANLDKVLSAYNKHRDKPIREQAENIIHLFTLTNLGAPAAFKYFDTTIDRKRYTSTKEVLDATLIHQSITGLYETRIDLSQLGGDGGPAPGGGGGSGGTLNIEDEYRLHETSKEPDVSLGSTWLSDFPQAWAETGGMGLAVRQAPLIIPLKATSTPVSIKQYPMSQEARLGIKPHIQRLLDQGILVPCQSPWNTPLLPVKKPGTNDYRPVQDLREVNKRVEDIHPTVPNPYNLLSGLPPSHQWYTVLDLKDAFFCLRLHPTSQPLFAFEWRDPEMGISGQLTWTRLPQGFKNSPTLFNEALHRDLADFRIQHPDLILLQYVDDLLLAATSELDCQQGTRALLQTLGNLGYRASAKKAQICQKQVKYLGYLLKEGQRWLTEARKETVMGQPTPKTPRQLREFLGKAGFCRLFIPGFAEMAAPLYPLTKPGTLFNWGPDQQKAYQEIKQALLTAPALGLPDLTKPFELFVDEKQGYAKGVLTQKLGPWRRPVAYLSKKLDPVAAGWPPCLRMVAAIAVLTKDAGKLTMGQPLVILAPHAVEALVKQPPDRWLSNARMTHYQALLLDTDRVQFGPVVALNPATLLPLPEEGLQHNCLDILAEAHGTRPDLTDQPLPDADHTWYTDGSSLLQEGQRKAGAAVTTETEVIWAKALPAGTSAQRAELIALTQALKMAEGKKLNVYTDSRYAFATAHIHGEIYRRRGWLTSEGKEIKNKDEILALLKALFLPKRLSIIHCPGHQKGHSAEARGNRMADQAARKAAITETPDTSTLLIENSSPSGGSKRTADGSEFEAGKRTADGSEFEKRTADGSEFESPKKKAKVE

SEQ ID NO: 2651 - protein, 2116 aa, synthetic construct
MPAAKRVKLDGGDKKYSIGLDIGTNSVGWAVITDEYKVPSKKFKVLGNTDRHSIKKNLIGALLFDSGETAEATRLKRTARRRYTRRKNRICYLQEIFSNEMAKVDDSFFHRLEESFLVEEDKKHERHPIFGNIVDEVAYHEKYPTIYHLRKKLVDSTDKADLRLIYLALAHMIKFRGHFLIEGDLNPDNSDVDKLFIQLVQTYNQLFEENPINASGVDAKAILSARLSKSRRLENLIAQLPGEKKNGLFGNLIALSLGLTPNFKSNFDLAEDAKLQLSKDTYDDDLDNLLAQIGDQYADLFLAAKNLSDAILLSDILRVNTEITKAPLSASMIKRYDEHHQDLTLLKALVRQQLPEKYKEIFFDQSKNGYAGYIDGGASQEEFYKFIKPILEKMDGTEELLVKLNREDLLRKQRTFDNGSIPHQIHLGELHAILRRQEDFYPFLKDNREKIEKILTFRIPYYVGPLARGNSRFAWMTRKSEETITPWNFEEVVDKGASAQSFIERMTNFDKNLPNEKVLPKHSLLYEYFTVYNELTKVKYVTEGMRKPAFLSGEQKKAIVDLLFKTNRKVTVKQLKEDYFKKIECFDSVEISGVEDRFNASLGTYHDLLKIIKDKDFLDNEENEDILEDIVLTLTLFEDREMIEERLKTYAHLFDDKVMKQLKRRRYTGWGRLSRKLINGIRDKQSGKTILDFLKSDGFANRNFMQLIHDDSLTFKEDIQKAQVSGQGDSLHEHIANLAGSPAIKKGILQTVKVVDELVKVMGRHKPENIVIEMARENQTTQKGQKNSRERMKRIEEGIKELGSQILKEHPVENTQLQNEKLYLYYLQNGRDMYVDQELDINRLSDYDVDHIVPQSFLKDDSIDNKVLTRSDKARGKSDNVPSEEVVKKMKNYWRQLLNAKLITQRKFDNLTKAERGGLSELDKAGFIKRQLVETRQITKHVAQILDSRMNTKYDENDKLIREVKVITLKSKLVSDFRKDFQFYKVREINNYHHAHDAYLNAVVGTALIKKYPKLESEFVYGDYKVYDVRKMIAKSEQEIGKATAKYFFYSNIMNFFKTEITLANGEIRKRPLIETNGETGEIVWDKGRDFATVRKVLSMPQVNIVKKTEVQTGGFSKESILPKRNSDKLIARKKDWDPKKYGGFDSPTVAYSVLVVAKVEKGKSKKLKSVKELLGITIMERSSFEKNPIDFLEAKGYKEVKKDLIIKLPKYSLFELENGRKRMLASAGELQKGNELALPSKYVNFLYLASHYEKLKGSPEDNEQKQLFVEQHKHYLDEIIEQISEFSKRVILADANLDKVLSAYNKHRDKPIREQAENIIHLFTLTNLGAPAAFKYFDTTIDRKRYTSTKEVLDATLIHQSITGLYETRIDLSQLGGDGGPAPGSSEAAAKGGTLNIEDEYRLHETSKEPDVSLGSTWLSDFPQAWAETGGMGLAVRQAPLIIPLKATSTPVSIKQYPMSQEARLGIKPHIQRLLDQGILVPCQSPWNTPLLPVKKPGTNDYRPVQDLREVNKRVEDIHPTVPNPYNLLSGLPPSHQWYTVLDLKDAFFCLRLHPTSQPLFAFEWRDPEMGISGQLTWTRLPQGFKNSPTLFNEALHRDLADFRIQHPDLILLQYVDDLLLAATSELDCQQGTRALLQTLGNLGYRASAKKAQICQKQVKYLGYLLKEGQRWLTEARKETVMGQPTPKTPRQLREFLGKAGFCRLFIPGFAEMAAPLYPLTKPGTLFNWGPDQQKAYQEIKQALLTAPALGLPDLTKPFELFVDEKQGYAKGVLTQKLGPWRRPVAYLSKKLDPVAAGWPPCLRMVAAIAVLTKDAGKLTMGQPLVILAPHAVEALVKQPPDRWLSNARMTHYQALLLDTDRVQFGPVVALNPATLLPLPEEGLQHNCLDILAEAHGTRPDLTDQPLPDADHTWYTDGSSLLQEGQRKAGAAVTTETEVIWAKALPAGTSAQRAELIALTQALKMAEGKKLNVYTDSRYAFATAHIHGEIYRRRGWLTSEGKEIKNKDEILALLKALFLPKRLSIIHCPGHQKGHSAEARGNRMADQAARKAAITETPDTSTLLIENSSPSGGSKRTADGSEFEAGKRTADGSEFEKRTADGSEFESPKKKAKVE

SEQ ID NO: 2652 - protein, 2116 aa, synthetic construct
MPAAKRVKLDGGDKKYSIGLDIGTNSVGWAVITDEYKVPSKKFKVLGNTDRHSIKKNLIGALLFDSGETAEATRLKRTARRRYTRRKNRICYLQEIFSNEMAKVDDSFFHRLEESFLVEEDKKHERHPIFGNIVDEVAYHEKYPTIYHLRKKLVDSTDKADLRLIYLALAHMIKFRGHFLIEGDLNPDNSDVDKLFIQLVQTYNQLFEENPINASGVDAKAILSARLSKSRRLENLIAQLPGEKKNGLFGNLIALSLGLTPNFKSNFDLAEDAKLQLSKDTYDDDLDNLLAQIGDQYADLFLAAKNLSDAILLSDILRVNTEITKAPLSASMIKRYDEHHQDLTLLKALVRQQLPEKYKEIFFDQSKNGYAGYIDGGASQEEFYKFIKPILEKMDGTEELLVKLNREDLLRKQRTFDNGSIPHQIHLGELHAILRRQEDFYPFLKDNREKIEKILTFRIPYYVGPLARGNSRFAWMTRKSEETITPWNFEEVVDKGASAQSFIERMTNFDKNLPNEKVLPKHSLLYEYFTVYNELTKVKYVTEGMRKPAFLSGEQKKAIVDLLFKTNRKVTVKQLKEDYFKKIECFDSVEISGVEDRFNASLGTYHDLLKIIKDKDFLDNEENEDILEDIVLTLTLFEDREMIEERLKTYAHLFDDKVMKQLKRRRYTGWGRLSRKLINGIRDKQSGKTILDFLKSDGFANRNFMQLIHDDSLTFKEDIQKAQVSGQGDSLHEHIANLAGSPAIKKGILQTVKVVDELVKVMGRHKPENIVIEMARENQTTQKGQKNSRERMKRIEEGIKELGSQILKEHPVENTQLQNEKLYLYYLQNGRDMYVDQELDINRLSDYDVDHIVPQSFLKDDSIDNKVLTRSDKARGKSDNVPSEEVVKKMKNYWRQLLNAKLITQRKFDNLTKAERGGLSELDKAGFIKRQLVETRQITKHVAQILDSRMNTKYDENDKLIREVKVITLKSKLVSDFRKDFQFYKVREINNYHHAHDAYLNAVVGTALIKKYPKLESEFVYGDYKVYDVRKMIAKSEQEIGKATAKYFFYSNIMNFFKTEITLANGEIRKRPLIETNGETGEIVWDKGRDFATVRKVLSMPQVNIVKKTEVQTGGFSKESILPKRNSDKLIARKKDWDPKKYGGFDSPTVAYSVLVVAKVEKGKSKKLKSVKELLGITIMERSSFEKNPIDFLEAKGYKEVKKDLIIKLPKYSLFELENGRKRMLASAGELQKGNELALPSKYVNFLYLASHYEKLKGSPEDNEQKQLFVEQHKHYLDEIIEQISEFSKRVILADANLDKVLSAYNKHRDKPIREQAENIIHLFTLTNLGAPAAFKYFDTTIDRKRYTSTKEVLDATLIHQSITGLYETRIDLSQLGGDGGGSSGGGEAAAKGGTLNIEDEYRLHETSKEPDVSLGSTWLSDFPQAWAETGGMGLAVRQAPLIIPLKATSTPVSIKQYPMSQEARLGIKPHIQRLLDQGILVPCQSPWNTPLLPVKKPGTNDYRPVQDLREVNKRVEDIHPTVPNPYNLLSGLPPSHQWYTVLDLKDAFFCLRLHPTSQPLFAFEWRDPEMGISGQLTWTRLPQGFKNSPTLFNEALHRDLADFRIQHPDLILLQYVDDLLLAATSELDCQQGTRALLQTLGNLGYRASAKKAQICQKQVKYLGYLLKEGQRWLTEARKETVMGQPTPKTPRQLREFLGKAGFCRLFIPGFAEMAAPLYPLTKPGTLFNWGPDQQKAYQEIKQALLTAPALGLPDLTKPFELFVDEKQGYAKGVLTQKLGPWRRPVAYLSKKLDPVAAGWPPCLRMVAAIAVLTKDAGKLTMGQPLVILAPHAVEALVKQPPDRWLSNARMTHYQALLLDTDRVQFGPVVALNPATLLPLPEEGLQHNCLDILAEAHGTRPDLTDQPLPDADHTWYTDGSSLLQEGQRKAGAAVTTETEVIWAKALPAGTSAQRAELIALTQALKMAEGKKLNVYTDSRYAFATAHIHGEIYRRRGWLTSEGKEIKNKDEILALLKALFLPKRLSIIHCPGHQKGHSAEARGNRMADQAARKAAITETPDTSTLLIENSSPSGGSKRTADGSEFEAGKRTADGSEFEKRTADGSEFESPKKKAKVE

SEQ ID NO: 2653 - protein, 2111 aa, synthetic construct
MPAAKRVKLDGGDKKYSIGLDIGTNSVGWAVITDEYKVPSKKFKVLGNTDRHSIKKNLIGALLFDSGETAEATRLKRTARRRYTRRKNRICYLQEIFSNEMAKVDDSFFHRLEESFLVEEDKKHERHPIFGNIVDEVAYHEKYPTIYHLRKKLVDSTDKADLRLIYLALAHMIKFRGHFLIEGDLNPDNSDVDKLFIQLVQTYNQLFEENPINASGVDAKAILSARLSKSRRLENLIAQLPGEKKNGLFGNLIALSLGLTPNFKSNFDLAEDAKLQLSKDTYDDDLDNLLAQIGDQYADLFLAAKNLSDAILLSDILRVNTEITKAPLSASMIKRYDEHHQDLTLLKALVRQQLPEKYKEIFFDQSKNGYAGYIDGGASQEEFYKFIKPILEKMDGTEELLVKLNREDLLRKQRTFDNGSIPHQIHLGELHAILRRQEDFYPFLKDNREKIEKILTFRIPYYVGPLARGNSRFAWMTRKSEETITPWNFEEVVDKGASAQSFIERMTNFDKNLPNEKVLPKHSLLYEYFTVYNELTKVKYVTEGMRKPAFLSGEQKKAIVDLLFKTNRKVTVKQLKEDYFKKIECFDSVEISGVEDRFNASLGTYHDLLKIIKDKDFLDNEENEDILEDIVLTLTLFEDREMIEERLKTYAHLFDDKVMKQLKRRRYTGWGRLSRKLINGIRDKQSGKTILDFLKSDGFANRNFMQLIHDDSLTFKEDIQKAQVSGQGDSLHEHIANLAGSPAIKKGILQTVKVVDELVKVMGRHKPENIVIEMARENQTTQKGQKNSRERMKRIEEGIKELGSQILKEHPVENTQLQNEKLYLYYLQNGRDMYVDQELDINRLSDYDVDHIVPQSFLKDDSIDNKVLTRSDKARGKSDNVPSEEVVKKMKNYWRQLLNAKLITQRKFDNLTKAERGGLSELDKAGFIKRQLVETRQITKHVAQILDSRMNTKYDENDKLIREVKVITLKSKLVSDFRKDFQFYKVREINNYHHAHDAYLNAVVGTALIKKYPKLESEFVYGDYKVYDVRKMIAKSEQEIGKATAKYFFYSNIMNFFKTEITLANGEIRKRPLIETNGETGEIVWDKGRDFATVRKVLSMPQVNIVKKTEVQTGGFSKESILPKRNSDKLIARKKDWDPKKYGGFDSPTVAYSVLVVAKVEKGKSKKLKSVKELLGITIMERSSFEKNPIDFLEAKGYKEVKKDLIIKLPKYSLFELENGRKRMLASAGELQKGNELALPSKYVNFLYLASHYEKLKGSPEDNEQKQLFVEQHKHYLDEIIEQISEFSKRVILADANLDKVLSAYNKHRDKPIREQAENIIHLFTLTNLGAPAAFKYFDTTIDRKRYTSTKEVLDATLIHQSITGLYETRIDLSQLGGDGGGGSGGGGGTLNIEDEYRLHETSKEPDVSLGSTWLSDFPQAWAETGGMGLAVRQAPLIIPLKATSTPVSIKQYPMSQEARLGIKPHIQRLLDQGILVPCQSPWNTPLLPVKKPGTNDYRPVQDLREVNKRVEDIHPTVPNPYNLLSGLPPSHQWYTVLDLKDAFFCLRLHPTSQPLFAFEWRDPEMGISGQLTWTRLPQGFKNSPTLFNEALHRDLADFRIQHPDLILLQYVDDLLLAATSELDCQQGTRALLQTLGNLGYRASAKKAQICQKQVKYLGYLLKEGQRWLTEARKETVMGQPTPKTPRQLREFLGKAGFCRLFIPGFAEMAAPLYPLTKPGTLFNWGPDQQKAYQEIKQALLTAPALGLPDLTKPFELFVDEKQGYAKGVLTQKLGPWRRPVAYLSKKLDPVAAGWPPCLRMVAAIAVLTKDAGKLTMGQPLVILAPHAVEALVKQPPDRWLSNARMTHYQALLLDTDRVQFGPVVALNPATLLPLPEEGLQHNCLDILAEAHGTRPDLTDQPLPDADHTWYTDGSSLLQEGQRKAGAAVTTETEVIWAKALPAGTSAQRAELIALTQALKMAEGKKLNVYTDSRYAFATAHIHGEIYRRRGWLTSEGKEIKNKDEILALLKALFLPKRLSIIHCPGHQKGHSAEARGNRMADQAARKAAITETPDTSTLLIENSSPSGGSKRTADGSEFEAGKRTADGSEFEKRTADGSEFESPKKKAKVE

SEQ ID NO: 2654 - protein, 2116 aa, synthetic construct
MPAAKRVKLDGGDKKYSIGLDIGTNSVGWAVITDEYKVPSKKFKVLGNTDRHSIKKNLIGALLFDSGETAEATRLKRTARRRYTRRKNRICYLQEIFSNEMAKVDDSFFHRLEESFLVEEDKKHERHPIFGNIVDEVAYHEKYPTIYHLRKKLVDSTDKADLRLIYLALAHMIKFRGHFLIEGDLNPDNSDVDKLFIQLVQTYNQLFEENPINASGVDAKAILSARLSKSRRLENLIAQLPGEKKNGLFGNLIALSLGLTPNFKSNFDLAEDAKLQLSKDTYDDDLDNLLAQIGDQYADLFLAAKNLSDAILLSDILRVNTEITKAPLSASMIKRYDEHHQDLTLLKALVRQQLPEKYKEIFFDQSKNGYAGYIDGGASQEEFYKFIKPILEKMDGTEELLVKLNREDLLRKQRTFDNGSIPHQIHLGELHAILRRQEDFYPFLKDNREKIEKILTFRIPYYVGPLARGNSRFAWMTRKSEETITPWNFEEVVDKGASAQSFIERMTNFDKNLPNEKVLPKHSLLYEYFTVYNELTKVKYVTEGMRKPAFLSGEQKKAIVDLLFKTNRKVTVKQLKEDYFKKIECFDSVEISGVEDRFNASLGTYHDLLKIIKDKDFLDNEENEDILEDIVLTLTLFEDREMIEERLKTYAHLFDDKVMKQLKRRRYTGWGRLSRKLINGIRDKQSGKTILDFLKSDGFANRNFMQLIHDDSLTFKEDIQKAQVSGQGDSLHEHIANLAGSPAIKKGILQTVKVVDELVKVMGRHKPENIVIEMARENQTTQKGQKNSRERMKRIEEGIKELGSQILKEHPVENTQLQNEKLYLYYLQNGRDMYVDQELDINRLSDYDVDHIVPQSFLKDDSIDNKVLTRSDKARGKSDNVPSEEVVKKMKNYWRQLLNAKLITQRKFDNLTKAERGGLSELDKAGFIKRQLVETRQITKHVAQILDSRMNTKYDENDKLIREVKVITLKSKLVSDFRKDFQFYKVREINNYHHAHDAYLNAVVGTALIKKYPKLESEFVYGDYKVYDVRKMIAKSEQEIGKATAKYFFYSNIMNFFKTEITLANGEIRKRPLIETNGETGEIVWDKGRDFATVRKVLSMPQVNIVKKTEVQTGGFSKESILPKRNSDKLIARKKDWDPKKYGGFDSPTVAYSVLVVAKVEKGKSKKLKSVKELLGITIMERSSFEKNPIDFLEAKGYKEVKKDLIIKLPKYSLFELENGRKRMLASAGELQKGNELALPSKYVNFLYLASHYEKLKGSPEDNEQKQLFVEQHKHYLDEIIEQISEFSKRVILADANLDKVLSAYNKHRDKPIREQAENIIHLFTLTNLGAPAAFKYFDTTIDRKRYTSTKEVLDATLIHQSITGLYETRIDLSQLGGDGGEAAAKGGSPAPGGTLNIEDEYRLHETSKEPDVSLGSTWLSDFPQAWAETGGMGLAVRQAPLIIPLKATSTPVSIKQYPMSQEARLGIKPHIQRLLDQGILVPCQSPWNTPLLPVKKPGTNDYRPVQDLREVNKRVEDIHPTVPNPYNLLSGLPPSHQWYTVLDLKDAFFCLRLHPTSQPLFAFEWRDPEMGISGQLTWTRLPQGFKNSPTLFNEALHRDLADFRIQHPDLILLQYVDDLLLAATSELDCQQGTRALLQTLGNLGYRASAKKAQICQKQVKYLGYLLKEGQRWLTEARKETVMGQPTPKTPRQLREFLGKAGFCRLFIPGFAEMAAPLYPLTKPGTLFNWGPDQQKAYQEIKQALLTAPALGLPDLTKPFELFVDEKQGYAKGVLTQKLGPWRRPVAYLSKKLDPVAAGWPPCLRMVAAIAVLTKDAGKLTMGQPLVILAPHAVEALVKQPPDRWLSNARMTHYQALLLDTDRVQFGPVVALNPATLLPLPEEGLQHNCLDILAEAHGTRPDLTDQPLPDADHTWYTDGSSLLQEGQRKAGAAVTTETEVIWAKALPAGTSAQRAELIALTQALKMAEGKKLNVYTDSRYAFATAHIHGEIYRRRGWLTSEGKEIKNKDEILALLKALFLPKRLSIIHCPGHQKGHSAEARGNRMADQAARKAAITETPDTSTLLIENSSPSGGSKRTADGSEFEAGKRTADGSEFEKRTADGSEFESPKKKAKVE

SEQ ID NO: 2655 - protein, 2108 aa, synthetic construct
MPAAKRVKLDGGDKKYSIGLDIGTNSVGWAVITDEYKVPSKKFKVLGNTDRHSIKKNLIGALLFDSGETAEATRLKRTARRRYTRRKNRICYLQEIFSNEMAKVDDSFFHRLEESFLVEEDKKHERHPIFGNIVDEVAYHEKYPTIYHLRKKLVDSTDKADLRLIYLALAHMIKFRGHFLIEGDLNPDNSDVDKLFIQLVQTYNQLFEENPINASGVDAKAILSARLSKSRRLENLIAQLPGEKKNGLFGNLIALSLGLTPNFKSNFDLAEDAKLQLSKDTYDDDLDNLLAQIGDQYADLFLAAKNLSDAILLSDILRVNTEITKAPLSASMIKRYDEHHQDLTLLKALVRQQLPEKYKEIFFDQSKNGYAGYIDGGASQEEFYKFIKPILEKMDGTEELLVKLNREDLLRKQRTFDNGSIPHQIHLGELHAILRRQEDFYPFLKDNREKIEKILTFRIPYYVGPLARGNSRFAWMTRKSEETITPWNFEEVVDKGASAQSFIERMTNFDKNLPNEKVLPKHSLLYEYFTVYNELTKVKYVTEGMRKPAFLSGEQKKAIVDLLFKTNRKVTVKQLKEDYFKKIECFDSVEISGVEDRFNASLGTYHDLLKIIKDKDFLDNEENEDILEDIVLTLTLFEDREMIEERLKTYAHLFDDKVMKQLKRRRYTGWGRLSRKLINGIRDKQSGKTILDFLKSDGFANRNFMQLIHDDSLTFKEDIQKAQVSGQGDSLHEHIANLAGSPAIKKGILQTVKVVDELVKVMGRHKPENIVIEMARENQTTQKGQKNSRERMKRIEEGIKELGSQILKEHPVENTQLQNEKLYLYYLQNGRDMYVDQELDINRLSDYDVDHIVPQSFLKDDSIDNKVLTRSDKARGKSDNVPSEEVVKKMKNYWRQLLNAKLITQRKFDNLTKAERGGLSELDKAGFIKRQLVETRQITKHVAQILDSRMNTKYDENDKLIREVKVITLKSKLVSDFRKDFQFYKVREINNYHHAHDAYLNAVVGTALIKKYPKLESEFVYGDYKVYDVRKMIAKSEQEIGKATAKYFFYSNIMNFFKTEITLANGEIRKRPLIETNGETGEIVWDKGRDFATVRKVLSMPQVNIVKKTEVQTGGFSKESILPKRNSDKLIARKKDWDPKKYGGFDSPTVAYSVLVVAKVEKGKSKKLKSVKELLGITIMERSSFEKNPIDFLEAKGYKEVKKDLIIKLPKYSLFELENGRKRMLASAGELQKGNELALPSKYVNFLYLASHYEKLKGSPEDNEQKQLFVEQHKHYLDEIIEQISEFSKRVILADANLDKVLSAYNKHRDKPIREQAENIIHLFTLTNLGAPAAFKYFDTTIDRKRYTSTKEVLDATLIHQSITGLYETRIDLSQLGGDGGGSSGGTLNIEDEYRLHETSKEPDVSLGSTWLSDFPQAWAETGGMGLAVRQAPLIIPLKATSTPVSIKQYPMSQEARLGIKPHIQRLLDQGILVPCQSPWNTPLLPVKKPGTNDYRPVQDLREVNKRVEDIHPTVPNPYNLLSGLPPSHQWYTVLDLKDAFFCLRLHPTSQPLFAFEWRDPEMGISGQLTWTRLPQGFKNSPTLFNEALHRDLADFRIQHPDLILLQYVDDLLLAATSELDCQQGTRALLQTLGNLGYRASAKKAQICQKQVKYLGYLLKEGQRWLTEARKETVMGQPTPKTPRQLREFLGKAGFCRLFIPGFAEMAAPLYPLTKPGTLFNWGPDQQKAYQEIKQALLTAPALGLPDLTKPFELFVDEKQGYAKGVLTQKLGPWRRPVAYLSKKLDPVAAGWPPCLRMVAAIAVLTKDAGKLTMGQPLVILAPHAVEALVKQPPDRWLSNARMTHYQALLLDTDRVQFGPVVALNPATLLPLPEEGLQHNCLDILAEAHGTRPDLTDQPLPDADHTWYTDGSSLLQEGQRKAGAAVTTETEVIWAKALPAGTSAQRAELIALTQALKMAEGKKLNVYTDSRYAFATAHIHGEIYRRRGWLTSEGKEIKNKDEILALLKALFLPKRLSIIHCPGHQKGHSAEARGNRMADQAARKAAITETPDTSTLLIENSSPSGGSKRTADGSEFEAGKRTADGSEFEKRTADGSEFESPKKKAKVE

SEQ ID NO: 2656 - protein, 2114 aa, synthetic construct
MPAAKRVKLDGGDKKYSIGLDIGTNSVGWAVITDEYKVPSKKFKVLGNTDRHSIKKNLIGALLFDSGETAEATRLKRTARRRYTRRKNRICYLQEIFSNEMAKVDDSFFHRLEESFLVEEDKKHERHPIFGNIVDEVAYHEKYPTIYHLRKKLVDSTDKADLRLIYLALAHMIKFRGHFLIEGDLNPDNSDVDKLFIQLVQTYNQLFEENPINASGVDAKAILSARLSKSRRLENLIAQLPGEKKNGLFGNLIALSLGLTPNFKSNFDLAEDAKLQLSKDTYDDDLDNLLAQIGDQYADLFLAAKNLSDAILLSDILRVNTEITKAPLSASMIKRYDEHHQDLTLLKALVRQQLPEKYKEIFFDQSKNGYAGYIDGGASQEEFYKFIKPILEKMDGTEELLVKLNREDLLRKQRTFDNGSIPHQIHLGELHAILRRQEDFYPFLKDNREKIEKILTFRIPYYVGPLARGNSRFAWMTRKSEETITPWNFEEVVDKGASAQSFIERMTNFDKNLPNEKVLPKHSLLYEYFTVYNELTKVKYVTEGMRKPAFLSGEQKKAIVDLLFKTNRKVTVKQLKEDYFKKIECFDSVEISGVEDRFNASLGTYHDLLKIIKDKDFLDNEENEDILEDIVLTLTLFEDREMIEERLKTYAHLFDDKVMKQLKRRRYTGWGRLSRKLINGIRDKQSGKTILDFLKSDGFANRNFMQLIHDDSLTFKEDIQKAQVSGQGDSLHEHIANLAGSPAIKKGILQTVKVVDELVKVMGRHKPENIVIEMARENQTTQKGQKNSRERMKRIEEGIKELGSQILKEHPVENTQLQNEKLYLYYLQNGRDMYVDQELDINRLSDYDVDHIVPQSFLKDDSIDNKVLTRSDKARGKSDNVPSEEVVKKMKNYWRQLLNAKLITQRKFDNLTKAERGGLSELDKAGFIKRQLVETRQITKHVAQILDSRMNTKYDENDKLIREVKVITLKSKLVSDFRKDFQFYKVREINNYHHAHDAYLNAVVGTALIKKYPKLESEFVYGDYKVYDVRKMIAKSEQEIGKATAKYFFYSNIMNFFKTEITLANGEIRKRPLIETNGETGEIVWDKGRDFATVRKVLSMPQVNIVKKTEVQTGGFSKESILPKRNSDKLIARKKDWDPKKYGGFDSPTVAYSVLVVAKVEKGKSKKLKSVKELLGITIMERSSFEKNPIDFLEAKGYKEVKKDLIIKLPKYSLFELENGRKRMLASAGELQKGNELALPSKYVNFLYLASHYEKLKGSPEDNEQKQLFVEQHKHYLDEIIEQISEFSKRVILADANLDKVLSAYNKHRDKPIREQAENIIHLFTLTNLGAPAAFKYFDTTIDRKRYTSTKEVLDATLIHQSITGLYETRIDLSQLGGDGGPAPAPAPAPGGTLNIEDEYRLHETSKEPDVSLGSTWLSDFPQAWAETGGMGLAVRQAPLIIPLKATSTPVSIKQYPMSQEARLGIKPHIQRLLDQGILVPCQSPWNTPLLPVKKPGTNDYRPVQDLREVNKRVEDIHPTVPNPYNLLSGLPPSHQWYTVLDLKDAFFCLRLHPTSQPLFAFEWRDPEMGISGQLTWTRLPQGFKNSPTLFNEALHRDLADFRIQHPDLILLQYVDDLLLAATSELDCQQGTRALLQTLGNLGYRASAKKAQICQKQVKYLGYLLKEGQRWLTEARKETVMGQPTPKTPRQLREFLGKAGFCRLFIPGFAEMAAPLYPLTKPGTLFNWGPDQQKAYQEIKQALLTAPALGLPDLTKPFELFVDEKQGYAKGVLTQKLGPWRRPVAYLSKKLDPVAAGWPPCLRMVAAIAVLTKDAGKLTMGQPLVILAPHAVEALVKQPPDRWLSNARMTHYQALLLDTDRVQFGPVVALNPATLLPLPEEGLQHNCLDILAEAHGTRPDLTDQPLPDADHTWYTDGSSLLQEGQRKAGAAVTTETEVIWAKALPAGTSAQRAELIALTQALKMAEGKKLNVYTDSRYAFATAHIHGEIYRRRGWLTSEGKEIKNKDEILALLKALFLPKRLSIIHCPGHQKGHSAEARGNRMADQAARKAAITETPDTSTLLIENSSPSGGSKRTADGSEFEAGKRTADGSEFEKRTADGSEFESPKKKAKVE

SEQ ID NO: 2657 - protein, 2113 aa, synthetic construct
MPAAKRVKLDGGDKKYSIGLDIGTNSVGWAVITDEYKVPSKKFKVLGNTDRHSIKKNLIGALLFDSGETAEATRLKRTARRRYTRRKNRICYLQEIFSNEMAKVDDSFFHRLEESFLVEEDKKHERHPIFGNIVDEVAYHEKYPTIYHLRKKLVDSTDKADLRLIYLALAHMIKFRGHFLIEGDLNPDNSDVDKLFIQLVQTYNQLFEENPINASGVDAKAILSARLSKSRRLENLIAQLPGEKKNGLFGNLIALSLGLTPNFKSNFDLAEDAKLQLSKDTYDDDLDNLLAQIGDQYADLFLAAKNLSDAILLSDILRVNTEITKAPLSASMIKRYDEHHQDLTLLKALVRQQLPEKYKEIFFDQSKNGYAGYIDGGASQEEFYKFIKPILEKMDGTEELLVKLNREDLLRKQRTFDNGSIPHQIHLGELHAILRRQEDFYPFLKDNREKIEKILTFRIPYYVGPLARGNSRFAWMTRKSEETITPWNFEEVVDKGASAQSFIERMTNFDKNLPNEKVLPKHSLLYEYFTVYNELTKVKYVTEGMRKPAFLSGEQKKAIVDLLFKTNRKVTVKQLKEDYFKKIECFDSVEISGVEDRFNASLGTYHDLLKIIKDKDFLDNEENEDILEDIVLTLTLFEDREMIEERLKTYAHLFDDKVMKQLKRRRYTGWGRLSRKLINGIRDKQSGKTILDFLKSDGFANRNFMQLIHDDSLTFKEDIQKAQVSGQGDSLHEHIANLAGSPAIKKGILQTVKVVDELVKVMGRHKPENIVIEMARENQTTQKGQKNSRERMKRIEEGIKELGSQILKEHPVENTQLQNEKLYLYYLQNGRDMYVDQELDINRLSDYDVDHIVPQSFLKDDSIDNKVLTRSDKARGKSDNVPSEEVVKKMKNYWRQLLNAKLITQRKFDNLTKAERGGLSELDKAGFIKRQLVETRQITKHVAQILDSRMNTKYDENDKLIREVKVITLKSKLVSDFRKDFQFYKVREINNYHHAHDAYLNAVVGTALIKKYPKLESEFVYGDYKVYDVRKMIAKSEQEIGKATAKYFFYSNIMNFFKTEITLANGEIRKRPLIETNGETGEIVWDKGRDFATVRKVLSMPQVNIVKKTEVQTGGFSKESILPKRNSDKLIARKKDWDPKKYGGFDSPTVAYSVLVVAKVEKGKSKKLKSVKELLGITIMERSSFEKNPIDFLEAKGYKEVKKDLIIKLPKYSLFELENGRKRMLASAGELQKGNELALPSKYVNFLYLASHYEKLKGSPEDNEQKQLFVEQHKHYLDEIIEQISEFSKRVILADANLDKVLSAYNKHRDKPIREQAENIIHLFTLTNLGAPAAFKYFDTTIDRKRYTSTKEVLDATLIHQSITGLYETRIDLSQLGGDGGEAAAKGGSGGTLNIEDEYRLHETSKEPDVSLGSTWLSDFPQAWAETGGMGLAVRQAPLIIPLKATSTPVSIKQYPMSQEARLGIKPHIQRLLDQGILVPCQSPWNTPLLPVKKPGTNDYRPVQDLREVNKRVEDIHPTVPNPYNLLSGLPPSHQWYTVLDLKDAFFCLRLHPTSQPLFAFEWRDPEMGISGQLTWTRLPQGFKNSPTLFNEALHRDLADFRIQHPDLILLQYVDDLLLAATSELDCQQGTRALLQTLGNLGYRASAKKAQICQKQVKYLGYLLKEGQRWLTEARKETVMGQPTPKTPRQLREFLGKAGFCRLFIPGFAEMAAPLYPLTKPGTLFNWGPDQQKAYQEIKQALLTAPALGLPDLTKPFELFVDEKQGYAKGVLTQKLGPWRRPVAYLSKKLDPVAAGWPPCLRMVAAIAVLTKDAGKLTMGQPLVILAPHAVEALVKQPPDRWLSNARMTHYQALLLDTDRVQFGPVVALNPATLLPLPEEGLQHNCLDILAEAHGTRPDLTDQPLPDADHTWYTDGSSLLQEGQRKAGAAVTTETEVIWAKALPAGTSAQRAELIALTQALKMAEGKKLNVYTDSRYAFATAHIHGEIYRRRGWLTSEGKEIKNKDEILALLKALFLPKRLSIIHCPGHQKGHSAEARGNRMADQAARKAAITETPDTSTLLIENSSPSGGSKRTADGSEFEAGKRTADGSEFEKRTADGSEFESPKKKAKVE

SEQ ID NO: 2658 - protein, 2116 aa, synthetic construct
MPAAKRVKLDGGDKKYSIGLDIGTNSVGWAVITDEYKVPSKKFKVLGNTDRHSIKKNLIGALLFDSGETAEATRLKRTARRRYTRRKNRICYLQEIFSNEMAKVDDSFFHRLEESFLVEEDKKHERHPIFGNIVDEVAYHEKYPTIYHLRKKLVDSTDKADLRLIYLALAHMIKFRGHFLIEGDLNPDNSDVDKLFIQLVQTYNQLFEENPINASGVDAKAILSARLSKSRRLENLIAQLPGEKKNGLFGNLIALSLGLTPNFKSNFDLAEDAKLQLSKDTYDDDLDNLLAQIGDQYADLFLAAKNLSDAILLSDILRVNTEITKAPLSASMIKRYDEHHQDLTLLKALVRQQLPEKYKEIFFDQSKNGYAGYIDGGASQEEFYKFIKPILEKMDGTEELLVKLNREDLLRKQRTFDNGSIPHQIHLGELHAILRRQEDFYPFLKDNREKIEKILTFRIPYYVGPLARGNSRFAWMTRKSEETITPWNFEEVVDKGASAQSFIERMTNFDKNLPNEKVLPKHSLLYEYFTVYNELTKVKYVTEGMRKPAFLSGEQKKAIVDLLFKTNRKVTVKQLKEDYFKKIECFDSVEISGVEDRFNASLGTYHDLLKIIKDKDFLDNEENEDILEDIVLTLTLFEDREMIEERLKTYAHLFDDKVMKQLKRRRYTGWGRLSRKLINGIRDKQSGKTILDFLKSDGFANRNFMQLIHDDSLTFKEDIQKAQVSGQGDSLHEHIANLAGSPAIKKGILQTVKVVDELVKVMGRHKPENIVIEMARENQTTQKGQKNSRERMKRIEEGIKELGSQILKEHPVENTQLQNEKLYLYYLQNGRDMYVDQELDINRLSDYDVDHIVPQSFLKDDSIDNKVLTRSDKARGKSDNVPSEEVVKKMKNYWRQLLNAKLITQRKFDNLTKAERGGLSELDKAGFIKRQLVETRQITKHVAQILDSRMNTKYDENDKLIREVKVITLKSKLVSDFRKDFQFYKVREINNYHHAHDAYLNAVVGTALIKKYPKLESEFVYGDYKVYDVRKMIAKSEQEIGKATAKYFFYSNIMNFFKTEITLANGEIRKRPLIETNGETGEIVWDKGRDFATVRKVLSMPQVNIVKKTEVQTGGFSKESILPKRNSDKLIARKKDWDPKKYGGFDSPTVAYSVLVVAKVEKGKSKKLKSVKELLGITIMERSSFEKNPIDFLEAKGYKEVKKDLIIKLPKYSLFELENGRKRMLASAGELQKGNELALPSKYVNFLYLASHYEKLKGSPEDNEQKQLFVEQHKHYLDEIIEQISEFSKRVILADANLDKVLSAYNKHRDKPIREQAENIIHLFTLTNLGAPAAFKYFDTTIDRKRYTSTKEVLDATLIHQSITGLYETRIDLSQLGGDGGEAAAKGSSPAPGGTLNIEDEYRLHETSKEPDVSLGSTWLSDFPQAWAETGGMGLAVRQAPLIIPLKATSTPVSIKQYPMSQEARLGIKPHIQRLLDQGILVPCQSPWNTPLLPVKKPGTNDYRPVQDLREVNKRVEDIHPTVPNPYNLLSGLPPSHQWYTVLDLKDAFFCLRLHPTSQPLFAFEWRDPEMGISGQLTWTRLPQGFKNSPTLFNEALHRDLADFRIQHPDLILLQYVDDLLLAATSELDCQQGTRALLQTLGNLGYRASAKKAQICQKQVKYLGYLLKEGQRWLTEARKETVMGQPTPKTPRQLREFLGKAGFCRLFIPGFAEMAAPLYPLTKPGTLFNWGPDQQKAYQEIKQALLTAPALGLPDLTKPFELFVDEKQGYAKGVLTQKLGPWRRPVAYLSKKLDPVAAGWPPCLRMVAAIAVLTKDAGKLTMGQPLVILAPHAVEALVKQPPDRWLSNARMTHYQALLLDTDRVQFGPVVALNPATLLPLPEEGLQHNCLDILAEAHGTRPDLTDQPLPDADHTWYTDGSSLLQEGQRKAGAAVTTETEVIWAKALPAGTSAQRAELIALTQALKMAEGKKLNVYTDSRYAFATAHIHGEIYRRRGWLTSEGKEIKNKDEILALLKALFLPKRLSIIHCPGHQKGHSAEARGNRMADQAARKAAITETPDTSTLLIENSSPSGGSKRTADGSEFEAGKRTADGSEFEKRTADGSEFESPKKKAKVE

SEQ ID NO: 2659 - protein, 2113 aa, synthetic construct
MPAAKRVKLDGGDKKYSIGLDIGTNSVGWAVITDEYKVPSKKFKVLGNTDRHSIKKNLIGALLFDSGETAEATRLKRTARRRYTRRKNRICYLQEIFSNEMAKVDDSFFHRLEESFLVEEDKKHERHPIFGNIVDEVAYHEKYPTIYHLRKKLVDSTDKADLRLIYLALAHMIKFRGHFLIEGDLNPDNSDVDKLFIQLVQTYNQLFEENPINASGVDAKAILSARLSKSRRLENLIAQLPGEKKNGLFGNLIALSLGLTPNFKSNFDLAEDAKLQLSKDTYDDDLDNLLAQIGDQYADLFLAAKNLSDAILLSDILRVNTEITKAPLSASMIKRYDEHHQDLTLLKALVRQQLPEKYKEIFFDQSKNGYAGYIDGGASQEEFYKFIKPILEKMDGTEELLVKLNREDLLRKQRTFDNGSIPHQIHLGELHAILRRQEDFYPFLKDNREKIEKILTFRIPYYVGPLARGNSRFAWMTRKSEETITPWNFEEVVDKGASAQSFIERMTNFDKNLPNEKVLPKHSLLYEYFTVYNELTKVKYVTEGMRKPAFLSGEQKKAIVDLLFKTNRKVTVKQLKEDYFKKIECFDSVEISGVEDRFNASLGTYHDLLKIIKDKDFLDNEENEDILEDIVLTLTLFEDREMIEERLKTYAHLFDDKVMKQLKRRRYTGWGRLSRKLINGIRDKQSGKTILDFLKSDGFANRNFMQLIHDDSLTFKEDIQKAQVSGQGDSLHEHIANLAGSPAIKKGILQTVKVVDELVKVMGRHKPENIVIEMARENQTTQKGQKNSRERMKRIEEGIKELGSQILKEHPVENTQLQNEKLYLYYLQNGRDMYVDQELDINRLSDYDVDHIVPQSFLKDDSIDNKVLTRSDKARGKSDNVPSEEVVKKMKNYWRQLLNAKLITQRKFDNLTKAERGGLSELDKAGFIKRQLVETRQITKHVAQILDSRMNTKYDENDKLIREVKVITLKSKLVSDFRKDFQFYKVREINNYHHAHDAYLNAVVGTALIKKYPKLESEFVYGDYKVYDVRKMIAKSEQEIGKATAKYFFYSNIMNFFKTEITLANGEIRKRPLIETNGETGEIVWDKGRDFATVRKVLSMPQVNIVKKTEVQTGGFSKESILPKRNSDKLIARKKDWDPKKYGGFDSPTVAYSVLVVAKVEKGKSKKLKSVKELLGITIMERSSFEKNPIDFLEAKGYKEVKKDLIIKLPKYSLFELENGRKRMLASAGELQKGNELALPSKYVNFLYLASHYEKLKGSPEDNEQKQLFVEQHKHYLDEIIEQISEFSKRVILADANLDKVLSAYNKHRDKPIREQAENIIHLFTLTNLGAPAAFKYFDTTIDRKRYTSTKEVLDATLIHQSITGLYETRIDLSQLGGDGGEAAAKGGGGGTLNIEDEYRLHETSKEPDVSLGSTWLSDFPQAWAETGGMGLAVRQAPLIIPLKATSTPVSIKQYPMSQEARLGIKPHIQRLLDQGILVPCQSPWNTPLLPVKKPGTNDYRPVQDLREVNKRVEDIHPTVPNPYNLLSGLPPSHQWYTVLDLKDAFFCLRLHPTSQPLFAFEWRDPEMGISGQLTWTRLPQGFKNSPTLFNEALHRDLADFRIQHPDLILLQYVDDLLLAATSELDCQQGTRALLQTLGNLGYRASAKKAQICQKQVKYLGYLLKEGQRWLTEARKETVMGQPTPKTPRQLREFLGKAGFCRLFIPGFAEMAAPLYPLTKPGTLFNWGPDQQKAYQEIKQALLTAPALGLPDLTKPFELFVDEKQGYAKGVLTQKLGPWRRPVAYLSKKLDPVAAGWPPCLRMVAAIAVLTKDAGKLTMGQPLVILAPHAVEALVKQPPDRWLSNARMTHYQALLLDTDRVQFGPVVALNPATLLPLPEEGLQHNCLDILAEAHGTRPDLTDQPLPDADHTWYTDGSSLLQEGQRKAGAAVTTETEVIWAKALPAGTSAQRAELIALTQALKMAEGKKLNVYTDSRYAFATAHIHGEIYRRRGWLTSEGKEIKNKDEILALLKALFLPKRLSIIHCPGHQKGHSAEARGNRMADQAARKAAITETPDTSTLLIENSSPSGGSKRTADGSEFEAGKRTADGSEFEKRTADGSEFESPKKKAKVE

SEQ ID NO: 2660 - protein, 2116 aa, synthetic construct
MPAAKRVKLDGGDKKYSIGLDIGTNSVGWAVITDEYKVPSKKFKVLGNTDRHSIKKNLIGALLFDSGETAEATRLKRTARRRYTRRKNRICYLQEIFSNEMAKVDDSFFHRLEESFLVEEDKKHERHPIFGNIVDEVAYHEKYPTIYHLRKKLVDSTDKADLRLIYLALAHMIKFRGHFLIEGDLNPDNSDVDKLFIQLVQTYNQLFEENPINASGVDAKAILSARLSKSRRLENLIAQLPGEKKNGLFGNLIALSLGLTPNFKSNFDLAEDAKLQLSKDTYDDDLDNLLAQIGDQYADLFLAAKNLSDAILLSDILRVNTEITKAPLSASMIKRYDEHHQDLTLLKALVRQQLPEKYKEIFFDQSKNGYAGYIDGGASQEEFYKFIKPILEKMDGTEELLVKLNREDLLRKQRTFDNGSIPHQIHLGELHAILRRQEDFYPFLKDNREKIEKILTFRIPYYVGPLARGNSRFAWMTRKSEETITPWNFEEVVDKGASAQSFIERMTNFDKNLPNEKVLPKHSLLYEYFTVYNELTKVKYVTEGMRKPAFLSGEQKKAIVDLLFKTNRKVTVKQLKEDYFKKIECFDSVEISGVEDRFNASLGTYHDLLKIIKDKDFLDNEENEDILEDIVLTLTLFEDREMIEERLKTYAHLFDDKVMKQLKRRRYTGWGRLSRKLINGIRDKQSGKTILDFLKSDGFANRNFMQLIHDDSLTFKEDIQKAQVSGQGDSLHEHIANLAGSPAIKKGILQTVKVVDELVKVMGRHKPENIVIEMARENQTTQKGQKNSRERMKRIEEGIKELGSQILKEHPVENTQLQNEKLYLYYLQNGRDMYVDQELDINRLSDYDVDHIVPQSFLKDDSIDNKVLTRSDKARGKSDNVPSEEVVKKMKNYWRQLLNAKLITQRKFDNLTKAERGGLSELDKAGFIKRQLVETRQITKHVAQILDSRMNTKYDENDKLIREVKVITLKSKLVSDFRKDFQFYKVREINNYHHAHDAYLNAVVGTALIKKYPKLESEFVYGDYKVYDVRKMIAKSEQEIGKATAKYFFYSNIMNFFKTEITLANGEIRKRPLIETNGETGEIVWDKGRDFATVRKVLSMPQVNIVKKTEVQTGGFSKESILPKRNSDKLIARKKDWDPKKYGGFDSPTVAYSVLVVAKVEKGKSKKLKSVKELLGITIMERSSFEKNPIDFLEAKGYKEVKKDLIIKLPKYSLFELENGRKRMLASAGELQKGNELALPSKYVNFLYLASHYEKLKGSPEDNEQKQLFVEQHKHYLDEIIEQISEFSKRVILADANLDKVLSAYNKHRDKPIREQAENIIHLFTLTNLGAPAAFKYFDTTIDRKRYTSTKEVLDATLIHQSITGLYETRIDLSQLGGDGGGGSGSSEAAAKGGTLNIEDEYRLHETSKEPDVSLGSTWLSDFPQAWAETGGMGLAVRQAPLIIPLKATSTPVSIKQYPMSQEARLGIKPHIQRLLDQGILVPCQSPWNTPLLPVKKPGTNDYRPVQDLREVNKRVEDIHPTVPNPYNLLSGLPPSHQWYTVLDLKDAFFCLRLHPTSQPLFAFEWRDPEMGISGQLTWTRLPQGFKNSPTLFNEALHRDLADFRIQHPDLILLQYVDDLLLAATSELDCQQGTRALLQTLGNLGYRASAKKAQICQKQVKYLGYLLKEGQRWLTEARKETVMGQPTPKTPRQLREFLGKAGFCRLFIPGFAEMAAPLYPLTKPGTLFNWGPDQQKAYQEIKQALLTAPALGLPDLTKPFELFVDEKQGYAKGVLTQKLGPWRRPVAYLSKKLDPVAAGWPPCLRMVAAIAVLTKDAGKLTMGQPLVILAPHAVEALVKQPPDRWLSNARMTHYQALLLDTDRVQFGPVVALNPATLLPLPEEGLQHNCLDILAEAHGTRPDLTDQPLPDADHTWYTDGSSLLQEGQRKAGAAVTTETEVIWAKALPAGTSAQRAELIALTQALKMAEGKKLNVYTDSRYAFATAHIHGEIYRRRGWLTSEGKEIKNKDEILALLKALFLPKRLSIIHCPGHQKGHSAEARGNRMADQAARKAAITETPDTSTLLIENSSPSGGSKRTADGSEFEAGKRTADGSEFEKRTADGSEFESPKKKAKVE

SEQ ID NO: 2661 - protein, 2116 aa, synthetic construct
MPAAKRVKLDGGDKKYSIGLDIGTNSVGWAVITDEYKVPSKKFKVLGNTDRHSIKKNLIGALLFDSGETAEATRLKRTARRRYTRRKNRICYLQEIFSNEMAKVDDSFFHRLEESFLVEEDKKHERHPIFGNIVDEVAYHEKYPTIYHLRKKLVDSTDKADLRLIYLALAHMIKFRGHFLIEGDLNPDNSDVDKLFIQLVQTYNQLFEENPINASGVDAKAILSARLSKSRRLENLIAQLPGEKKNGLFGNLIALSLGLTPNFKSNFDLAEDAKLQLSKDTYDDDLDNLLAQIGDQYADLFLAAKNLSDAILLSDILRVNTEITKAPLSASMIKRYDEHHQDLTLLKALVRQQLPEKYKEIFFDQSKNGYAGYIDGGASQEEFYKFIKPILEKMDGTEELLVKLNREDLLRKQRTFDNGSIPHQIHLGELHAILRRQEDFYPFLKDNREKIEKILTFRIPYYVGPLARGNSRFAWMTRKSEETITPWNFEEVVDKGASAQSFIERMTNFDKNLPNEKVLPKHSLLYEYFTVYNELTKVKYVTEGMRKPAFLSGEQKKAIVDLLFKTNRKVTVKQLKEDYFKKIECFDSVEISGVEDRFNASLGTYHDLLKIIKDKDFLDNEENEDILEDIVLTLTLFEDREMIEERLKTYAHLFDDKVMKQLKRRRYTGWGRLSRKLINGIRDKQSGKTILDFLKSDGFANRNFMQLIHDDSLTFKEDIQKAQVSGQGDSLHEHIANLAGSPAIKKGILQTVKVVDELVKVMGRHKPENIVIEMARENQTTQKGQKNSRERMKRIEEGIKELGSQILKEHPVENTQLQNEKLYLYYLQNGRDMYVDQELDINRLSDYDVDHIVPQSFLKDDSIDNKVLTRSDKARGKSDNVPSEEVVKKMKNYWRQLLNAKLITQRKFDNLTKAERGGLSELDKAGFIKRQLVETRQITKHVAQILDSRMNTKYDENDKLIREVKVITLKSKLVSDFRKDFQFYKVREINNYHHAHDAYLNAVVGTALIKKYPKLESEFVYGDYKVYDVRKMIAKSEQEIGKATAKYFFYSNIMNFFKTEITLANGEIRKRPLIETNGETGEIVWDKGRDFATVRKVLSMPQVNIVKKTEVQTGGFSKESILPKRNSDKLIARKKDWDPKKYGGFDSPTVAYSVLVVAKVEKGKSKKLKSVKELLGITIMERSSFEKNPIDFLEAKGYKEVKKDLIIKLPKYSLFELENGRKRMLASAGELQKGNELALPSKYVNFLYLASHYEKLKGSPEDNEQKQLFVEQHKHYLDEIIEQISEFSKRVILADANLDKVLSAYNKHRDKPIREQAENIIHLFTLTNLGAPAAFKYFDTTIDRKRYTSTKEVLDATLIHQSITGLYETRIDLSQLGGDGGGSSGGSEAAAKGGTLNIEDEYRLHETSKEPDVSLGSTWLSDFPQAWAETGGMGLAVRQAPLIIPLKATSTPVSIKQYPMSQEARLGIKPHIQRLLDQGILVPCQSPWNTPLLPVKKPGTNDYRPVQDLREVNKRVEDIHPTVPNPYNLLSGLPPSHQWYTVLDLKDAFFCLRLHPTSQPLFAFEWRDPEMGISGQLTWTRLPQGFKNSPTLFNEALHRDLADFRIQHPDLILLQYVDDLLLAATSELDCQQGTRALLQTLGNLGYRASAKKAQICQKQVKYLGYLLKEGQRWLTEARKETVMGQPTPKTPRQLREFLGKAGFCRLFIPGFAEMAAPLYPLTKPGTLFNWGPDQQKAYQEIKQALLTAPALGLPDLTKPFELFVDEKQGYAKGVLTQKLGPWRRPVAYLSKKLDPVAAGWPPCLRMVAAIAVLTKDAGKLTMGQPLVILAPHAVEALVKQPPDRWLSNARMTHYQALLLDTDRVQFGPVVALNPATLLPLPEEGLQHNCLDILAEAHGTRPDLTDQPLPDADHTWYTDGSSLLQEGQRKAGAAVTTETEVIWAKALPAGTSAQRAELIALTQALKMAEGKKLNVYTDSRYAFATAHIHGEIYRRRGWLTSEGKEIKNKDEILALLKALFLPKRLSIIHCPGHQKGHSAEARGNRMADQAARKAAITETPDTSTLLIENSSPSGGSKRTADGSEFEAGKRTADGSEFEKRTADGSEFESPKKKAKVE

SEQ ID NO: 2662 - protein, 2120 aa, synthetic construct
MPAAKRVKLDGGDKKYSIGLDIGTNSVGWAVITDEYKVPSKKFKVLGNTDRHSIKKNLIGALLFDSGETAEATRLKRTARRRYTRRKNRICYLQEIFSNEMAKVDDSFFHRLEESFLVEEDKKHERHPIFGNIVDEVAYHEKYPTIYHLRKKLVDSTDKADLRLIYLALAHMIKFRGHFLIEGDLNPDNSDVDKLFIQLVQTYNQLFEENPINASGVDAKAILSARLSKSRRLENLIAQLPGEKKNGLFGNLIALSLGLTPNFKSNFDLAEDAKLQLSKDTYDDDLDNLLAQIGDQYADLFLAAKNLSDAILLSDILRVNTEITKAPLSASMIKRYDEHHQDLTLLKALVRQQLPEKYKEIFFDQSKNGYAGYIDGGASQEEFYKFIKPILEKMDGTEELLVKLNREDLLRKQRTFDNGSIPHQIHLGELHAILRRQEDFYPFLKDNREKIEKILTFRIPYYVGPLARGNSRFAWMTRKSEETITPWNFEEVVDKGASAQSFIERMTNFDKNLPNEKVLPKHSLLYEYFTVYNELTKVKYVTEGMRKPAFLSGEQKKAIVDLLFKTNRKVTVKQLKEDYFKKIECFDSVEISGVEDRFNASLGTYHDLLKIIKDKDFLDNEENEDILEDIVLTLTLFEDREMIEERLKTYAHLFDDKVMKQLKRRRYTGWGRLSRKLINGIRDKQSGKTILDFLKSDGFANRNFMQLIHDDSLTFKEDIQKAQVSGQGDSLHEHIANLAGSPAIKKGILQTVKVVDELVKVMGRHKPENIVIEMARENQTTQKGQKNSRERMKRIEEGIKELGSQILKEHPVENTQLQNEKLYLYYLQNGRDMYVDQELDINRLSDYDVDHIVPQSFLKDDSIDNKVLTRSDKARGKSDNVPSEEVVKKMKNYWRQLLNAKLITQRKFDNLTKAERGGLSELDKAGFIKRQLVETRQITKHVAQILDSRMNTKYDENDKLIREVKVITLKSKLVSDFRKDFQFYKVREINNYHHAHDAYLNAVVGTALIKKYPKLESEFVYGDYKVYDVRKMIAKSEQEIGKATAKYFFYSNIMNFFKTEITLANGEIRKRPLIETNGETGEIVWDKGRDFATVRKVLSMPQVNIVKKTEVQTGGFSKESILPKRNSDKLIARKKDWDPKKYGGFDSPTVAYSVLVVAKVEKGKSKKLKSVKELLGITIMERSSFEKNPIDFLEAKGYKEVKKDLIIKLPKYSLFELENGRKRMLASAGELQKGNELALPSKYVNFLYLASHYEKLKGSPEDNEQKQLFVEQHKHYLDEIIEQISEFSKRVILADANLDKVLSAYNKHRDKPIREQAENIIHLFTLTNLGAPAAFKYFDTTIDRKRYTSTKEVLDATLIHQSITGLYETRIDLSQLGGDGGGGGGSGGGGSGGGGSGGTLNIEDEYRLHETSKEPDVSLGSTWLSDFPQAWAETGGMGLAVRQAPLIIPLKATSTPVSIKQYPMSQEARLGIKPHIQRLLDQGILVPCQSPWNTPLLPVKKPGTNDYRPVQDLREVNKRVEDIHPTVPNPYNLLSGLPPSHQWYTVLDLKDAFFCLRLHPTSQPLFAFEWRDPEMGISGQLTWTRLPQGFKNSPTLFNEALHRDLADFRIQHPDLILLQYVDDLLLAATSELDCQQGTRALLQTLGNLGYRASAKKAQICQKQVKYLGYLLKEGQRWLTEARKETVMGQPTPKTPRQLREFLGKAGFCRLFIPGFAEMAAPLYPLTKPGTLFNWGPDQQKAYQEIKQALLTAPALGLPDLTKPFELFVDEKQGYAKGVLTQKLGPWRRPVAYLSKKLDPVAAGWPPCLRMVAAIAVLTKDAGKLTMGQPLVILAPHAVEALVKQPPDRWLSNARMTHYQALLLDTDRVQFGPVVALNPATLLPLPEEGLQHNCLDILAEAHGTRPDLTDQPLPDADHTWYTDGSSLLQEGQRKAGAAVTTETEVIWAKALPAGTSAQRAELIALTQALKMAEGKKLNVYTDSRYAFATAHIHGEIYRRRGWLTSEGKEIKNKDEILALLKALFLPKRLSIIHCPGHQKGHSAEARGNRMADQAARKAAITETPDTSTLLIENSSPSGGSKRTADGSEFEAGKRTADGSEFEKRTADGSEFESPKKKAKVE

SEQ ID NO: 2663 - protein, 2121 aa, synthetic construct
MPAAKRVKLDGGDKKYSIGLDIGTNSVGWAVITDEYKVPSKKFKVLGNTDRHSIKKNLIGALLFDSGETAEATRLKRTARRRYTRRKNRICYLQEIFSNEMAKVDDSFFHRLEESFLVEEDKKHERHPIFGNIVDEVAYHEKYPTIYHLRKKLVDSTDKADLRLIYLALAHMIKFRGHFLIEGDLNPDNSDVDKLFIQLVQTYNQLFEENPINASGVDAKAILSARLSKSRRLENLIAQLPGEKKNGLFGNLIALSLGLTPNFKSNFDLAEDAKLQLSKDTYDDDLDNLLAQIGDQYADLFLAAKNLSDAILLSDILRVNTEITKAPLSASMIKRYDEHHQDLTLLKALVRQQLPEKYKEIFFDQSKNGYAGYIDGGASQEEFYKFIKPILEKMDGTEELLVKLNREDLLRKQRTFDNGSIPHQIHLGELHAILRRQEDFYPFLKDNREKIEKILTFRIPYYVGPLARGNSRFAWMTRKSEETITPWNFEEVVDKGASAQSFIERMTNFDKNLPNEKVLPKHSLLYEYFTVYNELTKVKYVTEGMRKPAFLSGEQKKAIVDLLFKTNRKVTVKQLKEDYFKKIECFDSVEISGVEDRFNASLGTYHDLLKIIKDKDFLDNEENEDILEDIVLTLTLFEDREMIEERLKTYAHLFDDKVMKQLKRRRYTGWGRLSRKLINGIRDKQSGKTILDFLKSDGFANRNFMQLIHDDSLTFKEDIQKAQVSGQGDSLHEHIANLAGSPAIKKGILQTVKVVDELVKVMGRHKPENIVIEMARENQTTQKGQKNSRERMKRIEEGIKELGSQILKEHPVENTQLQNEKLYLYYLQNGRDMYVDQELDINRLSDYDVDHIVPQSFLKDDSIDNKVLTRSDKARGKSDNVPSEEVVKKMKNYWRQLLNAKLITQRKFDNLTKAERGGLSELDKAGFIKRQLVETRQITKHVAQILDSRMNTKYDENDKLIREVKVITLKSKLVSDFRKDFQFYKVREINNYHHAHDAYLNAVVGTALIKKYPKLESEFVYGDYKVYDVRKMIAKSEQEIGKATAKYFFYSNIMNFFKTEITLANGEIRKRPLIETNGETGEIVWDKGRDFATVRKVLSMPQVNIVKKTEVQTGGFSKESILPKRNSDKLIARKKDWDPKKYGGFDSPTVAYSVLVVAKVEKGKSKKLKSVKELLGITIMERSSFEKNPIDFLEAKGYKEVKKDLIIKLPKYSLFELENGRKRMLASAGELQKGNELALPSKYVNFLYLASHYEKLKGSPEDNEQKQLFVEQHKHYLDEIIEQISEFSKRVILADANLDKVLSAYNKHRDKPIREQAENIIHLFTLTNLGAPAAFKYFDTTIDRKRYTSTKEVLDATLIHQSITGLYETRIDLSQLGGDGGSGSETPGTSESATPESGGTLNIEDEYRLHETSKEPDVSLGSTWLSDFPQAWAETGGMGLAVRQAPLIIPLKATSTPVSIKQYPMSQEARLGIKPHIQRLLDQGILVPCQSPWNTPLLPVKKPGTNDYRPVQDLREVNKRVEDIHPTVPNPYNLLSGLPPSHQWYTVLDLKDAFFCLRLHPTSQPLFAFEWRDPEMGISGQLTWTRLPQGFKNSPTLFNEALHRDLADFRIQHPDLILLQYVDDLLLAATSELDCQQGTRALLQTLGNLGYRASAKKAQICQKQVKYLGYLLKEGQRWLTEARKETVMGQPTPKTPRQLREFLGKAGFCRLFIPGFAEMAAPLYPLTKPGTLFNWGPDQQKAYQEIKQALLTAPALGLPDLTKPFELFVDEKQGYAKGVLTQKLGPWRRPVAYLSKKLDPVAAGWPPCLRMVAAIAVLTKDAGKLTMGQPLVILAPHAVEALVKQPPDRWLSNARMTHYQALLLDTDRVQFGPVVALNPATLLPLPEEGLQHNCLDILAEAHGTRPDLTDQPLPDADHTWYTDGSSLLQEGQRKAGAAVTTETEVIWAKALPAGTSAQRAELIALTQALKMAEGKKLNVYTDSRYAFATAHIHGEIYRRRGWLTSEGKEIKNKDEILALLKALFLPKRLSIIHCPGHQKGHSAEARGNRMADQAARKAAITETPDTSTLLIENSSPSGGSKRTADGSEFEAGKRTADGSEFEKRTADGSEFESPKKKAKVE

SEQ ID NO: 2664 - protein, 2114 aa, synthetic construct
MPAAKRVKLDGGDKKYSIGLDIGTNSVGWAVITDEYKVPSKKFKVLGNTDRHSIKKNLIGALLFDSGETAEATRLKRTARRRYTRRKNRICYLQEIFSNEMAKVDDSFFHRLEESFLVEEDKKHERHPIFGNIVDEVAYHEKYPTIYHLRKKLVDSTDKADLRLIYLALAHMIKFRGHFLIEGDLNPDNSDVDKLFIQLVQTYNQLFEENPINASGVDAKAILSARLSKSRRLENLIAQLPGEKKNGLFGNLIALSLGLTPNFKSNFDLAEDAKLQLSKDTYDDDLDNLLAQIGDQYADLFLAAKNLSDAILLSDILRVNTEITKAPLSASMIKRYDEHHQDLTLLKALVRQQLPEKYKEIFFDQSKNGYAGYIDGGASQEEFYKFIKPILEKMDGTEELLVKLNREDLLRKQRTFDNGSIPHQIHLGELHAILRRQEDFYPFLKDNREKIEKILTFRIPYYVGPLARGNSRFAWMTRKSEETITPWNFEEVVDKGASAQSFIERMTNFDKNLPNEKVLPKHSLLYEYFTVYNELTKVKYVTEGMRKPAFLSGEQKKAIVDLLFKTNRKVTVKQLKEDYFKKIECFDSVEISGVEDRFNASLGTYHDLLKIIKDKDFLDNEENEDILEDIVLTLTLFEDREMIEERLKTYAHLFDDKVMKQLKRRRYTGWGRLSRKLINGIRDKQSGKTILDFLKSDGFANRNFMQLIHDDSLTFKEDIQKAQVSGQGDSLHEHIANLAGSPAIKKGILQTVKVVDELVKVMGRHKPENIVIEMARENQTTQKGQKNSRERMKRIEEGIKELGSQILKEHPVENTQLQNEKLYLYYLQNGRDMYVDQELDINRLSDYDVDHIVPQSFLKDDSIDNKVLTRSDKARGKSDNVPSEEVVKKMKNYWRQLLNAKLITQRKFDNLTKAERGGLSELDKAGFIKRQLVETRQITKHVAQILDSRMNTKYDENDKLIREVKVITLKSKLVSDFRKDFQFYKVREINNYHHAHDAYLNAVVGTALIKKYPKLESEFVYGDYKVYDVRKMIAKSEQEIGKATAKYFFYSNIMNFFKTEITLANGEIRKRPLIETNGETGEIVWDKGRDFATVRKVLSMPQVNIVKKTEVQTGGFSKESILPKRNSDKLIARKKDWDPKKYGGFDSPTVAYSVLVVAKVEKGKSKKLKSVKELLGITIMERSSFEKNPIDFLEAKGYKEVKKDLIIKLPKYSLFELENGRKRMLASAGELQKGNELALPSKYVNFLYLASHYEKLKGSPEDNEQKQLFVEQHKHYLDEIIEQISEFSKRVILADANLDKVLSAYNKHRDKPIREQAENIIHLFTLTNLGAPAAFKYFDTTIDRKRYTSTKEVLDATLIHQSITGLYETRIDLSQLGGDGGGGGGSSPAPGGTLNIEDEYRLHETSKEPDVSLGSTWLSDFPQAWAETGGMGLAVRQAPLIIPLKATSTPVSIKQYPMSQEARLGIKPHIQRLLDQGILVPCQSPWNTPLLPVKKPGTNDYRPVQDLREVNKRVEDIHPTVPNPYNLLSGLPPSHQWYTVLDLKDAFFCLRLHPTSQPLFAFEWRDPEMGISGQLTWTRLPQGFKNSPTLFNEALHRDLADFRIQHPDLILLQYVDDLLLAATSELDCQQGTRALLQTLGNLGYRASAKKAQICQKQVKYLGYLLKEGQRWLTEARKETVMGQPTPKTPRQLREFLGKAGFCRLFIPGFAEMAAPLYPLTKPGTLFNWGPDQQKAYQEIKQALLTAPALGLPDLTKPFELFVDEKQGYAKGVLTQKLGPWRRPVAYLSKKLDPVAAGWPPCLRMVAAIAVLTKDAGKLTMGQPLVILAPHAVEALVKQPPDRWLSNARMTHYQALLLDTDRVQFGPVVALNPATLLPLPEEGLQHNCLDILAEAHGTRPDLTDQPLPDADHTWYTDGSSLLQEGQRKAGAAVTTETEVIWAKALPAGTSAQRAELIALTQALKMAEGKKLNVYTDSRYAFATAHIHGEIYRRRGWLTSEGKEIKNKDEILALLKALFLPKRLSIIHCPGHQKGHSAEARGNRMADQAARKAAITETPDTSTLLIENSSPSGGSKRTADGSEFEAGKRTADGSEFEKRTADGSEFESPKKKAKVE

SEQ ID NO: 2665 - protein, 2117 aa, synthetic construct
MPAAKRVKLDGGDKKYSIGLDIGTNSVGWAVITDEYKVPSKKFKVLGNTDRHSIKKNLIGALLFDSGETAEATRLKRTARRRYTRRKNRICYLQEIFSNEMAKVDDSFFHRLEESFLVEEDKKHERHPIFGNIVDEVAYHEKYPTIYHLRKKLVDSTDKADLRLIYLALAHMIKFRGHFLIEGDLNPDNSDVDKLFIQLVQTYNQLFEENPINASGVDAKAILSARLSKSRRLENLIAQLPGEKKNGLFGNLIALSLGLTPNFKSNFDLAEDAKLQLSKDTYDDDLDNLLAQIGDQYADLFLAAKNLSDAILLSDILRVNTEITKAPLSASMIKRYDEHHQDLTLLKALVRQQLPEKYKEIFFDQSKNGYAGYIDGGASQEEFYKFIKPILEKMDGTEELLVKLNREDLLRKQRTFDNGSIPHQIHLGELHAILRRQEDFYPFLKDNREKIEKILTFRIPYYVGPLARGNSRFAWMTRKSEETITPWNFEEVVDKGASAQSFIERMTNFDKNLPNEKVLPKHSLLYEYFTVYNELTKVKYVTEGMRKPAFLSGEQKKAIVDLLFKTNRKVTVKQLKEDYFKKIECFDSVEISGVEDRFNASLGTYHDLLKIIKDKDFLDNEENEDILEDIVLTLTLFEDREMIEERLKTYAHLFDDKVMKQLKRRRYTGWGRLSRKLINGIRDKQSGKTILDFLKSDGFANRNFMQLIHDDSLTFKEDIQKAQVSGQGDSLHEHIANLAGSPAIKKGILQTVKVVDELVKVMGRHKPENIVIEMARENQTTQKGQKNSRERMKRIEEGIKELGSQILKEHPVENTQLQNEKLYLYYLQNGRDMYVDQELDINRLSDYDVDHIVPQSFLKDDSIDNKVLTRSDKARGKSDNVPSEEVVKKMKNYWRQLLNAKLITQRKFDNLTKAERGGLSELDKAGFIKRQLVETRQITKHVAQILDSRMNTKYDENDKLIREVKVITLKSKLVSDFRKDFQFYKVREINNYHHAHDAYLNAVVGTALIKKYPKLESEFVYGDYKVYDVRKMIAKSEQEIGKATAKYFFYSNIMNFFKTEITLANGEIRKRPLIETNGETGEIVWDKGRDFATVRKVLSMPQVNIVKKTEVQTGGFSKESILPKRNSDKLIARKKDWDPKKYGGFDSPTVAYSVLVVAKVEKGKSKKLKSVKELLGITIMERSSFEKNPIDFLEAKGYKEVKKDLIIKLPKYSLFELENGRKRMLASAGELQKGNELALPSKYVNFLYLASHYEKLKGSPEDNEQKQLFVEQHKHYLDEIIEQISEFSKRVILADANLDKVLSAYNKHRDKPIREQAENIIHLFTLTNLGAPAAFKYFDTTIDRKRYTSTKEVLDATLIHQSITGLYETRIDLSQLGGDGGGSSGSSGSSGSSGGTLNIEDEYRLHETSKEPDVSLGSTWLSDFPQAWAETGGMGLAVRQAPLIIPLKATSTPVSIKQYPMSQEARLGIKPHIQRLLDQGILVPCQSPWNTPLLPVKKPGTNDYRPVQDLREVNKRVEDIHPTVPNPYNLLSGLPPSHQWYTVLDLKDAFFCLRLHPTSQPLFAFEWRDPEMGISGQLTWTRLPQGFKNSPTLFNEALHRDLADFRIQHPDLILLQYVDDLLLAATSELDCQQGTRALLQTLGNLGYRASAKKAQICQKQVKYLGYLLKEGQRWLTEARKETVMGQPTPKTPRQLREFLGKAGFCRLFIPGFAEMAAPLYPLTKPGTLFNWGPDQQKAYQEIKQALLTAPALGLPDLTKPFELFVDEKQGYAKGVLTQKLGPWRRPVAYLSKKLDPVAAGWPPCLRMVAAIAVLTKDAGKLTMGQPLVILAPHAVEALVKQPPDRWLSNARMTHYQALLLDTDRVQFGPVVALNPATLLPLPEEGLQHNCLDILAEAHGTRPDLTDQPLPDADHTWYTDGSSLLQEGQRKAGAAVTTETEVIWAKALPAGTSAQRAELIALTQALKMAEGKKLNVYTDSRYAFATAHIHGEIYRRRGWLTSEGKEIKNKDEILALLKALFLPKRLSIIHCPGHQKGHSAEARGNRMADQAARKAAITETPDTSTLLIENSSPSGGSKRTADGSEFEAGKRTADGSEFEKRTADGSEFESPKKKAKVE

SEQ ID NO: 2666 - protein, 2116 aa, synthetic construct
MPAAKRVKLDGGDKKYSIGLDIGTNSVGWAVITDEYKVPSKKFKVLGNTDRHSIKKNLIGALLFDSGETAEATRLKRTARRRYTRRKNRICYLQEIFSNEMAKVDDSFFHRLEESFLVEEDKKHERHPIFGNIVDEVAYHEKYPTIYHLRKKLVDSTDKADLRLIYLALAHMIKFRGHFLIEGDLNPDNSDVDKLFIQLVQTYNQLFEENPINASGVDAKAILSARLSKSRRLENLIAQLPGEKKNGLFGNLIALSLGLTPNFKSNFDLAEDAKLQLSKDTYDDDLDNLLAQIGDQYADLFLAAKNLSDAILLSDILRVNTEITKAPLSASMIKRYDEHHQDLTLLKALVRQQLPEKYKEIFFDQSKNGYAGYIDGGASQEEFYKFIKPILEKMDGTEELLVKLNREDLLRKQRTFDNGSIPHQIHLGELHAILRRQEDFYPFLKDNREKIEKILTFRIPYYVGPLARGNSRFAWMTRKSEETITPWNFEEVVDKGASAQSFIERMTNFDKNLPNEKVLPKHSLLYEYFTVYNELTKVKYVTEGMRKPAFLSGEQKKAIVDLLFKTNRKVTVKQLKEDYFKKIECFDSVEISGVEDRFNASLGTYHDLLKIIKDKDFLDNEENEDILEDIVLTLTLFEDREMIEERLKTYAHLFDDKVMKQLKRRRYTGWGRLSRKLINGIRDKQSGKTILDFLKSDGFANRNFMQLIHDDSLTFKEDIQKAQVSGQGDSLHEHIANLAGSPAIKKGILQTVKVVDELVKVMGRHKPENIVIEMARENQTTQKGQKNSRERMKRIEEGIKELGSQILKEHPVENTQLQNEKLYLYYLQNGRDMYVDQELDINRLSDYDVDHIVPQSFLKDDSIDNKVLTRSDKARGKSDNVPSEEVVKKMKNYWRQLLNAKLITQRKFDNLTKAERGGLSELDKAGFIKRQLVETRQITKHVAQILDSRMNTKYDENDKLIREVKVITLKSKLVSDFRKDFQFYKVREINNYHHAHDAYLNAVVGTALIKKYPKLESEFVYGDYKVYDVRKMIAKSEQEIGKATAKYFFYSNIMNFFKTEITLANGEIRKRPLIETNGETGEIVWDKGRDFATVRKVLSMPQVNIVKKTEVQTGGFSKESILPKRNSDKLIARKKDWDPKKYGGFDSPTVAYSVLVVAKVEKGKSKKLKSVKELLGITIMERSSFEKNPIDFLEAKGYKEVKKDLIIKLPKYSLFELENGRKRMLASAGELQKGNELALPSKYVNFLYLASHYEKLKGSPEDNEQKQLFVEQHKHYLDEIIEQISEFSKRVILADANLDKVLSAYNKHRDKPIREQAENIIHLFTLTNLGAPAAFKYFDTTIDRKRYTSTKEVLDATLIHQSITGLYETRIDLSQLGGDGGEAAAKGGSGSSGGTLNIEDEYRLHETSKEPDVSLGSTWLSDFPQAWAETGGMGLAVRQAPLIIPLKATSTPVSIKQYPMSQEARLGIKPHIQRLLDQGILVPCQSPWNTPLLPVKKPGTNDYRPVQDLREVNKRVEDIHPTVPNPYNLLSGLPPSHQWYTVLDLKDAFFCLRLHPTSQPLFAFEWRDPEMGISGQLTWTRLPQGFKNSPTLFNEALHRDLADFRIQHPDLILLQYVDDLLLAATSELDCQQGTRALLQTLGNLGYRASAKKAQICQKQVKYLGYLLKEGQRWLTEARKETVMGQPTPKTPRQLREFLGKAGFCRLFIPGFAEMAAPLYPLTKPGTLFNWGPDQQKAYQEIKQALLTAPALGLPDLTKPFELFVDEKQGYAKGVLTQKLGPWRRPVAYLSKKLDPVAAGWPPCLRMVAAIAVLTKDAGKLTMGQPLVILAPHAVEALVKQPPDRWLSNARMTHYQALLLDTDRVQFGPVVALNPATLLPLPEEGLQHNCLDILAEAHGTRPDLTDQPLPDADHTWYTDGSSLLQEGQRKAGAAVTTETEVIWAKALPAGTSAQRAELIALTQALKMAEGKKLNVYTDSRYAFATAHIHGEIYRRRGWLTSEGKEIKNKDEILALLKALFLPKRLSIIHCPGHQKGHSAEARGNRMADQAARKAAITETPDTSTLLIENSSPSGGSKRTADGSEFEAGKRTADGSEFEKRTADGSEFESPKKKAKVE

SEQ ID NO: 2667 - protein, 2114 aa, synthetic construct
MPAAKRVKLDGGDKKYSIGLDIGTNSVGWAVITDEYKVPSKKFKVLGNTDRHSIKKNLIGALLFDSGETAEATRLKRTARRRYTRRKNRICYLQEIFSNEMAKVDDSFFHRLEESFLVEEDKKHERHPIFGNIVDEVAYHEKYPTIYHLRKKLVDSTDKADLRLIYLALAHMIKFRGHFLIEGDLNPDNSDVDKLFIQLVQTYNQLFEENPINASGVDAKAILSARLSKSRRLENLIAQLPGEKKNGLFGNLIALSLGLTPNFKSNFDLAEDAKLQLSKDTYDDDLDNLLAQIGDQYADLFLAAKNLSDAILLSDILRVNTEITKAPLSASMIKRYDEHHQDLTLLKALVRQQLPEKYKEIFFDQSKNGYAGYIDGGASQEEFYKFIKPILEKMDGTEELLVKLNREDLLRKQRTFDNGSIPHQIHLGELHAILRRQEDFYPFLKDNREKIEKILTFRIPYYVGPLARGNSRFAWMTRKSEETITPWNFEEVVDKGASAQSFIERMTNFDKNLPNEKVLPKHSLLYEYFTVYNELTKVKYVTEGMRKPAFLSGEQKKAIVDLLFKTNRKVTVKQLKEDYFKKIECFDSVEISGVEDRFNASLGTYHDLLKIIKDKDFLDNEENEDILEDIVLTLTLFEDREMIEERLKTYAHLFDDKVMKQLKRRRYTGWGRLSRKLINGIRDKQSGKTILDFLKSDGFANRNFMQLIHDDSLTFKEDIQKAQVSGQGDSLHEHIANLAGSPAIKKGILQTVKVVDELVKVMGRHKPENIVIEMARENQTTQKGQKNSRERMKRIEEGIKELGSQILKEHPVENTQLQNEKLYLYYLQNGRDMYVDQELDINRLSDYDVDHIVPQSFLKDDSIDNKVLTRSDKARGKSDNVPSEEVVKKMKNYWRQLLNAKLITQRKFDNLTKAERGGLSELDKAGFIKRQLVETRQITKHVAQILDSRMNTKYDENDKLIREVKVITLKSKLVSDFRKDFQFYKVREINNYHHAHDAYLNAVVGTALIKKYPKLESEFVYGDYKVYDVRKMIAKSEQEIGKATAKYFFYSNIMNFFKTEITLANGEIRKRPLIETNGETGEIVWDKGRDFATVRKVLSMPQVNIVKKTEVQTGGFSKESILPKRNSDKLIARKKDWDPKKYGGFDSPTVAYSVLVVAKVEKGKSKKLKSVKELLGITIMERSSFEKNPIDFLEAKGYKEVKKDLIIKLPKYSLFELENGRKRMLASAGELQKGNELALPSKYVNFLYLASHYEKLKGSPEDNEQKQLFVEQHKHYLDEIIEQISEFSKRVILADANLDKVLSAYNKHRDKPIREQAENIIHLFTLTNLGAPAAFKYFDTTIDRKRYTSTKEVLDATLIHQSITGLYETRIDLSQLGGDGGGGSPAPGGGGGTLNIEDEYRLHETSKEPDVSLGSTWLSDFPQAWAETGGMGLAVRQAPLIIPLKATSTPVSIKQYPMSQEARLGIKPHIQRLLDQGILVPCQSPWNTPLLPVKKPGTNDYRPVQDLREVNKRVEDIHPTVPNPYNLLSGLPPSHQWYTVLDLKDAFFCLRLHPTSQPLFAFEWRDPEMGISGQLTWTRLPQGFKNSPTLFNEALHRDLADFRIQHPDLILLQYVDDLLLAATSELDCQQGTRALLQTLGNLGYRASAKKAQICQKQVKYLGYLLKEGQRWLTEARKETVMGQPTPKTPRQLREFLGKAGFCRLFIPGFAEMAAPLYPLTKPGTLFNWGPDQQKAYQEIKQALLTAPALGLPDLTKPFELFVDEKQGYAKGVLTQKLGPWRRPVAYLSKKLDPVAAGWPPCLRMVAAIAVLTKDAGKLTMGQPLVILAPHAVEALVKQPPDRWLSNARMTHYQALLLDTDRVQFGPVVALNPATLLPLPEEGLQHNCLDILAEAHGTRPDLTDQPLPDADHTWYTDGSSLLQEGQRKAGAAVTTETEVIWAKALPAGTSAQRAELIALTQALKMAEGKKLNVYTDSRYAFATAHIHGEIYRRRGWLTSEGKEIKNKDEILALLKALFLPKRLSIIHCPGHQKGHSAEARGNRMADQAARKAAITETPDTSTLLIENSSPSGGSKRTADGSEFEAGKRTADGSEFEKRTADGSEFESPKKKAKVE

SEQ ID NO: 2668 - protein, 2116 aa, synthetic construct
MPAAKRVKLDGGDKKYSIGLDIGTNSVGWAVITDEYKVPSKKFKVLGNTDRHSIKKNLIGALLFDSGETAEATRLKRTARRRYTRRKNRICYLQEIFSNEMAKVDDSFFHRLEESFLVEEDKKHERHPIFGNIVDEVAYHEKYPTIYHLRKKLVDSTDKADLRLIYLALAHMIKFRGHFLIEGDLNPDNSDVDKLFIQLVQTYNQLFEENPINASGVDAKAILSARLSKSRRLENLIAQLPGEKKNGLFGNLIALSLGLTPNFKSNFDLAEDAKLQLSKDTYDDDLDNLLAQIGDQYADLFLAAKNLSDAILLSDILRVNTEITKAPLSASMIKRYDEHHQDLTLLKALVRQQLPEKYKEIFFDQSKNGYAGYIDGGASQEEFYKFIKPILEKMDGTEELLVKLNREDLLRKQRTFDNGSIPHQIHLGELHAILRRQEDFYPFLKDNREKIEKILTFRIPYYVGPLARGNSRFAWMTRKSEETITPWNFEEVVDKGASAQSFIERMTNFDKNLPNEKVLPKHSLLYEYFTVYNELTKVKYVTEGMRKPAFLSGEQKKAIVDLLFKTNRKVTVKQLKEDYFKKIECFDSVEISGVEDRFNASLGTYHDLLKIIKDKDFLDNEENEDILEDIVLTLTLFEDREMIEERLKTYAHLFDDKVMKQLKRRRYTGWGRLSRKLINGIRDKQSGKTILDFLKSDGFANRNFMQLIHDDSLTFKEDIQKAQVSGQGDSLHEHIANLAGSPAIKKGILQTVKVVDELVKVMGRHKPENIVIEMARENQTTQKGQKNSRERMKRIEEGIKELGSQILKEHPVENTQLQNEKLYLYYLQNGRDMYVDQELDINRLSDYDVDHIVPQSFLKDDSIDNKVLTRSDKARGKSDNVPSEEVVKKMKNYWRQLLNAKLITQRKFDNLTKAERGGLSELDKAGFIKRQLVETRQITKHVAQILDSRMNTKYDENDKLIREVKVITLKSKLVSDFRKDFQFYKVREINNYHHAHDAYLNAVVGTALIKKYPKLESEFVYGDYKVYDVRKMIAKSEQEIGKATAKYFFYSNIMNFFKTEITLANGEIRKRPLIETNGETGEIVWDKGRDFATVRKVLSMPQVNIVKKTEVQTGGFSKESILPKRNSDKLIARKKDWDPKKYGGFDSPTVAYSVLVVAKVEKGKSKKLKSVKELLGITIMERSSFEKNPIDFLEAKGYKEVKKDLIIKLPKYSLFELENGRKRMLASAGELQKGNELALPSKYVNFLYLASHYEKLKGSPEDNEQKQLFVEQHKHYLDEIIEQISEFSKRVILADANLDKVLSAYNKHRDKPIREQAENIIHLFTLTNLGAPAAFKYFDTTIDRKRYTSTKEVLDATLIHQSITGLYETRIDLSQLGGDGGPAPEAAAKGGGGGTLNIEDEYRLHETSKEPDVSLGSTWLSDFPQAWAETGGMGLAVRQAPLIIPLKATSTPVSIKQYPMSQEARLGIKPHIQRLLDQGILVPCQSPWNTPLLPVKKPGTNDYRPVQDLREVNKRVEDIHPTVPNPYNLLSGLPPSHQWYTVLDLKDAFFCLRLHPTSQPLFAFEWRDPEMGISGQLTWTRLPQGFKNSPTLFNEALHRDLADFRIQHPDLILLQYVDDLLLAATSELDCQQGTRALLQTLGNLGYRASAKKAQICQKQVKYLGYLLKEGQRWLTEARKETVMGQPTPKTPRQLREFLGKAGFCRLFIPGFAEMAAPLYPLTKPGTLFNWGPDQQKAYQEIKQALLTAPALGLPDLTKPFELFVDEKQGYAKGVLTQKLGPWRRPVAYLSKKLDPVAAGWPPCLRMVAAIAVLTKDAGKLTMGQPLVILAPHAVEALVKQPPDRWLSNARMTHYQALLLDTDRVQFGPVVALNPATLLPLPEEGLQHNCLDILAEAHGTRPDLTDQPLPDADHTWYTDGSSLLQEGQRKAGAAVTTETEVIWAKALPAGTSAQRAELIALTQALKMAEGKKLNVYTDSRYAFATAHIHGEIYRRRGWLTSEGKEIKNKDEILALLKALFLPKRLSIIHCPGHQKGHSAEARGNRMADQAARKAAITETPDTSTLLIENSSPSGGSKRTADGSEFEAGKRTADGSEFEKRTADGSEFESPKKKAKVE

SEQ ID NO: 2669 - protein, 2120 aa, synthetic construct
MPAAKRVKLDGGDKKYSIGLDIGTNSVGWAVITDEYKVPSKKFKVLGNTDRHSIKKNLIGALLFDSGETAEATRLKRTARRRYTRRKNRICYLQEIFSNEMAKVDDSFFHRLEESFLVEEDKKHERHPIFGNIVDEVAYHEKYPTIYHLRKKLVDSTDKADLRLIYLALAHMIKFRGHFLIEGDLNPDNSDVDKLFIQLVQTYNQLFEENPINASGVDAKAILSARLSKSRRLENLIAQLPGEKKNGLFGNLIALSLGLTPNFKSNFDLAEDAKLQLSKDTYDDDLDNLLAQIGDQYADLFLAAKNLSDAILLSDILRVNTEITKAPLSASMIKRYDEHHQDLTLLKALVRQQLPEKYKEIFFDQSKNGYAGYIDGGASQEEFYKFIKPILEKMDGTEELLVKLNREDLLRKQRTFDNGSIPHQIHLGELHAILRRQEDFYPFLKDNREKIEKILTFRIPYYVGPLARGNSRFAWMTRKSEETITPWNFEEVVDKGASAQSFIERMTNFDKNLPNEKVLPKHSLLYEYFTVYNELTKVKYVTEGMRKPAFLSGEQKKAIVDLLFKTNRKVTVKQLKEDYFKKIECFDSVEISGVEDRFNASLGTYHDLLKIIKDKDFLDNEENEDILEDIVLTLTLFEDREMIEERLKTYAHLFDDKVMKQLKRRRYTGWGRLSRKLINGIRDKQSGKTILDFLKSDGFANRNFMQLIHDDSLTFKEDIQKAQVSGQGDSLHEHIANLAGSPAIKKGILQTVKVVDELVKVMGRHKPENIVIEMARENQTTQKGQKNSRERMKRIEEGIKELGSQILKEHPVENTQLQNEKLYLYYLQNGRDMYVDQELDINRLSDYDVDHIVPQSFLKDDSIDNKVLTRSDKARGKSDNVPSEEVVKKMKNYWRQLLNAKLITQRKFDNLTKAERGGLSELDKAGFIKRQLVETRQITKHVAQILDSRMNTKYDENDKLIREVKVITLKSKLVSDFRKDFQFYKVREINNYHHAHDAYLNAVVGTALIKKYPKLESEFVYGDYKVYDVRKMIAKSEQEIGKATAKYFFYSNIMNFFKTEITLANGEIRKRPLIETNGETGEIVWDKGRDFATVRKVLSMPQVNIVKKTEVQTGGFSKESILPKRNSDKLIARKKDWDPKKYGGFDSPTVAYSVLVVAKVEKGKSKKLKSVKELLGITIMERSSFEKNPIDFLEAKGYKEVKKDLIIKLPKYSLFELENGRKRMLASAGELQKGNELALPSKYVNFLYLASHYEKLKGSPEDNEQKQLFVEQHKHYLDEIIEQISEFSKRVILADANLDKVLSAYNKHRDKPIREQAENIIHLFTLTNLGAPAAFKYFDTTIDRKRYTSTKEVLDATLIHQSITGLYETRIDLSQLGGDGGGSSGSSGSSGSSGSSGGTLNIEDEYRLHETSKEPDVSLGSTWLSDFPQAWAETGGMGLAVRQAPLIIPLKATSTPVSIKQYPMSQEARLGIKPHIQRLLDQGILVPCQSPWNTPLLPVKKPGTNDYRPVQDLREVNKRVEDIHPTVPNPYNLLSGLPPSHQWYTVLDLKDAFFCLRLHPTSQPLFAFEWRDPEMGISGQLTWTRLPQGFKNSPTLFNEALHRDLADFRIQHPDLILLQYVDDLLLAATSELDCQQGTRALLQTLGNLGYRASAKKAQICQKQVKYLGYLLKEGQRWLTEARKETVMGQPTPKTPRQLREFLGKAGFCRLFIPGFAEMAAPLYPLTKPGTLFNWGPDQQKAYQEIKQALLTAPALGLPDLTKPFELFVDEKQGYAKGVLTQKLGPWRRPVAYLSKKLDPVAAGWPPCLRMVAAIAVLTKDAGKLTMGQPLVILAPHAVEALVKQPPDRWLSNARMTHYQALLLDTDRVQFGPVVALNPATLLPLPEEGLQHNCLDILAEAHGTRPDLTDQPLPDADHTWYTDGSSLLQEGQRKAGAAVTTETEVIWAKALPAGTSAQRAELIALTQALKMAEGKKLNVYTDSRYAFATAHIHGEIYRRRGWLTSEGKEIKNKDEILALLKALFLPKRLSIIHCPGHQKGHSAEARGNRMADQAARKAAITETPDTSTLLIENSSPSGGSKRTADGSEFEAGKRTADGSEFEKRTADGSEFESPKKKAKVE

SEQ ID NO: 2670 - protein, 2114 aa, synthetic construct
MPAAKRVKLDGGDKKYSIGLDIGTNSVGWAVITDEYKVPSKKFKVLGNTDRHSIKKNLIGALLFDSGETAEATRLKRTARRRYTRRKNRICYLQEIFSNEMAKVDDSFFHRLEESFLVEEDKKHERHPIFGNIVDEVAYHEKYPTIYHLRKKLVDSTDKADLRLIYLALAHMIKFRGHFLIEGDLNPDNSDVDKLFIQLVQTYNQLFEENPINASGVDAKAILSARLSKSRRLENLIAQLPGEKKNGLFGNLIALSLGLTPNFKSNFDLAEDAKLQLSKDTYDDDLDNLLAQIGDQYADLFLAAKNLSDAILLSDILRVNTEITKAPLSASMIKRYDEHHQDLTLLKALVRQQLPEKYKEIFFDQSKNGYAGYIDGGASQEEFYKFIKPILEKMDGTEELLVKLNREDLLRKQRTFDNGSIPHQIHLGELHAILRRQEDFYPFLKDNREKIEKILTFRIPYYVGPLARGNSRFAWMTRKSEETITPWNFEEVVDKGASAQSFIERMTNFDKNLPNEKVLPKHSLLYEYFTVYNELTKVKYVTEGMRKPAFLSGEQKKAIVDLLFKTNRKVTVKQLKEDYFKKIECFDSVEISGVEDRFNASLGTYHDLLKIIKDKDFLDNEENEDILEDIVLTLTLFEDREMIEERLKTYAHLFDDKVMKQLKRRRYTGWGRLSRKLINGIRDKQSGKTILDFLKSDGFANRNFMQLIHDDSLTFKEDIQKAQVSGQGDSLHEHIANLAGSPAIKKGILQTVKVVDELVKVMGRHKPENIVIEMARENQTTQKGQKNSRERMKRIEEGIKELGSQILKEHPVENTQLQNEKLYLYYLQNGRDMYVDQELDINRLSDYDVDHIVPQSFLKDDSIDNKVLTRSDKARGKSDNVPSEEVVKKMKNYWRQLLNAKLITQRKFDNLTKAERGGLSELDKAGFIKRQLVETRQITKHVAQILDSRMNTKYDENDKLIREVKVITLKSKLVSDFRKDFQFYKVREINNYHHAHDAYLNAVVGTALIKKYPKLESEFVYGDYKVYDVRKMIAKSEQEIGKATAKYFFYSNIMNFFKTEITLANGEIRKRPLIETNGETGEIVWDKGRDFATVRKVLSMPQVNIVKKTEVQTGGFSKESILPKRNSDKLIARKKDWDPKKYGGFDSPTVAYSVLVVAKVEKGKSKKLKSVKELLGITIMERSSFEKNPIDFLEAKGYKEVKKDLIIKLPKYSLFELENGRKRMLASAGELQKGNELALPSKYVNFLYLASHYEKLKGSPEDNEQKQLFVEQHKHYLDEIIEQISEFSKRVILADANLDKVLSAYNKHRDKPIREQAENIIHLFTLTNLGAPAAFKYFDTTIDRKRYTSTKEVLDATLIHQSITGLYETRIDLSQLGGDGGGGGGGSGSSGGTLNIEDEYRLHETSKEPDVSLGSTWLSDFPQAWAETGGMGLAVRQAPLIIPLKATSTPVSIKQYPMSQEARLGIKPHIQRLLDQGILVPCQSPWNTPLLPVKKPGTNDYRPVQDLREVNKRVEDIHPTVPNPYNLLSGLPPSHQWYTVLDLKDAFFCLRLHPTSQPLFAFEWRDPEMGISGQLTWTRLPQGFKNSPTLFNEALHRDLADFRIQHPDLILLQYVDDLLLAATSELDCQQGTRALLQTLGNLGYRASAKKAQICQKQVKYLGYLLKEGQRWLTEARKETVMGQPTPKTPRQLREFLGKAGFCRLFIPGFAEMAAPLYPLTKPGTLFNWGPDQQKAYQEIKQALLTAPALGLPDLTKPFELFVDEKQGYAKGVLTQKLGPWRRPVAYLSKKLDPVAAGWPPCLRMVAAIAVLTKDAGKLTMGQPLVILAPHAVEALVKQPPDRWLSNARMTHYQALLLDTDRVQFGPVVALNPATLLPLPEEGLQHNCLDILAEAHGTRPDLTDQPLPDADHTWYTDGSSLLQEGQRKAGAAVTTETEVIWAKALPAGTSAQRAELIALTQALKMAEGKKLNVYTDSRYAFATAHIHGEIYRRRGWLTSEGKEIKNKDEILALLKALFLPKRLSIIHCPGHQKGHSAEARGNRMADQAARKAAITETPDTSTLLIENSSPSGGSKRTADGSEFEAGKRTADGSEFEKRTADGSEFESPKKKAKVE

SEQ ID NO: 2671 - protein, 2111 aa, synthetic construct
MPAAKRVKLDGGDKKYSIGLDIGTNSVGWAVITDEYKVPSKKFKVLGNTDRHSIKKNLIGALLFDSGETAEATRLKRTARRRYTRRKNRICYLQEIFSNEMAKVDDSFFHRLEESFLVEEDKKHERHPIFGNIVDEVAYHEKYPTIYHLRKKLVDSTDKADLRLIYLALAHMIKFRGHFLIEGDLNPDNSDVDKLFIQLVQTYNQLFEENPINASGVDAKAILSARLSKSRRLENLIAQLPGEKKNGLFGNLIALSLGLTPNFKSNFDLAEDAKLQLSKDTYDDDLDNLLAQIGDQYADLFLAAKNLSDAILLSDILRVNTEITKAPLSASMIKRYDEHHQDLTLLKALVRQQLPEKYKEIFFDQSKNGYAGYIDGGASQEEFYKFIKPILEKMDGTEELLVKLNREDLLRKQRTFDNGSIPHQIHLGELHAILRRQEDFYPFLKDNREKIEKILTFRIPYYVGPLARGNSRFAWMTRKSEETITPWNFEEVVDKGASAQSFIERMTNFDKNLPNEKVLPKHSLLYEYFTVYNELTKVKYVTEGMRKPAFLSGEQKKAIVDLLFKTNRKVTVKQLKEDYFKKIECFDSVEISGVEDRFNASLGTYHDLLKIIKDKDFLDNEENEDILEDIVLTLTLFEDREMIEERLKTYAHLFDDKVMKQLKRRRYTGWGRLSRKLINGIRDKQSGKTILDFLKSDGFANRNFMQLIHDDSLTFKEDIQKAQVSGQGDSLHEHIANLAGSPAIKKGILQTVKVVDELVKVMGRHKPENIVIEMARENQTTQKGQKNSRERMKRIEEGIKELGSQILKEHPVENTQLQNEKLYLYYLQNGRDMYVDQELDINRLSDYDVDHIVPQSFLKDDSIDNKVLTRSDKARGKSDNVPSEEVVKKMKNYWRQLLNAKLITQRKFDNLTKAERGGLSELDKAGFIKRQLVETRQITKHVAQILDSRMNTKYDENDKLIREVKVITLKSKLVSDFRKDFQFYKVREINNYHHAHDAYLNAVVGTALIKKYPKLESEFVYGDYKVYDVRKMIAKSEQEIGKATAKYFFYSNIMNFFKTEITLANGEIRKRPLIETNGETGEIVWDKGRDFATVRKVLSMPQVNIVKKTEVQTGGFSKESILPKRNSDKLIARKKDWDPKKYGGFDSPTVAYSVLVVAKVEKGKSKKLKSVKELLGITIMERSSFEKNPIDFLEAKGYKEVKKDLIIKLPKYSLFELENGRKRMLASAGELQKGNELALPSKYVNFLYLASHYEKLKGSPEDNEQKQLFVEQHKHYLDEIIEQISEFSKRVILADANLDKVLSAYNKHRDKPIREQAENIIHLFTLTNLGAPAAFKYFDTTIDRKRYTSTKEVLDATLIHQSITGLYETRIDLSQLGGDGGGGSPAPGGTLNIEDEYRLHETSKEPDVSLGSTWLSDFPQAWAETGGMGLAVRQAPLIIPLKATSTPVSIKQYPMSQEARLGIKPHIQRLLDQGILVPCQSPWNTPLLPVKKPGTNDYRPVQDLREVNKRVEDIHPTVPNPYNLLSGLPPSHQWYTVLDLKDAFFCLRLHPTSQPLFAFEWRDPEMGISGQLTWTRLPQGFKNSPTLFNEALHRDLADFRIQHPDLILLQYVDDLLLAATSELDCQQGTRALLQTLGNLGYRASAKKAQICQKQVKYLGYLLKEGQRWLTEARKETVMGQPTPKTPRQLREFLGKAGFCRLFIPGFAEMAAPLYPLTKPGTLFNWGPDQQKAYQEIKQALLTAPALGLPDLTKPFELFVDEKQGYAKGVLTQKLGPWRRPVAYLSKKLDPVAAGWPPCLRMVAAIAVLTKDAGKLTMGQPLVILAPHAVEALVKQPPDRWLSNARMTHYQALLLDTDRVQFGPVVALNPATLLPLPEEGLQHNCLDILAEAHGTRPDLTDQPLPDADHTWYTDGSSLLQEGQRKAGAAVTTETEVIWAKALPAGTSAQRAELIALTQALKMAEGKKLNVYTDSRYAFATAHIHGEIYRRRGWLTSEGKEIKNKDEILALLKALFLPKRLSIIHCPGHQKGHSAEARGNRMADQAARKAAITETPDTSTLLIENSSPSGGSKRTADGSEFEAGKRTADGSEFEKRTADGSEFESPKKKAKVE

SEQ ID NO: 2672 - protein, 2111 aa, synthetic construct
MPAAKRVKLDGGDKKYSIGLDIGTNSVGWAVITDEYKVPSKKFKVLGNTDRHSIKKNLIGALLFDSGETAEATRLKRTARRRYTRRKNRICYLQEIFSNEMAKVDDSFFHRLEESFLVEEDKKHERHPIFGNIVDEVAYHEKYPTIYHLRKKLVDSTDKADLRLIYLALAHMIKFRGHFLIEGDLNPDNSDVDKLFIQLVQTYNQLFEENPINASGVDAKAILSARLSKSRRLENLIAQLPGEKKNGLFGNLIALSLGLTPNFKSNFDLAEDAKLQLSKDTYDDDLDNLLAQIGDQYADLFLAAKNLSDAILLSDILRVNTEITKAPLSASMIKRYDEHHQDLTLLKALVRQQLPEKYKEIFFDQSKNGYAGYIDGGASQEEFYKFIKPILEKMDGTEELLVKLNREDLLRKQRTFDNGSIPHQIHLGELHAILRRQEDFYPFLKDNREKIEKILTFRIPYYVGPLARGNSRFAWMTRKSEETITPWNFEEVVDKGASAQSFIERMTNFDKNLPNEKVLPKHSLLYEYFTVYNELTKVKYVTEGMRKPAFLSGEQKKAIVDLLFKTNRKVTVKQLKEDYFKKIECFDSVEISGVEDRFNASLGTYHDLLKIIKDKDFLDNEENEDILEDIVLTLTLFEDREMIEERLKTYAHLFDDKVMKQLKRRRYTGWGRLSRKLINGIRDKQSGKTILDFLKSDGFANRNFMQLIHDDSLTFKEDIQKAQVSGQGDSLHEHIANLAGSPAIKKGILQTVKVVDELVKVMGRHKPENIVIEMARENQTTQKGQKNSRERMKRIEEGIKELGSQILKEHPVENTQLQNEKLYLYYLQNGRDMYVDQELDINRLSDYDVDHIVPQSFLKDDSIDNKVLTRSDKARGKSDNVPSEEVVKKMKNYWRQLLNAKLITQRKFDNLTKAERGGLSELDKAGFIKRQLVETRQITKHVAQILDSRMNTKYDENDKLIREVKVITLKSKLVSDFRKDFQFYKVREINNYHHAHDAYLNAVVGTALIKKYPKLESEFVYGDYKVYDVRKMIAKSEQEIGKATAKYFFYSNIMNFFKTEITLANGEIRKRPLIETNGETGEIVWDKGRDFATVRKVLSMPQVNIVKKTEVQTGGFSKESILPKRNSDKLIARKKDWDPKKYGGFDSPTVAYSVLVVAKVEKGKSKKLKSVKELLGITIMERSSFEKNPIDFLEAKGYKEVKKDLIIKLPKYSLFELENGRKRMLASAGELQKGNELALPSKYVNFLYLASHYEKLKGSPEDNEQKQLFVEQHKHYLDEIIEQISEFSKRVILADANLDKVLSAYNKHRDKPIREQAENIIHLFTLTNLGAPAAFKYFDTTIDRKRYTSTKEVLDATLIHQSITGLYETRIDLSQLGGDGGGGGPAPGGTLNIEDEYRLHETSKEPDVSLGSTWLSDFPQAWAETGGMGLAVRQAPLIIPLKATSTPVSIKQYPMSQEARLGIKPHIQRLLDQGILVPCQSPWNTPLLPVKKPGTNDYRPVQDLREVNKRVEDIHPTVPNPYNLLSGLPPSHQWYTVLDLKDAFFCLRLHPTSQPLFAFEWRDPEMGISGQLTWTRLPQGFKNSPTLFNEALHRDLADFRIQHPDLILLQYVDDLLLAATSELDCQQGTRALLQTLGNLGYRASAKKAQICQKQVKYLGYLLKEGQRWLTEARKETVMGQPTPKTPRQLREFLGKAGFCRLFIPGFAEMAAPLYPLTKPGTLFNWGPDQQKAYQEIKQALLTAPALGLPDLTKPFELFVDEKQGYAKGVLTQKLGPWRRPVAYLSKKLDPVAAGWPPCLRMVAAIAVLTKDAGKLTMGQPLVILAPHAVEALVKQPPDRWLSNARMTHYQALLLDTDRVQFGPVVALNPATLLPLPEEGLQHNCLDILAEAHGTRPDLTDQPLPDADHTWYTDGSSLLQEGQRKAGAAVTTETEVIWAKALPAGTSAQRAELIALTQALKMAEGKKLNVYTDSRYAFATAHIHGEIYRRRGWLTSEGKEIKNKDEILALLKALFLPKRLSIIHCPGHQKGHSAEARGNRMADQAARKAAITETPDTSTLLIENSSPSGGSKRTADGSEFEAGKRTADGSEFEKRTADGSEFESPKKKAKVE

SEQ ID NO: 2673 - protein, 2116 aa, synthetic construct
MPAAKRVKLDGGDKKYSIGLDIGTNSVGWAVITDEYKVPSKKFKVLGNTDRHSIKKNLIGALLFDSGETAEATRLKRTARRRYTRRKNRICYLQEIFSNEMAKVDDSFFHRLEESFLVEEDKKHERHPIFGNIVDEVAYHEKYPTIYHLRKKLVDSTDKADLRLIYLALAHMIKFRGHFLIEGDLNPDNSDVDKLFIQLVQTYNQLFEENPINASGVDAKAILSARLSKSRRLENLIAQLPGEKKNGLFGNLIALSLGLTPNFKSNFDLAEDAKLQLSKDTYDDDLDNLLAQIGDQYADLFLAAKNLSDAILLSDILRVNTEITKAPLSASMIKRYDEHHQDLTLLKALVRQQLPEKYKEIFFDQSKNGYAGYIDGGASQEEFYKFIKPILEKMDGTEELLVKLNREDLLRKQRTFDNGSIPHQIHLGELHAILRRQEDFYPFLKDNREKIEKILTFRIPYYVGPLARGNSRFAWMTRKSEETITPWNFEEVVDKGASAQSFIERMTNFDKNLPNEKVLPKHSLLYEYFTVYNELTKVKYVTEGMRKPAFLSGEQKKAIVDLLFKTNRKVTVKQLKEDYFKKIECFDSVEISGVEDRFNASLGTYHDLLKIIKDKDFLDNEENEDILEDIVLTLTLFEDREMIEERLKTYAHLFDDKVMKQLKRRRYTGWGRLSRKLINGIRDKQSGKTILDFLKSDGFANRNFMQLIHDDSLTFKEDIQKAQVSGQGDSLHEHIANLAGSPAIKKGILQTVKVVDELVKVMGRHKPENIVIEMARENQTTQKGQKNSRERMKRIEEGIKELGSQILKEHPVENTQLQNEKLYLYYLQNGRDMYVDQELDINRLSDYDVDHIVPQSFLKDDSIDNKVLTRSDKARGKSDNVPSEEVVKKMKNYWRQLLNAKLITQRKFDNLTKAERGGLSELDKAGFIKRQLVETRQITKHVAQILDSRMNTKYDENDKLIREVKVITLKSKLVSDFRKDFQFYKVREINNYHHAHDAYLNAVVGTALIKKYPKLESEFVYGDYKVYDVRKMIAKSEQEIGKATAKYFFYSNIMNFFKTEITLANGEIRKRPLIETNGETGEIVWDKGRDFATVRKVLSMPQVNIVKKTEVQTGGFSKESILPKRNSDKLIARKKDWDPKKYGGFDSPTVAYSVLVVAKVEKGKSKKLKSVKELLGITIMERSSFEKNPIDFLEAKGYKEVKKDLIIKLPKYSLFELENGRKRMLASAGELQKGNELALPSKYVNFLYLASHYEKLKGSPEDNEQKQLFVEQHKHYLDEIIEQISEFSKRVILADANLDKVLSAYNKHRDKPIREQAENIIHLFTLTNLGAPAAFKYFDTTIDRKRYTSTKEVLDATLIHQSITGLYETRIDLSQLGGDGGGGSEAAAKGSSGGTLNIEDEYRLHETSKEPDVSLGSTWLSDFPQAWAETGGMGLAVRQAPLIIPLKATSTPVSIKQYPMSQEARLGIKPHIQRLLDQGILVPCQSPWNTPLLPVKKPGTNDYRPVQDLREVNKRVEDIHPTVPNPYNLLSGLPPSHQWYTVLDLKDAFFCLRLHPTSQPLFAFEWRDPEMGISGQLTWTRLPQGFKNSPTLFNEALHRDLADFRIQHPDLILLQYVDDLLLAATSELDCQQGTRALLQTLGNLGYRASAKKAQICQKQVKYLGYLLKEGQRWLTEARKETVMGQPTPKTPRQLREFLGKAGFCRLFIPGFAEMAAPLYPLTKPGTLFNWGPDQQKAYQEIKQALLTAPALGLPDLTKPFELFVDEKQGYAKGVLTQKLGPWRRPVAYLSKKLDPVAAGWPPCLRMVAAIAVLTKDAGKLTMGQPLVILAPHAVEALVKQPPDRWLSNARMTHYQALLLDTDRVQFGPVVALNPATLLPLPEEGLQHNCLDILAEAHGTRPDLTDQPLPDADHTWYTDGSSLLQEGQRKAGAAVTTETEVIWAKALPAGTSAQRAELIALTQALKMAEGKKLNVYTDSRYAFATAHIHGEIYRRRGWLTSEGKEIKNKDEILALLKALFLPKRLSIIHCPGHQKGHSAEARGNRMADQAARKAAITETPDTSTLLIENSSPSGGSKRTADGSEFEAGKRTADGSEFEKRTADGSEFESPKKKAKVE

SEQ ID NO: 2674 - protein, 2116 aa, synthetic construct
MPAAKRVKLDGGDKKYSIGLDIGTNSVGWAVITDEYKVPSKKFKVLGNTDRHSIKKNLIGALLFDSGETAEATRLKRTARRRYTRRKNRICYLQEIFSNEMAKVDDSFFHRLEESFLVEEDKKHERHPIFGNIVDEVAYHEKYPTIYHLRKKLVDSTDKADLRLIYLALAHMIKFRGHFLIEGDLNPDNSDVDKLFIQLVQTYNQLFEENPINASGVDAKAILSARLSKSRRLENLIAQLPGEKKNGLFGNLIALSLGLTPNFKSNFDLAEDAKLQLSKDTYDDDLDNLLAQIGDQYADLFLAAKNLSDAILLSDILRVNTEITKAPLSASMIKRYDEHHQDLTLLKALVRQQLPEKYKEIFFDQSKNGYAGYIDGGASQEEFYKFIKPILEKMDGTEELLVKLNREDLLRKQRTFDNGSIPHQIHLGELHAILRRQEDFYPFLKDNREKIEKILTFRIPYYVGPLARGNSRFAWMTRKSEETITPWNFEEVVDKGASAQSFIERMTNFDKNLPNEKVLPKHSLLYEYFTVYNELTKVKYVTEGMRKPAFLSGEQKKAIVDLLFKTNRKVTVKQLKEDYFKKIECFDSVEISGVEDRFNASLGTYHDLLKIIKDKDFLDNEENEDILEDIVLTLTLFEDREMIEERLKTYAHLFDDKVMKQLKRRRYTGWGRLSRKLINGIRDKQSGKTILDFLKSDGFANRNFMQLIHDDSLTFKEDIQKAQVSGQGDSLHEHIANLAGSPAIKKGILQTVKVVDELVKVMGRHKPENIVIEMARENQTTQKGQKNSRERMKRIEEGIKELGSQILKEHPVENTQLQNEKLYLYYLQNGRDMYVDQELDINRLSDYDVDHIVPQSFLKDDSIDNKVLTRSDKARGKSDNVPSEEVVKKMKNYWRQLLNAKLITQRKFDNLTKAERGGLSELDKAGFIKRQLVETRQITKHVAQILDSRMNTKYDENDKLIREVKVITLKSKLVSDFRKDFQFYKVREINNYHHAHDAYLNAVVGTALIKKYPKLESEFVYGDYKVYDVRKMIAKSEQEIGKATAKYFFYSNIMNFFKTEITLANGEIRKRPLIETNGETGEIVWDKGRDFATVRKVLSMPQVNIVKKTEVQTGGFSKESILPKRNSDKLIARKKDWDPKKYGGFDSPTVAYSVLVVAKVEKGKSKKLKSVKELLGITIMERSSFEKNPIDFLEAKGYKEVKKDLIIKLPKYSLFELENGRKRMLASAGELQKGNELALPSKYVNFLYLASHYEKLKGSPEDNEQKQLFVEQHKHYLDEIIEQISEFSKRVILADANLDKVLSAYNKHRDKPIREQAENIIHLFTLTNLGAPAAFKYFDTTIDRKRYTSTKEVLDATLIHQSITGLYETRIDLSQLGGDGGEAAAKPAPGGSGGTLNIEDEYRLHETSKEPDVSLGSTWLSDFPQAWAETGGMGLAVRQAPLIIPLKATSTPVSIKQYPMSQEARLGIKPHIQRLLDQGILVPCQSPWNTPLLPVKKPGTNDYRPVQDLREVNKRVEDIHPTVPNPYNLLSGLPPSHQWYTVLDLKDAFFCLRLHPTSQPLFAFEWRDPEMGISGQLTWTRLPQGFKNSPTLFNEALHRDLADFRIQHPDLILLQYVDDLLLAATSELDCQQGTRALLQTLGNLGYRASAKKAQICQKQVKYLGYLLKEGQRWLTEARKETVMGQPTPKTPRQLREFLGKAGFCRLFIPGFAEMAAPLYPLTKPGTLFNWGPDQQKAYQEIKQALLTAPALGLPDLTKPFELFVDEKQGYAKGVLTQKLGPWRRPVAYLSKKLDPVAAGWPPCLRMVAAIAVLTKDAGKLTMGQPLVILAPHAVEALVKQPPDRWLSNARMTHYQALLLDTDRVQFGPVVALNPATLLPLPEEGLQHNCLDILAEAHGTRPDLTDQPLPDADHTWYTDGSSLLQEGQRKAGAAVTTETEVIWAKALPAGTSAQRAELIALTQALKMAEGKKLNVYTDSRYAFATAHIHGEIYRRRGWLTSEGKEIKNKDEILALLKALFLPKRLSIIHCPGHQKGHSAEARGNRMADQAARKAAITETPDTSTLLIENSSPSGGSKRTADGSEFEAGKRTADGSEFEKRTADGSEFESPKKKAKVE

SEQ ID NO: 2675 - protein, 2114 aa, synthetic construct
MPAAKRVKLDGGDKKYSIGLDIGTNSVGWAVITDEYKVPSKKFKVLGNTDRHSIKKNLIGALLFDSGETAEATRLKRTARRRYTRRKNRICYLQEIFSNEMAKVDDSFFHRLEESFLVEEDKKHERHPIFGNIVDEVAYHEKYPTIYHLRKKLVDSTDKADLRLIYLALAHMIKFRGHFLIEGDLNPDNSDVDKLFIQLVQTYNQLFEENPINASGVDAKAILSARLSKSRRLENLIAQLPGEKKNGLFGNLIALSLGLTPNFKSNFDLAEDAKLQLSKDTYDDDLDNLLAQIGDQYADLFLAAKNLSDAILLSDILRVNTEITKAPLSASMIKRYDEHHQDLTLLKALVRQQLPEKYKEIFFDQSKNGYAGYIDGGASQEEFYKFIKPILEKMDGTEELLVKLNREDLLRKQRTFDNGSIPHQIHLGELHAILRRQEDFYPFLKDNREKIEKILTFRIPYYVGPLARGNSRFAWMTRKSEETITPWNFEEVVDKGASAQSFIERMTNFDKNLPNEKVLPKHSLLYEYFTVYNELTKVKYVTEGMRKPAFLSGEQKKAIVDLLFKTNRKVTVKQLKEDYFKKIECFDSVEISGVEDRFNASLGTYHDLLKIIKDKDFLDNEENEDILEDIVLTLTLFEDREMIEERLKTYAHLFDDKVMKQLKRRRYTGWGRLSRKLINGIRDKQSGKTILDFLKSDGFANRNFMQLIHDDSLTFKEDIQKAQVSGQGDSLHEHIANLAGSPAIKKGILQTVKVVDELVKVMGRHKPENIVIEMARENQTTQKGQKNSRERMKRIEEGIKELGSQILKEHPVENTQLQNEKLYLYYLQNGRDMYVDQELDINRLSDYDVDHIVPQSFLKDDSIDNKVLTRSDKARGKSDNVPSEEVVKKMKNYWRQLLNAKLITQRKFDNLTKAERGGLSELDKAGFIKRQLVETRQITKHVAQILDSRMNTKYDENDKLIREVKVITLKSKLVSDFRKDFQFYKVREINNYHHAHDAYLNAVVGTALIKKYPKLESEFVYGDYKVYDVRKMIAKSEQEIGKATAKYFFYSNIMNFFKTEITLANGEIRKRPLIETNGETGEIVWDKGRDFATVRKVLSMPQVNIVKKTEVQTGGFSKESILPKRNSDKLIARKKDWDPKKYGGFDSPTVAYSVLVVAKVEKGKSKKLKSVKELLGITIMERSSFEKNPIDFLEAKGYKEVKKDLIIKLPKYSLFELENGRKRMLASAGELQKGNELALPSKYVNFLYLASHYEKLKGSPEDNEQKQLFVEQHKHYLDEIIEQISEFSKRVILADANLDKVLSAYNKHRDKPIREQAENIIHLFTLTNLGAPAAFKYFDTTIDRKRYTSTKEVLDATLIHQSITGLYETRIDLSQLGGDGGGGSGSSGGGGGTLNIEDEYRLHETSKEPDVSLGSTWLSDFPQAWAETGGMGLAVRQAPLIIPLKATSTPVSIKQYPMSQEARLGIKPHIQRLLDQGILVPCQSPWNTPLLPVKKPGTNDYRPVQDLREVNKRVEDIHPTVPNPYNLLSGLPPSHQWYTVLDLKDAFFCLRLHPTSQPLFAFEWRDPEMGISGQLTWTRLPQGFKNSPTLFNEALHRDLADFRIQHPDLILLQYVDDLLLAATSELDCQQGTRALLQTLGNLGYRASAKKAQICQKQVKYLGYLLKEGQRWLTEARKETVMGQPTPKTPRQLREFLGKAGFCRLFIPGFAEMAAPLYPLTKPGTLFNWGPDQQKAYQEIKQALLTAPALGLPDLTKPFELFVDEKQGYAKGVLTQKLGPWRRPVAYLSKKLDPVAAGWPPCLRMVAAIAVLTKDAGKLTMGQPLVILAPHAVEALVKQPPDRWLSNARMTHYQALLLDTDRVQFGPVVALNPATLLPLPEEGLQHNCLDILAEAHGTRPDLTDQPLPDADHTWYTDGSSLLQEGQRKAGAAVTTETEVIWAKALPAGTSAQRAELIALTQALKMAEGKKLNVYTDSRYAFATAHIHGEIYRRRGWLTSEGKEIKNKDEILALLKALFLPKRLSIIHCPGHQKGHSAEARGNRMADQAARKAAITETPDTSTLLIENSSPSGGSKRTADGSEFEAGKRTADGSEFEKRTADGSEFESPKKKAKVE

SEQ ID NO: 2676 - protein, 2111 aa, synthetic construct
MPAAKRVKLDGGDKKYSIGLDIGTNSVGWAVITDEYKVPSKKFKVLGNTDRHSIKKNLIGALLFDSGETAEATRLKRTARRRYTRRKNRICYLQEIFSNEMAKVDDSFFHRLEESFLVEEDKKHERHPIFGNIVDEVAYHEKYPTIYHLRKKLVDSTDKADLRLIYLALAHMIKFRGHFLIEGDLNPDNSDVDKLFIQLVQTYNQLFEENPINASGVDAKAILSARLSKSRRLENLIAQLPGEKKNGLFGNLIALSLGLTPNFKSNFDLAEDAKLQLSKDTYDDDLDNLLAQIGDQYADLFLAAKNLSDAILLSDILRVNTEITKAPLSASMIKRYDEHHQDLTLLKALVRQQLPEKYKEIFFDQSKNGYAGYIDGGASQEEFYKFIKPILEKMDGTEELLVKLNREDLLRKQRTFDNGSIPHQIHLGELHAILRRQEDFYPFLKDNREKIEKILTFRIPYYVGPLARGNSRFAWMTRKSEETITPWNFEEVVDKGASAQSFIERMTNFDKNLPNEKVLPKHSLLYEYFTVYNELTKVKYVTEGMRKPAFLSGEQKKAIVDLLFKTNRKVTVKQLKEDYFKKIECFDSVEISGVEDRFNASLGTYHDLLKIIKDKDFLDNEENEDILEDIVLTLTLFEDREMIEERLKTYAHLFDDKVMKQLKRRRYTGWGRLSRKLINGIRDKQSGKTILDFLKSDGFANRNFMQLIHDDSLTFKEDIQKAQVSGQGDSLHEHIANLAGSPAIKKGILQTVKVVDELVKVMGRHKPENIVIEMARENQTTQKGQKNSRERMKRIEEGIKELGSQILKEHPVENTQLQNEKLYLYYLQNGRDMYVDQELDINRLSDYDVDHIVPQSFLKDDSIDNKVLTRSDKARGKSDNVPSEEVVKKMKNYWRQLLNAKLITQRKFDNLTKAERGGLSELDKAGFIKRQLVETRQITKHVAQILDSRMNTKYDENDKLIREVKVITLKSKLVSDFRKDFQFYKVREINNYHHAHDAYLNAVVGTALIKKYPKLESEFVYGDYKVYDVRKMIAKSEQEIGKATAKYFFYSNIMNFFKTEITLANGEIRKRPLIETNGETGEIVWDKGRDFATVRKVLSMPQVNIVKKTEVQTGGFSKESILPKRNSDKLIARKKDWDPKKYGGFDSPTVAYSVLVVAKVEKGKSKKLKSVKELLGITIMERSSFEKNPIDFLEAKGYKEVKKDLIIKLPKYSLFELENGRKRMLASAGELQKGNELALPSKYVNFLYLASHYEKLKGSPEDNEQKQLFVEQHKHYLDEIIEQISEFSKRVILADANLDKVLSAYNKHRDKPIREQAENIIHLFTLTNLGAPAAFKYFDTTIDRKRYTSTKEVLDATLIHQSITGLYETRIDLSQLGGDGGGSSGGGGGTLNIEDEYRLHETSKEPDVSLGSTWLSDFPQAWAETGGMGLAVRQAPLIIPLKATSTPVSIKQYPMSQEARLGIKPHIQRLLDQGILVPCQSPWNTPLLPVKKPGTNDYRPVQDLREVNKRVEDIHPTVPNPYNLLSGLPPSHQWYTVLDLKDAFFCLRLHPTSQPLFAFEWRDPEMGISGQLTWTRLPQGFKNSPTLFNEALHRDLADFRIQHPDLILLQYVDDLLLAATSELDCQQGTRALLQTLGNLGYRASAKKAQICQKQVKYLGYLLKEGQRWLTEARKETVMGQPTPKTPRQLREFLGKAGFCRLFIPGFAEMAAPLYPLTKPGTLFNWGPDQQKAYQEIKQALLTAPALGLPDLTKPFELFVDEKQGYAKGVLTQKLGPWRRPVAYLSKKLDPVAAGWPPCLRMVAAIAVLTKDAGKLTMGQPLVILAPHAVEALVKQPPDRWLSNARMTHYQALLLDTDRVQFGPVVALNPATLLPLPEEGLQHNCLDILAEAHGTRPDLTDQPLPDADHTWYTDGSSLLQEGQRKAGAAVTTETEVIWAKALPAGTSAQRAELIALTQALKMAEGKKLNVYTDSRYAFATAHIHGEIYRRRGWLTSEGKEIKNKDEILALLKALFLPKRLSIIHCPGHQKGHSAEARGNRMADQAARKAAITETPDTSTLLIENSSPSGGSKRTADGSEFEAGKRTADGSEFEKRTADGSEFESPKKKAKVE

SEQ ID NO: 2677 - protein, 2116 aa, synthetic construct
MPAAKRVKLDGGDKKYSIGLDIGTNSVGWAVITDEYKVPSKKFKVLGNTDRHSIKKNLIGALLFDSGETAEATRLKRTARRRYTRRKNRICYLQEIFSNEMAKVDDSFFHRLEESFLVEEDKKHERHPIFGNIVDEVAYHEKYPTIYHLRKKLVDSTDKADLRLIYLALAHMIKFRGHFLIEGDLNPDNSDVDKLFIQLVQTYNQLFEENPINASGVDAKAILSARLSKSRRLENLIAQLPGEKKNGLFGNLIALSLGLTPNFKSNFDLAEDAKLQLSKDTYDDDLDNLLAQIGDQYADLFLAAKNLSDAILLSDILRVNTEITKAPLSASMIKRYDEHHQDLTLLKALVRQQLPEKYKEIFFDQSKNGYAGYIDGGASQEEFYKFIKPILEKMDGTEELLVKLNREDLLRKQRTFDNGSIPHQIHLGELHAILRRQEDFYPFLKDNREKIEKILTFRIPYYVGPLARGNSRFAWMTRKSEETITPWNFEEVVDKGASAQSFIERMTNFDKNLPNEKVLPKHSLLYEYFTVYNELTKVKYVTEGMRKPAFLSGEQKKAIVDLLFKTNRKVTVKQLKEDYFKKIECFDSVEISGVEDRFNASLGTYHDLLKIIKDKDFLDNEENEDILEDIVLTLTLFEDREMIEERLKTYAHLFDDKVMKQLKRRRYTGWGRLSRKLINGIRDKQSGKTILDFLKSDGFANRNFMQLIHDDSLTFKEDIQKAQVSGQGDSLHEHIANLAGSPAIKKGILQTVKVVDELVKVMGRHKPENIVIEMARENQTTQKGQKNSRERMKRIEEGIKELGSQILKEHPVENTQLQNEKLYLYYLQNGRDMYVDQELDINRLSDYDVDHIVPQSFLKDDSIDNKVLTRSDKARGKSDNVPSEEVVKKMKNYWRQLLNAKLITQRKFDNLTKAERGGLSELDKAGFIKRQLVETRQITKHVAQILDSRMNTKYDENDKLIREVKVITLKSKLVSDFRKDFQFYKVREINNYHHAHDAYLNAVVGTALIKKYPKLESEFVYGDYKVYDVRKMIAKSEQEIGKATAKYFFYSNIMNFFKTEITLANGEIRKRPLIETNGETGEIVWDKGRDFATVRKVLSMPQVNIVKKTEVQTGGFSKESILPKRNSDKLIARKKDWDPKKYGGFDSPTVAYSVLVVAKVEKGKSKKLKSVKELLGITIMERSSFEKNPIDFLEAKGYKEVKKDLIIKLPKYSLFELENGRKRMLASAGELQKGNELALPSKYVNFLYLASHYEKLKGSPEDNEQKQLFVEQHKHYLDEIIEQISEFSKRVILADANLDKVLSAYNKHRDKPIREQAENIIHLFTLTNLGAPAAFKYFDTTIDRKRYTSTKEVLDATLIHQSITGLYETRIDLSQLGGDGGGGGEAAAKGSSGGTLNIEDEYRLHETSKEPDVSLGSTWLSDFPQAWAETGGMGLAVRQAPLIIPLKATSTPVSIKQYPMSQEARLGIKPHIQRLLDQGILVPCQSPWNTPLLPVKKPGTNDYRPVQDLREVNKRVEDIHPTVPNPYNLLSGLPPSHQWYTVLDLKDAFFCLRLHPTSQPLFAFEWRDPEMGISGQLTWTRLPQGFKNSPTLFNEALHRDLADFRIQHPDLILLQYVDDLLLAATSELDCQQGTRALLQTLGNLGYRASAKKAQICQKQVKYLGYLLKEGQRWLTEARKETVMGQPTPKTPRQLREFLGKAGFCRLFIPGFAEMAAPLYPLTKPGTLFNWGPDQQKAYQEIKQALLTAPALGLPDLTKPFELFVDEKQGYAKGVLTQKLGPWRRPVAYLSKKLDPVAAGWPPCLRMVAAIAVLTKDAGKLTMGQPLVILAPHAVEALVKQPPDRWLSNARMTHYQALLLDTDRVQFGPVVALNPATLLPLPEEGLQHNCLDILAEAHGTRPDLTDQPLPDADHTWYTDGSSLLQEGQRKAGAAVTTETEVIWAKALPAGTSAQRAELIALTQALKMAEGKKLNVYTDSRYAFATAHIHGEIYRRRGWLTSEGKEIKNKDEILALLKALFLPKRLSIIHCPGHQKGHSAEARGNRMADQAARKAAITETPDTSTLLIENSSPSGGSKRTADGSEFEAGKRTADGSEFEKRTADGSEFESPKKKAKVE

SEQ ID NO: 2678 - protein, 2130 aa, synthetic construct
MPAAKRVKLDGGDKKYSIGLDIGTNSVGWAVITDEYKVPSKKFKVLGNTDRHSIKKNLIGALLFDSGETAEATRLKRTARRRYTRRKNRICYLQEIFSNEMAKVDDSFFHRLEESFLVEEDKKHERHPIFGNIVDEVAYHEKYPTIYHLRKKLVDSTDKADLRLIYLALAHMIKFRGHFLIEGDLNPDNSDVDKLFIQLVQTYNQLFEENPINASGVDAKAILSARLSKSRRLENLIAQLPGEKKNGLFGNLIALSLGLTPNFKSNFDLAEDAKLQLSKDTYDDDLDNLLAQIGDQYADLFLAAKNLSDAILLSDILRVNTEITKAPLSASMIKRYDEHHQDLTLLKALVRQQLPEKYKEIFFDQSKNGYAGYIDGGASQEEFYKFIKPILEKMDGTEELLVKLNREDLLRKQRTFDNGSIPHQIHLGELHAILRRQEDFYPFLKDNREKIEKILTFRIPYYVGPLARGNSRFAWMTRKSEETITPWNFEEVVDKGASAQSFIERMTNFDKNLPNEKVLPKHSLLYEYFTVYNELTKVKYVTEGMRKPAFLSGEQKKAIVDLLFKTNRKVTVKQLKEDYFKKIECFDSVEISGVEDRFNASLGTYHDLLKIIKDKDFLDNEENEDILEDIVLTLTLFEDREMIEERLKTYAHLFDDKVMKQLKRRRYTGWGRLSRKLINGIRDKQSGKTILDFLKSDGFANRNFMQLIHDDSLTFKEDIQKAQVSGQGDSLHEHIANLAGSPAIKKGILQTVKVVDELVKVMGRHKPENIVIEMARENQTTQKGQKNSRERMKRIEEGIKELGSQILKEHPVENTQLQNEKLYLYYLQNGRDMYVDQELDINRLSDYDVDHIVPQSFLKDDSIDNKVLTRSDKARGKSDNVPSEEVVKKMKNYWRQLLNAKLITQRKFDNLTKAERGGLSELDKAGFIKRQLVETRQITKHVAQILDSRMNTKYDENDKLIREVKVITLKSKLVSDFRKDFQFYKVREINNYHHAHDAYLNAVVGTALIKKYPKLESEFVYGDYKVYDVRKMIAKSEQEIGKATAKYFFYSNIMNFFKTEITLANGEIRKRPLIETNGETGEIVWDKGRDFATVRKVLSMPQVNIVKKTEVQTGGFSKESILPKRNSDKLIARKKDWDPKKYGGFDSPTVAYSVLVVAKVEKGKSKKLKSVKELLGITIMERSSFEKNPIDFLEAKGYKEVKKDLIIKLPKYSLFELENGRKRMLASAGELQKGNELALPSKYVNFLYLASHYEKLKGSPEDNEQKQLFVEQHKHYLDEIIEQISEFSKRVILADANLDKVLSAYNKHRDKPIREQAENIIHLFTLTNLGAPAAFKYFDTTIDRKRYTSTKEVLDATLIHQSITGLYETRIDLSQLGGDGGEAAAKEAAAKEAAAKEAAAKEAAAKGGTLNIEDEYRLHETSKEPDVSLGSTWLSDFPQAWAETGGMGLAVRQAPLIIPLKATSTPVSIKQYPMSQEARLGIKPHIQRLLDQGILVPCQSPWNTPLLPVKKPGTNDYRPVQDLREVNKRVEDIHPTVPNPYNLLSGLPPSHQWYTVLDLKDAFFCLRLHPTSQPLFAFEWRDPEMGISGQLTWTRLPQGFKNSPTLFNEALHRDLADFRIQHPDLILLQYVDDLLLAATSELDCQQGTRALLQTLGNLGYRASAKKAQICQKQVKYLGYLLKEGQRWLTEARKETVMGQPTPKTPRQLREFLGKAGFCRLFIPGFAEMAAPLYPLTKPGTLFNWGPDQQKAYQEIKQALLTAPALGLPDLTKPFELFVDEKQGYAKGVLTQKLGPWRRPVAYLSKKLDPVAAGWPPCLRMVAAIAVLTKDAGKLTMGQPLVILAPHAVEALVKQPPDRWLSNARMTHYQALLLDTDRVQFGPVVALNPATLLPLPEEGLQHNCLDILAEAHGTRPDLTDQPLPDADHTWYTDGSSLLQEGQRKAGAAVTTETEVIWAKALPAGTSAQRAELIALTQALKMAEGKKLNVYTDSRYAFATAHIHGEIYRRRGWLTSEGKEIKNKDEILALLKALFLPKRLSIIHCPGHQKGHSAEARGNRMADQAARKAAITETPDTSTLLIENSSPSGGSKRTADGSEFEAGKRTADGSEFEKRTADGSEFESPKKKAKVE

SEQ ID NO: 2679 - protein, 2114 aa, synthetic construct
MPAAKRVKLDGGDKKYSIGLDIGTNSVGWAVITDEYKVPSKKFKVLGNTDRHSIKKNLIGALLFDSGETAEATRLKRTARRRYTRRKNRICYLQEIFSNEMAKVDDSFFHRLEESFLVEEDKKHERHPIFGNIVDEVAYHEKYPTIYHLRKKLVDSTDKADLRLIYLALAHMIKFRGHFLIEGDLNPDNSDVDKLFIQLVQTYNQLFEENPINASGVDAKAILSARLSKSRRLENLIAQLPGEKKNGLFGNLIALSLGLTPNFKSNFDLAEDAKLQLSKDTYDDDLDNLLAQIGDQYADLFLAAKNLSDAILLSDILRVNTEITKAPLSASMIKRYDEHHQDLTLLKALVRQQLPEKYKEIFFDQSKNGYAGYIDGGASQEEFYKFIKPILEKMDGTEELLVKLNREDLLRKQRTFDNGSIPHQIHLGELHAILRRQEDFYPFLKDNREKIEKILTFRIPYYVGPLARGNSRFAWMTRKSEETITPWNFEEVVDKGASAQSFIERMTNFDKNLPNEKVLPKHSLLYEYFTVYNELTKVKYVTEGMRKPAFLSGEQKKAIVDLLFKTNRKVTVKQLKEDYFKKIECFDSVEISGVEDRFNASLGTYHDLLKIIKDKDFLDNEENEDILEDIVLTLTLFEDREMIEERLKTYAHLFDDKVMKQLKRRRYTGWGRLSRKLINGIRDKQSGKTILDFLKSDGFANRNFMQLIHDDSLTFKEDIQKAQVSGQGDSLHEHIANLAGSPAIKKGILQTVKVVDELVKVMGRHKPENIVIEMARENQTTQKGQKNSRERMKRIEEGIKELGSQILKEHPVENTQLQNEKLYLYYLQNGRDMYVDQELDINRLSDYDVDHIVPQSFLKDDSIDNKVLTRSDKARGKSDNVPSEEVVKKMKNYWRQLLNAKLITQRKFDNLTKAERGGLSELDKAGFIKRQLVETRQITKHVAQILDSRMNTKYDENDKLIREVKVITLKSKLVSDFRKDFQFYKVREINNYHHAHDAYLNAVVGTALIKKYPKLESEFVYGDYKVYDVRKMIAKSEQEIGKATAKYFFYSNIMNFFKTEITLANGEIRKRPLIETNGETGEIVWDKGRDFATVRKVLSMPQVNIVKKTEVQTGGFSKESILPKRNSDKLIARKKDWDPKKYGGFDSPTVAYSVLVVAKVEKGKSKKLKSVKELLGITIMERSSFEKNPIDFLEAKGYKEVKKDLIIKLPKYSLFELENGRKRMLASAGELQKGNELALPSKYVNFLYLASHYEKLKGSPEDNEQKQLFVEQHKHYLDEIIEQISEFSKRVILADANLDKVLSAYNKHRDKPIREQAENIIHLFTLTNLGAPAAFKYFDTTIDRKRYTSTKEVLDATLIHQSITGLYETRIDLSQLGGDGGGGSGSSPAPGGTLNIEDEYRLHETSKEPDVSLGSTWLSDFPQAWAETGGMGLAVRQAPLIIPLKATSTPVSIKQYPMSQEARLGIKPHIQRLLDQGILVPCQSPWNTPLLPVKKPGTNDYRPVQDLREVNKRVEDIHPTVPNPYNLLSGLPPSHQWYTVLDLKDAFFCLRLHPTSQPLFAFEWRDPEMGISGQLTWTRLPQGFKNSPTLFNEALHRDLADFRIQHPDLILLQYVDDLLLAATSELDCQQGTRALLQTLGNLGYRASAKKAQICQKQVKYLGYLLKEGQRWLTEARKETVMGQPTPKTPRQLREFLGKAGFCRLFIPGFAEMAAPLYPLTKPGTLFNWGPDQQKAYQEIKQALLTAPALGLPDLTKPFELFVDEKQGYAKGVLTQKLGPWRRPVAYLSKKLDPVAAGWPPCLRMVAAIAVLTKDAGKLTMGQPLVILAPHAVEALVKQPPDRWLSNARMTHYQALLLDTDRVQFGPVVALNPATLLPLPEEGLQHNCLDILAEAHGTRPDLTDQPLPDADHTWYTDGSSLLQEGQRKAGAAVTTETEVIWAKALPAGTSAQRAELIALTQALKMAEGKKLNVYTDSRYAFATAHIHGEIYRRRGWLTSEGKEIKNKDEILALLKALFLPKRLSIIHCPGHQKGHSAEARGNRMADQAARKAAITETPDTSTLLIENSSPSGGSKRTADGSEFEAGKRTADGSEFEKRTADGSEFESPKKKAKVE

SEQ ID NO: 2680 - protein, 2120 aa, synthetic construct
MPAAKRVKLDGGDKKYSIGLDIGTNSVGWAVITDEYKVPSKKFKVLGNTDRHSIKKNLIGALLFDSGETAEATRLKRTARRRYTRRKNRICYLQEIFSNEMAKVDDSFFHRLEESFLVEEDKKHERHPIFGNIVDEVAYHEKYPTIYHLRKKLVDSTDKADLRLIYLALAHMIKFRGHFLIEGDLNPDNSDVDKLFIQLVQTYNQLFEENPINASGVDAKAILSARLSKSRRLENLIAQLPGEKKNGLFGNLIALSLGLTPNFKSNFDLAEDAKLQLSKDTYDDDLDNLLAQIGDQYADLFLAAKNLSDAILLSDILRVNTEITKAPLSASMIKRYDEHHQDLTLLKALVRQQLPEKYKEIFFDQSKNGYAGYIDGGASQEEFYKFIKPILEKMDGTEELLVKLNREDLLRKQRTFDNGSIPHQIHLGELHAILRRQEDFYPFLKDNREKIEKILTFRIPYYVGPLARGNSRFAWMTRKSEETITPWNFEEVVDKGASAQSFIERMTNFDKNLPNEKVLPKHSLLYEYFTVYNELTKVKYVTEGMRKPAFLSGEQKKAIVDLLFKTNRKVTVKQLKEDYFKKIECFDSVEISGVEDRFNASLGTYHDLLKIIKDKDFLDNEENEDILEDIVLTLTLFEDREMIEERLKTYAHLFDDKVMKQLKRRRYTGWGRLSRKLINGIRDKQSGKTILDFLKSDGFANRNFMQLIHDDSLTFKEDIQKAQVSGQGDSLHEHIANLAGSPAIKKGILQTVKVVDELVKVMGRHKPENIVIEMARENQTTQKGQKNSRERMKRIEEGIKELGSQILKEHPVENTQLQNEKLYLYYLQNGRDMYVDQELDINRLSDYDVDHIVPQSFLKDDSIDNKVLTRSDKARGKSDNVPSEEVVKKMKNYWRQLLNAKLITQRKFDNLTKAERGGLSELDKAGFIKRQLVETRQITKHVAQILDSRMNTKYDENDKLIREVKVITLKSKLVSDFRKDFQFYKVREINNYHHAHDAYLNAVVGTALIKKYPKLESEFVYGDYKVYDVRKMIAKSEQEIGKATAKYFFYSNIMNFFKTEITLANGEIRKRPLIETNGETGEIVWDKGRDFATVRKVLSMPQVNIVKKTEVQTGGFSKESILPKRNSDKLIARKKDWDPKKYGGFDSPTVAYSVLVVAKVEKGKSKKLKSVKELLGITIMERSSFEKNPIDFLEAKGYKEVKKDLIIKLPKYSLFELENGRKRMLASAGELQKGNELALPSKYVNFLYLASHYEKLKGSPEDNEQKQLFVEQHKHYLDEIIEQISEFSKRVILADANLDKVLSAYNKHRDKPIREQAENIIHLFTLTNLGAPAAFKYFDTTIDRKRYTSTKEVLDATLIHQSITGLYETRIDLSQLGGDGGGGSGGSGGSGGSGGSGGTLNIEDEYRLHETSKEPDVSLGSTWLSDFPQAWAETGGMGLAVRQAPLIIPLKATSTPVSIKQYPMSQEARLGIKPHIQRLLDQGILVPCQSPWNTPLLPVKKPGTNDYRPVQDLREVNKRVEDIHPTVPNPYNLLSGLPPSHQWYTVLDLKDAFFCLRLHPTSQPLFAFEWRDPEMGISGQLTWTRLPQGFKNSPTLFNEALHRDLADFRIQHPDLILLQYVDDLLLAATSELDCQQGTRALLQTLGNLGYRASAKKAQICQKQVKYLGYLLKEGQRWLTEARKETVMGQPTPKTPRQLREFLGKAGFCRLFIPGFAEMAAPLYPLTKPGTLFNWGPDQQKAYQEIKQALLTAPALGLPDLTKPFELFVDEKQGYAKGVLTQKLGPWRRPVAYLSKKLDPVAAGWPPCLRMVAAIAVLTKDAGKLTMGQPLVILAPHAVEALVKQPPDRWLSNARMTHYQALLLDTDRVQFGPVVALNPATLLPLPEEGLQHNCLDILAEAHGTRPDLTDQPLPDADHTWYTDGSSLLQEGQRKAGAAVTTETEVIWAKALPAGTSAQRAELIALTQALKMAEGKKLNVYTDSRYAFATAHIHGEIYRRRGWLTSEGKEIKNKDEILALLKALFLPKRLSIIHCPGHQKGHSAEARGNRMADQAARKAAITETPDTSTLLIENSSPSGGSKRTADGSEFEAGKRTADGSEFEKRTADGSEFESPKKKAKVE

SEQ ID NO: 2681 - protein, 2116 aa, synthetic construct
MPAAKRVKLDGGDKKYSIGLDIGTNSVGWAVITDEYKVPSKKFKVLGNTDRHSIKKNLIGALLFDSGETAEATRLKRTARRRYTRRKNRICYLQEIFSNEMAKVDDSFFHRLEESFLVEEDKKHERHPIFGNIVDEVAYHEKYPTIYHLRKKLVDSTDKADLRLIYLALAHMIKFRGHFLIEGDLNPDNSDVDKLFIQLVQTYNQLFEENPINASGVDAKAILSARLSKSRRLENLIAQLPGEKKNGLFGNLIALSLGLTPNFKSNFDLAEDAKLQLSKDTYDDDLDNLLAQIGDQYADLFLAAKNLSDAILLSDILRVNTEITKAPLSASMIKRYDEHHQDLTLLKALVRQQLPEKYKEIFFDQSKNGYAGYIDGGASQEEFYKFIKPILEKMDGTEELLVKLNREDLLRKQRTFDNGSIPHQIHLGELHAILRRQEDFYPFLKDNREKIEKILTFRIPYYVGPLARGNSRFAWMTRKSEETITPWNFEEVVDKGASAQSFIERMTNFDKNLPNEKVLPKHSLLYEYFTVYNELTKVKYVTEGMRKPAFLSGEQKKAIVDLLFKTNRKVTVKQLKEDYFKKIECFDSVEISGVEDRFNASLGTYHDLLKIIKDKDFLDNEENEDILEDIVLTLTLFEDREMIEERLKTYAHLFDDKVMKQLKRRRYTGWGRLSRKLINGIRDKQSGKTILDFLKSDGFANRNFMQLIHDDSLTFKEDIQKAQVSGQGDSLHEHIANLAGSPAIKKGILQTVKVVDELVKVMGRHKPENIVIEMARENQTTQKGQKNSRERMKRIEEGIKELGSQILKEHPVENTQLQNEKLYLYYLQNGRDMYVDQELDINRLSDYDVDHIVPQSFLKDDSIDNKVLTRSDKARGKSDNVPSEEVVKKMKNYWRQLLNAKLITQRKFDNLTKAERGGLSELDKAGFIKRQLVETRQITKHVAQILDSRMNTKYDENDKLIREVKVITLKSKLVSDFRKDFQFYKVREINNYHHAHDAYLNAVVGTALIKKYPKLESEFVYGDYKVYDVRKMIAKSEQEIGKATAKYFFYSNIMNFFKTEITLANGEIRKRPLIETNGETGEIVWDKGRDFATVRKVLSMPQVNIVKKTEVQTGGFSKESILPKRNSDKLIARKKDWDPKKYGGFDSPTVAYSVLVVAKVEKGKSKKLKSVKELLGITIMERSSFEKNPIDFLEAKGYKEVKKDLIIKLPKYSLFELENGRKRMLASAGELQKGNELALPSKYVNFLYLASHYEKLKGSPEDNEQKQLFVEQHKHYLDEIIEQISEFSKRVILADANLDKVLSAYNKHRDKPIREQAENIIHLFTLTNLGAPAAFKYFDTTIDRKRYTSTKEVLDATLIHQSITGLYETRIDLSQLGGDGGEAAAKPAPGGGGGTLNIEDEYRLHETSKEPDVSLGSTWLSDFPQAWAETGGMGLAVRQAPLIIPLKATSTPVSIKQYPMSQEARLGIKPHIQRLLDQGILVPCQSPWNTPLLPVKKPGTNDYRPVQDLREVNKRVEDIHPTVPNPYNLLSGLPPSHQWYTVLDLKDAFFCLRLHPTSQPLFAFEWRDPEMGISGQLTWTRLPQGFKNSPTLFNEALHRDLADFRIQHPDLILLQYVDDLLLAATSELDCQQGTRALLQTLGNLGYRASAKKAQICQKQVKYLGYLLKEGQRWLTEARKETVMGQPTPKTPRQLREFLGKAGFCRLFIPGFAEMAAPLYPLTKPGTLFNWGPDQQKAYQEIKQALLTAPALGLPDLTKPFELFVDEKQGYAKGVLTQKLGPWRRPVAYLSKKLDPVAAGWPPCLRMVAAIAVLTKDAGKLTMGQPLVILAPHAVEALVKQPPDRWLSNARMTHYQALLLDTDRVQFGPVVALNPATLLPLPEEGLQHNCLDILAEAHGTRPDLTDQPLPDADHTWYTDGSSLLQEGQRKAGAAVTTETEVIWAKALPAGTSAQRAELIALTQALKMAEGKKLNVYTDSRYAFATAHIHGEIYRRRGWLTSEGKEIKNKDEILALLKALFLPKRLSIIHCPGHQKGHSAEARGNRMADQAARKAAITETPDTSTLLIENSSPSGGSKRTADGSEFEAGKRTADGSEFEKRTADGSEFESPKKKAKVE

SEQ ID NO: 2682 - protein, 2111 aa, synthetic construct
MPAAKRVKLDGGDKKYSIGLDIGTNSVGWAVITDEYKVPSKKFKVLGNTDRHSIKKNLIGALLFDSGETAEATRLKRTARRRYTRRKNRICYLQEIFSNEMAKVDDSFFHRLEESFLVEEDKKHERHPIFGNIVDEVAYHEKYPTIYHLRKKLVDSTDKADLRLIYLALAHMIKFRGHFLIEGDLNPDNSDVDKLFIQLVQTYNQLFEENPINASGVDAKAILSARLSKSRRLENLIAQLPGEKKNGLFGNLIALSLGLTPNFKSNFDLAEDAKLQLSKDTYDDDLDNLLAQIGDQYADLFLAAKNLSDAILLSDILRVNTEITKAPLSASMIKRYDEHHQDLTLLKALVRQQLPEKYKEIFFDQSKNGYAGYIDGGASQEEFYKFIKPILEKMDGTEELLVKLNREDLLRKQRTFDNGSIPHQIHLGELHAILRRQEDFYPFLKDNREKIEKILTFRIPYYVGPLARGNSRFAWMTRKSEETITPWNFEEVVDKGASAQSFIERMTNFDKNLPNEKVLPKHSLLYEYFTVYNELTKVKYVTEGMRKPAFLSGEQKKAIVDLLFKTNRKVTVKQLKEDYFKKIECFDSVEISGVEDRFNASLGTYHDLLKIIKDKDFLDNEENEDILEDIVLTLTLFEDREMIEERLKTYAHLFDDKVMKQLKRRRYTGWGRLSRKLINGIRDKQSGKTILDFLKSDGFANRNFMQLIHDDSLTFKEDIQKAQVSGQGDSLHEHIANLAGSPAIKKGILQTVKVVDELVKVMGRHKPENIVIEMARENQTTQKGQKNSRERMKRIEEGIKELGSQILKEHPVENTQLQNEKLYLYYLQNGRDMYVDQELDINRLSDYDVDHIVPQSFLKDDSIDNKVLTRSDKARGKSDNVPSEEVVKKMKNYWRQLLNAKLITQRKFDNLTKAERGGLSELDKAGFIKRQLVETRQITKHVAQILDSRMNTKYDENDKLIREVKVITLKSKLVSDFRKDFQFYKVREINNYHHAHDAYLNAVVGTALIKKYPKLESEFVYGDYKVYDVRKMIAKSEQEIGKATAKYFFYSNIMNFFKTEITLANGEIRKRPLIETNGETGEIVWDKGRDFATVRKVLSMPQVNIVKKTEVQTGGFSKESILPKRNSDKLIARKKDWDPKKYGGFDSPTVAYSVLVVAKVEKGKSKKLKSVKELLGITIMERSSFEKNPIDFLEAKGYKEVKKDLIIKLPKYSLFELENGRKRMLASAGELQKGNELALPSKYVNFLYLASHYEKLKGSPEDNEQKQLFVEQHKHYLDEIIEQISEFSKRVILADANLDKVLSAYNKHRDKPIREQAENIIHLFTLTNLGAPAAFKYFDTTIDRKRYTSTKEVLDATLIHQSITGLYETRIDLSQLGGDGGGSSGGSGGTLNIEDEYRLHETSKEPDVSLGSTWLSDFPQAWAETGGMGLAVRQAPLIIPLKATSTPVSIKQYPMSQEARLGIKPHIQRLLDQGILVPCQSPWNTPLLPVKKPGTNDYRPVQDLREVNKRVEDIHPTVPNPYNLLSGLPPSHQWYTVLDLKDAFFCLRLHPTSQPLFAFEWRDPEMGISGQLTWTRLPQGFKNSPTLFNEALHRDLADFRIQHPDLILLQYVDDLLLAATSELDCQQGTRALLQTLGNLGYRASAKKAQICQKQVKYLGYLLKEGQRWLTEARKETVMGQPTPKTPRQLREFLGKAGFCRLFIPGFAEMAAPLYPLTKPGTLFNWGPDQQKAYQEIKQALLTAPALGLPDLTKPFELFVDEKQGYAKGVLTQKLGPWRRPVAYLSKKLDPVAAGWPPCLRMVAAIAVLTKDAGKLTMGQPLVILAPHAVEALVKQPPDRWLSNARMTHYQALLLDTDRVQFGPVVALNPATLLPLPEEGLQHNCLDILAEAHGTRPDLTDQPLPDADHTWYTDGSSLLQEGQRKAGAAVTTETEVIWAKALPAGTSAQRAELIALTQALKMAEGKKLNVYTDSRYAFATAHIHGEIYRRRGWLTSEGKEIKNKDEILALLKALFLPKRLSIIHCPGHQKGHSAEARGNRMADQAARKAAITETPDTSTLLIENSSPSGGSKRTADGSEFEAGKRTADGSEFEKRTADGSEFESPKKKAKVE

SEQ ID NO: 2683 - protein, 2116 aa, synthetic construct
MPAAKRVKLDGGDKKYSIGLDIGTNSVGWAVITDEYKVPSKKFKVLGNTDRHSIKKNLIGALLFDSGETAEATRLKRTARRRYTRRKNRICYLQEIFSNEMAKVDDSFFHRLEESFLVEEDKKHERHPIFGNIVDEVAYHEKYPTIYHLRKKLVDSTDKADLRLIYLALAHMIKFRGHFLIEGDLNPDNSDVDKLFIQLVQTYNQLFEENPINASGVDAKAILSARLSKSRRLENLIAQLPGEKKNGLFGNLIALSLGLTPNFKSNFDLAEDAKLQLSKDTYDDDLDNLLAQIGDQYADLFLAAKNLSDAILLSDILRVNTEITKAPLSASMIKRYDEHHQDLTLLKALVRQQLPEKYKEIFFDQSKNGYAGYIDGGASQEEFYKFIKPILEKMDGTEELLVKLNREDLLRKQRTFDNGSIPHQIHLGELHAILRRQEDFYPFLKDNREKIEKILTFRIPYYVGPLARGNSRFAWMTRKSEETITPWNFEEVVDKGASAQSFIERMTNFDKNLPNEKVLPKHSLLYEYFTVYNELTKVKYVTEGMRKPAFLSGEQKKAIVDLLFKTNRKVTVKQLKEDYFKKIECFDSVEISGVEDRFNASLGTYHDLLKIIKDKDFLDNEENEDILEDIVLTLTLFEDREMIEERLKTYAHLFDDKVMKQLKRRRYTGWGRLSRKLINGIRDKQSGKTILDFLKSDGFANRNFMQLIHDDSLTFKEDIQKAQVSGQGDSLHEHIANLAGSPAIKKGILQTVKVVDELVKVMGRHKPENIVIEMARENQTTQKGQKNSRERMKRIEEGIKELGSQILKEHPVENTQLQNEKLYLYYLQNGRDMYVDQELDINRLSDYDVDHIVPQSFLKDDSIDNKVLTRSDKARGKSDNVPSEEVVKKMKNYWRQLLNAKLITQRKFDNLTKAERGGLSELDKAGFIKRQLVETRQITKHVAQILDSRMNTKYDENDKLIREVKVITLKSKLVSDFRKDFQFYKVREINNYHHAHDAYLNAVVGTALIKKYPKLESEFVYGDYKVYDVRKMIAKSEQEIGKATAKYFFYSNIMNFFKTEITLANGEIRKRPLIETNGETGEIVWDKGRDFATVRKVLSMPQVNIVKKTEVQTGGFSKESILPKRNSDKLIARKKDWDPKKYGGFDSPTVAYSVLVVAKVEKGKSKKLKSVKELLGITIMERSSFEKNPIDFLEAKGYKEVKKDLIIKLPKYSLFELENGRKRMLASAGELQKGNELALPSKYVNFLYLASHYEKLKGSPEDNEQKQLFVEQHKHYLDEIIEQISEFSKRVILADANLDKVLSAYNKHRDKPIREQAENIIHLFTLTNLGAPAAFKYFDTTIDRKRYTSTKEVLDATLIHQSITGLYETRIDLSQLGGDGGEAAAKGSSGGSGGTLNIEDEYRLHETSKEPDVSLGSTWLSDFPQAWAETGGMGLAVRQAPLIIPLKATSTPVSIKQYPMSQEARLGIKPHIQRLLDQGILVPCQSPWNTPLLPVKKPGTNDYRPVQDLREVNKRVEDIHPTVPNPYNLLSGLPPSHQWYTVLDLKDAFFCLRLHPTSQPLFAFEWRDPEMGISGQLTWTRLPQGFKNSPTLFNEALHRDLADFRIQHPDLILLQYVDDLLLAATSELDCQQGTRALLQTLGNLGYRASAKKAQICQKQVKYLGYLLKEGQRWLTEARKETVMGQPTPKTPRQLREFLGKAGFCRLFIPGFAEMAAPLYPLTKPGTLFNWGPDQQKAYQEIKQALLTAPALGLPDLTKPFELFVDEKQGYAKGVLTQKLGPWRRPVAYLSKKLDPVAAGWPPCLRMVAAIAVLTKDAGKLTMGQPLVILAPHAVEALVKQPPDRWLSNARMTHYQALLLDTDRVQFGPVVALNPATLLPLPEEGLQHNCLDILAEAHGTRPDLTDQPLPDADHTWYTDGSSLLQEGQRKAGAAVTTETEVIWAKALPAGTSAQRAELIALTQALKMAEGKKLNVYTDSRYAFATAHIHGEIYRRRGWLTSEGKEIKNKDEILALLKALFLPKRLSIIHCPGHQKGHSAEARGNRMADQAARKAAITETPDTSTLLIENSSPSGGSKRTADGSEFEAGKRTADGSEFEKRTADGSEFESPKKKAKVE

SEQ ID NO: 2684 - protein, 2114 aa, synthetic construct
MPAAKRVKLDGGDKKYSIGLDIGTNSVGWAVITDEYKVPSKKFKVLGNTDRHSIKKNLIGALLFDSGETAEATRLKRTARRRYTRRKNRICYLQEIFSNEMAKVDDSFFHRLEESFLVEEDKKHERHPIFGNIVDEVAYHEKYPTIYHLRKKLVDSTDKADLRLIYLALAHMIKFRGHFLIEGDLNPDNSDVDKLFIQLVQTYNQLFEENPINASGVDAKAILSARLSKSRRLENLIAQLPGEKKNGLFGNLIALSLGLTPNFKSNFDLAEDAKLQLSKDTYDDDLDNLLAQIGDQYADLFLAAKNLSDAILLSDILRVNTEITKAPLSASMIKRYDEHHQDLTLLKALVRQQLPEKYKEIFFDQSKNGYAGYIDGGASQEEFYKFIKPILEKMDGTEELLVKLNREDLLRKQRTFDNGSIPHQIHLGELHAILRRQEDFYPFLKDNREKIEKILTFRIPYYVGPLARGNSRFAWMTRKSEETITPWNFEEVVDKGASAQSFIERMTNFDKNLPNEKVLPKHSLLYEYFTVYNELTKVKYVTEGMRKPAFLSGEQKKAIVDLLFKTNRKVTVKQLKEDYFKKIECFDSVEISGVEDRFNASLGTYHDLLKIIKDKDFLDNEENEDILEDIVLTLTLFEDREMIEERLKTYAHLFDDKVMKQLKRRRYTGWGRLSRKLINGIRDKQSGKTILDFLKSDGFANRNFMQLIHDDSLTFKEDIQKAQVSGQGDSLHEHIANLAGSPAIKKGILQTVKVVDELVKVMGRHKPENIVIEMARENQTTQKGQKNSRERMKRIEEGIKELGSQILKEHPVENTQLQNEKLYLYYLQNGRDMYVDQELDINRLSDYDVDHIVPQSFLKDDSIDNKVLTRSDKARGKSDNVPSEEVVKKMKNYWRQLLNAKLITQRKFDNLTKAERGGLSELDKAGFIKRQLVETRQITKHVAQILDSRMNTKYDENDKLIREVKVITLKSKLVSDFRKDFQFYKVREINNYHHAHDAYLNAVVGTALIKKYPKLESEFVYGDYKVYDVRKMIAKSEQEIGKATAKYFFYSNIMNFFKTEITLANGEIRKRPLIETNGETGEIVWDKGRDFATVRKVLSMPQVNIVKKTEVQTGGFSKESILPKRNSDKLIARKKDWDPKKYGGFDSPTVAYSVLVVAKVEKGKSKKLKSVKELLGITIMERSSFEKNPIDFLEAKGYKEVKKDLIIKLPKYSLFELENGRKRMLASAGELQKGNELALPSKYVNFLYLASHYEKLKGSPEDNEQKQLFVEQHKHYLDEIIEQISEFSKRVILADANLDKVLSAYNKHRDKPIREQAENIIHLFTLTNLGAPAAFKYFDTTIDRKRYTSTKEVLDATLIHQSITGLYETRIDLSQLGGDGGGGSPAPGSSGGTLNIEDEYRLHETSKEPDVSLGSTWLSDFPQAWAETGGMGLAVRQAPLIIPLKATSTPVSIKQYPMSQEARLGIKPHIQRLLDQGILVPCQSPWNTPLLPVKKPGTNDYRPVQDLREVNKRVEDIHPTVPNPYNLLSGLPPSHQWYTVLDLKDAFFCLRLHPTSQPLFAFEWRDPEMGISGQLTWTRLPQGFKNSPTLFNEALHRDLADFRIQHPDLILLQYVDDLLLAATSELDCQQGTRALLQTLGNLGYRASAKKAQICQKQVKYLGYLLKEGQRWLTEARKETVMGQPTPKTPRQLREFLGKAGFCRLFIPGFAEMAAPLYPLTKPGTLFNWGPDQQKAYQEIKQALLTAPALGLPDLTKPFELFVDEKQGYAKGVLTQKLGPWRRPVAYLSKKLDPVAAGWPPCLRMVAAIAVLTKDAGKLTMGQPLVILAPHAVEALVKQPPDRWLSNARMTHYQALLLDTDRVQFGPVVALNPATLLPLPEEGLQHNCLDILAEAHGTRPDLTDQPLPDADHTWYTDGSSLLQEGQRKAGAAVTTETEVIWAKALPAGTSAQRAELIALTQALKMAEGKKLNVYTDSRYAFATAHIHGEIYRRRGWLTSEGKEIKNKDEILALLKALFLPKRLSIIHCPGHQKGHSAEARGNRMADQAARKAAITETPDTSTLLIENSSPSGGSKRTADGSEFEAGKRTADGSEFEKRTADGSEFESPKKKAKVE

SEQ ID NO: 2685 - protein, 2114 aa, synthetic construct
MPAAKRVKLDGGDKKYSIGLDIGTNSVGWAVITDEYKVPSKKFKVLGNTDRHSIKKNLIGALLFDSGETAEATRLKRTARRRYTRRKNRICYLQEIFSNEMAKVDDSFFHRLEESFLVEEDKKHERHPIFGNIVDEVAYHEKYPTIYHLRKKLVDSTDKADLRLIYLALAHMIKFRGHFLIEGDLNPDNSDVDKLFIQLVQTYNQLFEENPINASGVDAKAILSARLSKSRRLENLIAQLPGEKKNGLFGNLIALSLGLTPNFKSNFDLAEDAKLQLSKDTYDDDLDNLLAQIGDQYADLFLAAKNLSDAILLSDILRVNTEITKAPLSASMIKRYDEHHQDLTLLKALVRQQLPEKYKEIFFDQSKNGYAGYIDGGASQEEFYKFIKPILEKMDGTEELLVKLNREDLLRKQRTFDNGSIPHQIHLGELHAILRRQEDFYPFLKDNREKIEKILTFRIPYYVGPLARGNSRFAWMTRKSEETITPWNFEEVVDKGASAQSFIERMTNFDKNLPNEKVLPKHSLLYEYFTVYNELTKVKYVTEGMRKPAFLSGEQKKAIVDLLFKTNRKVTVKQLKEDYFKKIECFDSVEISGVEDRFNASLGTYHDLLKIIKDKDFLDNEENEDILEDIVLTLTLFEDREMIEERLKTYAHLFDDKVMKQLKRRRYTGWGRLSRKLINGIRDKQSGKTILDFLKSDGFANRNFMQLIHDDSLTFKEDIQKAQVSGQGDSLHEHIANLAGSPAIKKGILQTVKVVDELVKVMGRHKPENIVIEMARENQTTQKGQKNSRERMKRIEEGIKELGSQILKEHPVENTQLQNEKLYLYYLQNGRDMYVDQELDINRLSDYDVDHIVPQSFLKDDSIDNKVLTRSDKARGKSDNVPSEEVVKKMKNYWRQLLNAKLITQRKFDNLTKAERGGLSELDKAGFIKRQLVETRQITKHVAQILDSRMNTKYDENDKLIREVKVITLKSKLVSDFRKDFQFYKVREINNYHHAHDAYLNAVVGTALIKKYPKLESEFVYGDYKVYDVRKMIAKSEQEIGKATAKYFFYSNIMNFFKTEITLANGEIRKRPLIETNGETGEIVWDKGRDFATVRKVLSMPQVNIVKKTEVQTGGFSKESILPKRNSDKLIARKKDWDPKKYGGFDSPTVAYSVLVVAKVEKGKSKKLKSVKELLGITIMERSSFEKNPIDFLEAKGYKEVKKDLIIKLPKYSLFELENGRKRMLASAGELQKGNELALPSKYVNFLYLASHYEKLKGSPEDNEQKQLFVEQHKHYLDEIIEQISEFSKRVILADANLDKVLSAYNKHRDKPIREQAENIIHLFTLTNLGAPAAFKYFDTTIDRKRYTSTKEVLDATLIHQSITGLYETRIDLSQLGGDGGPAPGSSGGSGGTLNIEDEYRLHETSKEPDVSLGSTWLSDFPQAWAETGGMGLAVRQAPLIIPLKATSTPVSIKQYPMSQEARLGIKPHIQRLLDQGILVPCQSPWNTPLLPVKKPGTNDYRPVQDLREVNKRVEDIHPTVPNPYNLLSGLPPSHQWYTVLDLKDAFFCLRLHPTSQPLFAFEWRDPEMGISGQLTWTRLPQGFKNSPTLFNEALHRDLADFRIQHPDLILLQYVDDLLLAATSELDCQQGTRALLQTLGNLGYRASAKKAQICQKQVKYLGYLLKEGQRWLTEARKETVMGQPTPKTPRQLREFLGKAGFCRLFIPGFAEMAAPLYPLTKPGTLFNWGPDQQKAYQEIKQALLTAPALGLPDLTKPFELFVDEKQGYAKGVLTQKLGPWRRPVAYLSKKLDPVAAGWPPCLRMVAAIAVLTKDAGKLTMGQPLVILAPHAVEALVKQPPDRWLSNARMTHYQALLLDTDRVQFGPVVALNPATLLPLPEEGLQHNCLDILAEAHGTRPDLTDQPLPDADHTWYTDGSSLLQEGQRKAGAAVTTETEVIWAKALPAGTSAQRAELIALTQALKMAEGKKLNVYTDSRYAFATAHIHGEIYRRRGWLTSEGKEIKNKDEILALLKALFLPKRLSIIHCPGHQKGHSAEARGNRMADQAARKAAITETPDTSTLLIENSSPSGGSKRTADGSEFEAGKRTADGSEFEKRTADGSEFESPKKKAKVE

SEQ ID NO: 2686 - protein, 2116 aa, synthetic construct
MPAAKRVKLDGGDKKYSIGLDIGTNSVGWAVITDEYKVPSKKFKVLGNTDRHSIKKNLIGALLFDSGETAEATRLKRTARRRYTRRKNRICYLQEIFSNEMAKVDDSFFHRLEESFLVEEDKKHERHPIFGNIVDEVAYHEKYPTIYHLRKKLVDSTDKADLRLIYLALAHMIKFRGHFLIEGDLNPDNSDVDKLFIQLVQTYNQLFEENPINASGVDAKAILSARLSKSRRLENLIAQLPGEKKNGLFGNLIALSLGLTPNFKSNFDLAEDAKLQLSKDTYDDDLDNLLAQIGDQYADLFLAAKNLSDAILLSDILRVNTEITKAPLSASMIKRYDEHHQDLTLLKALVRQQLPEKYKEIFFDQSKNGYAGYIDGGASQEEFYKFIKPILEKMDGTEELLVKLNREDLLRKQRTFDNGSIPHQIHLGELHAILRRQEDFYPFLKDNREKIEKILTFRIPYYVGPLARGNSRFAWMTRKSEETITPWNFEEVVDKGASAQSFIERMTNFDKNLPNEKVLPKHSLLYEYFTVYNELTKVKYVTEGMRKPAFLSGEQKKAIVDLLFKTNRKVTVKQLKEDYFKKIECFDSVEISGVEDRFNASLGTYHDLLKIIKDKDFLDNEENEDILEDIVLTLTLFEDREMIEERLKTYAHLFDDKVMKQLKRRRYTGWGRLSRKLINGIRDKQSGKTILDFLKSDGFANRNFMQLIHDDSLTFKEDIQKAQVSGQGDSLHEHIANLAGSPAIKKGILQTVKVVDELVKVMGRHKPENIVIEMARENQTTQKGQKNSRERMKRIEEGIKELGSQILKEHPVENTQLQNEKLYLYYLQNGRDMYVDQELDINRLSDYDVDHIVPQSFLKDDSIDNKVLTRSDKARGKSDNVPSEEVVKKMKNYWRQLLNAKLITQRKFDNLTKAERGGLSELDKAGFIKRQLVETRQITKHVAQILDSRMNTKYDENDKLIREVKVITLKSKLVSDFRKDFQFYKVREINNYHHAHDAYLNAVVGTALIKKYPKLESEFVYGDYKVYDVRKMIAKSEQEIGKATAKYFFYSNIMNFFKTEITLANGEIRKRPLIETNGETGEIVWDKGRDFATVRKVLSMPQVNIVKKTEVQTGGFSKESILPKRNSDKLIARKKDWDPKKYGGFDSPTVAYSVLVVAKVEKGKSKKLKSVKELLGITIMERSSFEKNPIDFLEAKGYKEVKKDLIIKLPKYSLFELENGRKRMLASAGELQKGNELALPSKYVNFLYLASHYEKLKGSPEDNEQKQLFVEQHKHYLDEIIEQISEFSKRVILADANLDKVLSAYNKHRDKPIREQAENIIHLFTLTNLGAPAAFKYFDTTIDRKRYTSTKEVLDATLIHQSITGLYETRIDLSQLGGDGGEAAAKGSSGGGGGTLNIEDEYRLHETSKEPDVSLGSTWLSDFPQAWAETGGMGLAVRQAPLIIPLKATSTPVSIKQYPMSQEARLGIKPHIQRLLDQGILVPCQSPWNTPLLPVKKPGTNDYRPVQDLREVNKRVEDIHPTVPNPYNLLSGLPPSHQWYTVLDLKDAFFCLRLHPTSQPLFAFEWRDPEMGISGQLTWTRLPQGFKNSPTLFNEALHRDLADFRIQHPDLILLQYVDDLLLAATSELDCQQGTRALLQTLGNLGYRASAKKAQICQKQVKYLGYLLKEGQRWLTEARKETVMGQPTPKTPRQLREFLGKAGFCRLFIPGFAEMAAPLYPLTKPGTLFNWGPDQQKAYQEIKQALLTAPALGLPDLTKPFELFVDEKQGYAKGVLTQKLGPWRRPVAYLSKKLDPVAAGWPPCLRMVAAIAVLTKDAGKLTMGQPLVILAPHAVEALVKQPPDRWLSNARMTHYQALLLDTDRVQFGPVVALNPATLLPLPEEGLQHNCLDILAEAHGTRPDLTDQPLPDADHTWYTDGSSLLQEGQRKAGAAVTTETEVIWAKALPAGTSAQRAELIALTQALKMAEGKKLNVYTDSRYAFATAHIHGEIYRRRGWLTSEGKEIKNKDEILALLKALFLPKRLSIIHCPGHQKGHSAEARGNRMADQAARKAAITETPDTSTLLIENSSPSGGSKRTADGSEFEAGKRTADGSEFEKRTADGSEFESPKKKAKVE

SEQ ID NO: 2687 - protein, 2117 aa, synthetic construct
MPAAKRVKLDGGDKKYSIGLDIGTNSVGWAVITDEYKVPSKKFKVLGNTDRHSIKKNLIGALLFDSGETAEATRLKRTARRRYTRRKNRICYLQEIFSNEMAKVDDSFFHRLEESFLVEEDKKHERHPIFGNIVDEVAYHEKYPTIYHLRKKLVDSTDKADLRLIYLALAHMIKFRGHFLIEGDLNPDNSDVDKLFIQLVQTYNQLFEENPINASGVDAKAILSARLSKSRRLENLIAQLPGEKKNGLFGNLIALSLGLTPNFKSNFDLAEDAKLQLSKDTYDDDLDNLLAQIGDQYADLFLAAKNLSDAILLSDILRVNTEITKAPLSASMIKRYDEHHQDLTLLKALVRQQLPEKYKEIFFDQSKNGYAGYIDGGASQEEFYKFIKPILEKMDGTEELLVKLNREDLLRKQRTFDNGSIPHQIHLGELHAILRRQEDFYPFLKDNREKIEKILTFRIPYYVGPLARGNSRFAWMTRKSEETITPWNFEEVVDKGASAQSFIERMTNFDKNLPNEKVLPKHSLLYEYFTVYNELTKVKYVTEGMRKPAFLSGEQKKAIVDLLFKTNRKVTVKQLKEDYFKKIECFDSVEISGVEDRFNASLGTYHDLLKIIKDKDFLDNEENEDILEDIVLTLTLFEDREMIEERLKTYAHLFDDKVMKQLKRRRYTGWGRLSRKLINGIRDKQSGKTILDFLKSDGFANRNFMQLIHDDSLTFKEDIQKAQVSGQGDSLHEHIANLAGSPAIKKGILQTVKVVDELVKVMGRHKPENIVIEMARENQTTQKGQKNSRERMKRIEEGIKELGSQILKEHPVENTQLQNEKLYLYYLQNGRDMYVDQELDINRLSDYDVDHIVPQSFLKDDSIDNKVLTRSDKARGKSDNVPSEEVVKKMKNYWRQLLNAKLITQRKFDNLTKAERGGLSELDKAGFIKRQLVETRQITKHVAQILDSRMNTKYDENDKLIREVKVITLKSKLVSDFRKDFQFYKVREINNYHHAHDAYLNAVVGTALIKKYPKLESEFVYGDYKVYDVRKMIAKSEQEIGKATAKYFFYSNIMNFFKTEITLANGEIRKRPLIETNGETGEIVWDKGRDFATVRKVLSMPQVNIVKKTEVQTGGFSKESILPKRNSDKLIARKKDWDPKKYGGFDSPTVAYSVLVVAKVEKGKSKKLKSVKELLGITIMERSSFEKNPIDFLEAKGYKEVKKDLIIKLPKYSLFELENGRKRMLASAGELQKGNELALPSKYVNFLYLASHYEKLKGSPEDNEQKQLFVEQHKHYLDEIIEQISEFSKRVILADANLDKVLSAYNKHRDKPIREQAENIIHLFTLTNLGAPAAFKYFDTTIDRKRYTSTKEVLDATLIHQSITGLYETRIDLSQLGGDGGGGSGGSGGSGGSGGTLNIEDEYRLHETSKEPDVSLGSTWLSDFPQAWAETGGMGLAVRQAPLIIPLKATSTPVSIKQYPMSQEARLGIKPHIQRLLDQGILVPCQSPWNTPLLPVKKPGTNDYRPVQDLREVNKRVEDIHPTVPNPYNLLSGLPPSHQWYTVLDLKDAFFCLRLHPTSQPLFAFEWRDPEMGISGQLTWTRLPQGFKNSPTLFNEALHRDLADFRIQHPDLILLQYVDDLLLAATSELDCQQGTRALLQTLGNLGYRASAKKAQICQKQVKYLGYLLKEGQRWLTEARKETVMGQPTPKTPRQLREFLGKAGFCRLFIPGFAEMAAPLYPLTKPGTLFNWGPDQQKAYQEIKQALLTAPALGLPDLTKPFELFVDEKQGYAKGVLTQKLGPWRRPVAYLSKKLDPVAAGWPPCLRMVAAIAVLTKDAGKLTMGQPLVILAPHAVEALVKQPPDRWLSNARMTHYQALLLDTDRVQFGPVVALNPATLLPLPEEGLQHNCLDILAEAHGTRPDLTDQPLPDADHTWYTDGSSLLQEGQRKAGAAVTTETEVIWAKALPAGTSAQRAELIALTQALKMAEGKKLNVYTDSRYAFATAHIHGEIYRRRGWLTSEGKEIKNKDEILALLKALFLPKRLSIIHCPGHQKGHSAEARGNRMADQAARKAAITETPDTSTLLIENSSPSGGSKRTADGSEFEAGKRTADGSEFEKRTADGSEFESPKKKAKVE

SEQ ID NO: 2688 - protein, 2116 aa, synthetic construct
MPAAKRVKLDGGDKKYSIGLDIGTNSVGWAVITDEYKVPSKKFKVLGNTDRHSIKKNLIGALLFDSGETAEATRLKRTARRRYTRRKNRICYLQEIFSNEMAKVDDSFFHRLEESFLVEEDKKHERHPIFGNIVDEVAYHEKYPTIYHLRKKLVDSTDKADLRLIYLALAHMIKFRGHFLIEGDLNPDNSDVDKLFIQLVQTYNQLFEENPINASGVDAKAILSARLSKSRRLENLIAQLPGEKKNGLFGNLIALSLGLTPNFKSNFDLAEDAKLQLSKDTYDDDLDNLLAQIGDQYADLFLAAKNLSDAILLSDILRVNTEITKAPLSASMIKRYDEHHQDLTLLKALVRQQLPEKYKEIFFDQSKNGYAGYIDGGASQEEFYKFIKPILEKMDGTEELLVKLNREDLLRKQRTFDNGSIPHQIHLGELHAILRRQEDFYPFLKDNREKIEKILTFRIPYYVGPLARGNSRFAWMTRKSEETITPWNFEEVVDKGASAQSFIERMTNFDKNLPNEKVLPKHSLLYEYFTVYNELTKVKYVTEGMRKPAFLSGEQKKAIVDLLFKTNRKVTVKQLKEDYFKKIECFDSVEISGVEDRFNASLGTYHDLLKIIKDKDFLDNEENEDILEDIVLTLTLFEDREMIEERLKTYAHLFDDKVMKQLKRRRYTGWGRLSRKLINGIRDKQSGKTILDFLKSDGFANRNFMQLIHDDSLTFKEDIQKAQVSGQGDSLHEHIANLAGSPAIKKGILQTVKVVDELVKVMGRHKPENIVIEMARENQTTQKGQKNSRERMKRIEEGIKELGSQILKEHPVENTQLQNEKLYLYYLQNGRDMYVDQELDINRLSDYDVDHIVPQSFLKDDSIDNKVLTRSDKARGKSDNVPSEEVVKKMKNYWRQLLNAKLITQRKFDNLTKAERGGLSELDKAGFIKRQLVETRQITKHVAQILDSRMNTKYDENDKLIREVKVITLKSKLVSDFRKDFQFYKVREINNYHHAHDAYLNAVVGTALIKKYPKLESEFVYGDYKVYDVRKMIAKSEQEIGKATAKYFFYSNIMNFFKTEITLANGEIRKRPLIETNGETGEIVWDKGRDFATVRKVLSMPQVNIVKKTEVQTGGFSKESILPKRNSDKLIARKKDWDPKKYGGFDSPTVAYSVLVVAKVEKGKSKKLKSVKELLGITIMERSSFEKNPIDFLEAKGYKEVKKDLIIKLPKYSLFELENGRKRMLASAGELQKGNELALPSKYVNFLYLASHYEKLKGSPEDNEQKQLFVEQHKHYLDEIIEQISEFSKRVILADANLDKVLSAYNKHRDKPIREQAENIIHLFTLTNLGAPAAFKYFDTTIDRKRYTSTKEVLDATLIHQSITGLYETRIDLSQLGGDGGGGGGSSEAAAKGGTLNIEDEYRLHETSKEPDVSLGSTWLSDFPQAWAETGGMGLAVRQAPLIIPLKATSTPVSIKQYPMSQEARLGIKPHIQRLLDQGILVPCQSPWNTPLLPVKKPGTNDYRPVQDLREVNKRVEDIHPTVPNPYNLLSGLPPSHQWYTVLDLKDAFFCLRLHPTSQPLFAFEWRDPEMGISGQLTWTRLPQGFKNSPTLFNEALHRDLADFRIQHPDLILLQYVDDLLLAATSELDCQQGTRALLQTLGNLGYRASAKKAQICQKQVKYLGYLLKEGQRWLTEARKETVMGQPTPKTPRQLREFLGKAGFCRLFIPGFAEMAAPLYPLTKPGTLFNWGPDQQKAYQEIKQALLTAPALGLPDLTKPFELFVDEKQGYAKGVLTQKLGPWRRPVAYLSKKLDPVAAGWPPCLRMVAAIAVLTKDAGKLTMGQPLVILAPHAVEALVKQPPDRWLSNARMTHYQALLLDTDRVQFGPVVALNPATLLPLPEEGLQHNCLDILAEAHGTRPDLTDQPLPDADHTWYTDGSSLLQEGQRKAGAAVTTETEVIWAKALPAGTSAQRAELIALTQALKMAEGKKLNVYTDSRYAFATAHIHGEIYRRRGWLTSEGKEIKNKDEILALLKALFLPKRLSIIHCPGHQKGHSAEARGNRMADQAARKAAITETPDTSTLLIENSSPSGGSKRTADGSEFEAGKRTADGSEFEKRTADGSEFESPKKKAKVE

SEQ ID NO: 2689 - protein, 2114 aa, synthetic construct
MPAAKRVKLDGGDKKYSIGLDIGTNSVGWAVITDEYKVPSKKFKVLGNTDRHSIKKNLIGALLFDSGETAEATRLKRTARRRYTRRKNRICYLQEIFSNEMAKVDDSFFHRLEESFLVEEDKKHERHPIFGNIVDEVAYHEKYPTIYHLRKKLVDSTDKADLRLIYLALAHMIKFRGHFLIEGDLNPDNSDVDKLFIQLVQTYNQLFEENPINASGVDAKAILSARLSKSRRLENLIAQLPGEKKNGLFGNLIALSLGLTPNFKSNFDLAEDAKLQLSKDTYDDDLDNLLAQIGDQYADLFLAAKNLSDAILLSDILRVNTEITKAPLSASMIKRYDEHHQDLTLLKALVRQQLPEKYKEIFFDQSKNGYAGYIDGGASQEEFYKFIKPILEKMDGTEELLVKLNREDLLRKQRTFDNGSIPHQIHLGELHAILRRQEDFYPFLKDNREKIEKILTFRIPYYVGPLARGNSRFAWMTRKSEETITPWNFEEVVDKGASAQSFIERMTNFDKNLPNEKVLPKHSLLYEYFTVYNELTKVKYVTEGMRKPAFLSGEQKKAIVDLLFKTNRKVTVKQLKEDYFKKIECFDSVEISGVEDRFNASLGTYHDLLKIIKDKDFLDNEENEDILEDIVLTLTLFEDREMIEERLKTYAHLFDDKVMKQLKRRRYTGWGRLSRKLINGIRDKQSGKTILDFLKSDGFANRNFMQLIHDDSLTFKEDIQKAQVSGQGDSLHEHIANLAGSPAIKKGILQTVKVVDELVKVMGRHKPENIVIEMARENQTTQKGQKNSRERMKRIEEGIKELGSQILKEHPVENTQLQNEKLYLYYLQNGRDMYVDQELDINRLSDYDVDHIVPQSFLKDDSIDNKVLTRSDKARGKSDNVPSEEVVKKMKNYWRQLLNAKLITQRKFDNLTKAERGGLSELDKAGFIKRQLVETRQITKHVAQILDSRMNTKYDENDKLIREVKVITLKSKLVSDFRKDFQFYKVREINNYHHAHDAYLNAVVGTALIKKYPKLESEFVYGDYKVYDVRKMIAKSEQEIGKATAKYFFYSNIMNFFKTEITLANGEIRKRPLIETNGETGEIVWDKGRDFATVRKVLSMPQVNIVKKTEVQTGGFSKESILPKRNSDKLIARKKDWDPKKYGGFDSPTVAYSVLVVAKVEKGKSKKLKSVKELLGITIMERSSFEKNPIDFLEAKGYKEVKKDLIIKLPKYSLFELENGRKRMLASAGELQKGNELALPSKYVNFLYLASHYEKLKGSPEDNEQKQLFVEQHKHYLDEIIEQISEFSKRVILADANLDKVLSAYNKHRDKPIREQAENIIHLFTLTNLGAPAAFKYFDTTIDRKRYTSTKEVLDATLIHQSITGLYETRIDLSQLGGDGGGSSPAPGGSGGTLNIEDEYRLHETSKEPDVSLGSTWLSDFPQAWAETGGMGLAVRQAPLIIPLKATSTPVSIKQYPMSQEARLGIKPHIQRLLDQGILVPCQSPWNTPLLPVKKPGTNDYRPVQDLREVNKRVEDIHPTVPNPYNLLSGLPPSHQWYTVLDLKDAFFCLRLHPTSQPLFAFEWRDPEMGISGQLTWTRLPQGFKNSPTLFNEALHRDLADFRIQHPDLILLQYVDDLLLAATSELDCQQGTRALLQTLGNLGYRASAKKAQICQKQVKYLGYLLKEGQRWLTEARKETVMGQPTPKTPRQLREFLGKAGFCRLFIPGFAEMAAPLYPLTKPGTLFNWGPDQQKAYQEIKQALLTAPALGLPDLTKPFELFVDEKQGYAKGVLTQKLGPWRRPVAYLSKKLDPVAAGWPPCLRMVAAIAVLTKDAGKLTMGQPLVILAPHAVEALVKQPPDRWLSNARMTHYQALLLDTDRVQFGPVVALNPATLLPLPEEGLQHNCLDILAEAHGTRPDLTDQPLPDADHTWYTDGSSLLQEGQRKAGAAVTTETEVIWAKALPAGTSAQRAELIALTQALKMAEGKKLNVYTDSRYAFATAHIHGEIYRRRGWLTSEGKEIKNKDEILALLKALFLPKRLSIIHCPGHQKGHSAEARGNRMADQAARKAAITETPDTSTLLIENSSPSGGSKRTADGSEFEAGKRTADGSEFEKRTADGSEFESPKKKAKVE

SEQ ID NO: 2690 - protein, 2116 aa, synthetic construct
MPAAKRVKLDGGDKKYSIGLDIGTNSVGWAVITDEYKVPSKKFKVLGNTDRHSIKKNLIGALLFDSGETAEATRLKRTARRRYTRRKNRICYLQEIFSNEMAKVDDSFFHRLEESFLVEEDKKHERHPIFGNIVDEVAYHEKYPTIYHLRKKLVDSTDKADLRLIYLALAHMIKFRGHFLIEGDLNPDNSDVDKLFIQLVQTYNQLFEENPINASGVDAKAILSARLSKSRRLENLIAQLPGEKKNGLFGNLIALSLGLTPNFKSNFDLAEDAKLQLSKDTYDDDLDNLLAQIGDQYADLFLAAKNLSDAILLSDILRVNTEITKAPLSASMIKRYDEHHQDLTLLKALVRQQLPEKYKEIFFDQSKNGYAGYIDGGASQEEFYKFIKPILEKMDGTEELLVKLNREDLLRKQRTFDNGSIPHQIHLGELHAILRRQEDFYPFLKDNREKIEKILTFRIPYYVGPLARGNSRFAWMTRKSEETITPWNFEEVVDKGASAQSFIERMTNFDKNLPNEKVLPKHSLLYEYFTVYNELTKVKYVTEGMRKPAFLSGEQKKAIVDLLFKTNRKVTVKQLKEDYFKKIECFDSVEISGVEDRFNASLGTYHDLLKIIKDKDFLDNEENEDILEDIVLTLTLFEDREMIEERLKTYAHLFDDKVMKQLKRRRYTGWGRLSRKLINGIRDKQSGKTILDFLKSDGFANRNFMQLIHDDSLTFKEDIQKAQVSGQGDSLHEHIANLAGSPAIKKGILQTVKVVDELVKVMGRHKPENIVIEMARENQTTQKGQKNSRERMKRIEEGIKELGSQILKEHPVENTQLQNEKLYLYYLQNGRDMYVDQELDINRLSDYDVDHIVPQSFLKDDSIDNKVLTRSDKARGKSDNVPSEEVVKKMKNYWRQLLNAKLITQRKFDNLTKAERGGLSELDKAGFIKRQLVETRQITKHVAQILDSRMNTKYDENDKLIREVKVITLKSKLVSDFRKDFQFYKVREINNYHHAHDAYLNAVVGTALIKKYPKLESEFVYGDYKVYDVRKMIAKSEQEIGKATAKYFFYSNIMNFFKTEITLANGEIRKRPLIETNGETGEIVWDKGRDFATVRKVLSMPQVNIVKKTEVQTGGFSKESILPKRNSDKLIARKKDWDPKKYGGFDSPTVAYSVLVVAKVEKGKSKKLKSVKELLGITIMERSSFEKNPIDFLEAKGYKEVKKDLIIKLPKYSLFELENGRKRMLASAGELQKGNELALPSKYVNFLYLASHYEKLKGSPEDNEQKQLFVEQHKHYLDEIIEQISEFSKRVILADANLDKVLSAYNKHRDKPIREQAENIIHLFTLTNLGAPAAFKYFDTTIDRKRYTSTKEVLDATLIHQSITGLYETRIDLSQLGGDGGGGSEAAAKPAPGGTLNIEDEYRLHETSKEPDVSLGSTWLSDFPQAWAETGGMGLAVRQAPLIIPLKATSTPVSIKQYPMSQEARLGIKPHIQRLLDQGILVPCQSPWNTPLLPVKKPGTNDYRPVQDLREVNKRVEDIHPTVPNPYNLLSGLPPSHQWYTVLDLKDAFFCLRLHPTSQPLFAFEWRDPEMGISGQLTWTRLPQGFKNSPTLFNEALHRDLADFRIQHPDLILLQYVDDLLLAATSELDCQQGTRALLQTLGNLGYRASAKKAQICQKQVKYLGYLLKEGQRWLTEARKETVMGQPTPKTPRQLREFLGKAGFCRLFIPGFAEMAAPLYPLTKPGTLFNWGPDQQKAYQEIKQALLTAPALGLPDLTKPFELFVDEKQGYAKGVLTQKLGPWRRPVAYLSKKLDPVAAGWPPCLRMVAAIAVLTKDAGKLTMGQPLVILAPHAVEALVKQPPDRWLSNARMTHYQALLLDTDRVQFGPVVALNPATLLPLPEEGLQHNCLDILAEAHGTRPDLTDQPLPDADHTWYTDGSSLLQEGQRKAGAAVTTETEVIWAKALPAGTSAQRAELIALTQALKMAEGKKLNVYTDSRYAFATAHIHGEIYRRRGWLTSEGKEIKNKDEILALLKALFLPKRLSIIHCPGHQKGHSAEARGNRMADQAARKAAITETPDTSTLLIENSSPSGGSKRTADGSEFEAGKRTADGSEFEKRTADGSEFESPKKKAKVE

SEQ ID NO: 2691 - protein, 2110 aa, synthetic construct
MPAAKRVKLDGGDKKYSIGLDIGTNSVGWAVITDEYKVPSKKFKVLGNTDRHSIKKNLIGALLFDSGETAEATRLKRTARRRYTRRKNRICYLQEIFSNEMAKVDDSFFHRLEESFLVEEDKKHERHPIFGNIVDEVAYHEKYPTIYHLRKKLVDSTDKADLRLIYLALAHMIKFRGHFLIEGDLNPDNSDVDKLFIQLVQTYNQLFEENPINASGVDAKAILSARLSKSRRLENLIAQLPGEKKNGLFGNLIALSLGLTPNFKSNFDLAEDAKLQLSKDTYDDDLDNLLAQIGDQYADLFLAAKNLSDAILLSDILRVNTEITKAPLSASMIKRYDEHHQDLTLLKALVRQQLPEKYKEIFFDQSKNGYAGYIDGGASQEEFYKFIKPILEKMDGTEELLVKLNREDLLRKQRTFDNGSIPHQIHLGELHAILRRQEDFYPFLKDNREKIEKILTFRIPYYVGPLARGNSRFAWMTRKSEETITPWNFEEVVDKGASAQSFIERMTNFDKNLPNEKVLPKHSLLYEYFTVYNELTKVKYVTEGMRKPAFLSGEQKKAIVDLLFKTNRKVTVKQLKEDYFKKIECFDSVEISGVEDRFNASLGTYHDLLKIIKDKDFLDNEENEDILEDIVLTLTLFEDREMIEERLKTYAHLFDDKVMKQLKRRRYTGWGRLSRKLINGIRDKQSGKTILDFLKSDGFANRNFMQLIHDDSLTFKEDIQKAQVSGQGDSLHEHIANLAGSPAIKKGILQTVKVVDELVKVMGRHKPENIVIEMARENQTTQKGQKNSRERMKRIEEGIKELGSQILKEHPVENTQLQNEKLYLYYLQNGRDMYVDQELDINRLSDYDVDHIVPQSFLKDDSIDNKVLTRSDKARGKSDNVPSEEVVKKMKNYWRQLLNAKLITQRKFDNLTKAERGGLSELDKAGFIKRQLVETRQITKHVAQILDSRMNTKYDENDKLIREVKVITLKSKLVSDFRKDFQFYKVREINNYHHAHDAYLNAVVGTALIKKYPKLESEFVYGDYKVYDVRKMIAKSEQEIGKATAKYFFYSNIMNFFKTEITLANGEIRKRPLIETNGETGEIVWDKGRDFATVRKVLSMPQVNIVKKTEVQTGGFSKESILPKRNSDKLIARKKDWDPKKYGGFDSPTVAYSVLVVAKVEKGKSKKLKSVKELLGITIMERSSFEKNPIDFLEAKGYKEVKKDLIIKLPKYSLFELENGRKRMLASAGELQKGNELALPSKYVNFLYLASHYEKLKGSPEDNEQKQLFVEQHKHYLDEIIEQISEFSKRVILADANLDKVLSAYNKHRDKPIREQAENIIHLFTLTNLGAPAAFKYFDTTIDRKRYTSTKEVLDATLIHQSITGLYETRIDLSQLGGDGGGGGGSGGTLNIEDEYRLHETSKEPDVSLGSTWLSDFPQAWAETGGMGLAVRQAPLIIPLKATSTPVSIKQYPMSQEARLGIKPHIQRLLDQGILVPCQSPWNTPLLPVKKPGTNDYRPVQDLREVNKRVEDIHPTVPNPYNLLSGLPPSHQWYTVLDLKDAFFCLRLHPTSQPLFAFEWRDPEMGISGQLTWTRLPQGFKNSPTLFNEALHRDLADFRIQHPDLILLQYVDDLLLAATSELDCQQGTRALLQTLGNLGYRASAKKAQICQKQVKYLGYLLKEGQRWLTEARKETVMGQPTPKTPRQLREFLGKAGFCRLFIPGFAEMAAPLYPLTKPGTLFNWGPDQQKAYQEIKQALLTAPALGLPDLTKPFELFVDEKQGYAKGVLTQKLGPWRRPVAYLSKKLDPVAAGWPPCLRMVAAIAVLTKDAGKLTMGQPLVILAPHAVEALVKQPPDRWLSNARMTHYQALLLDTDRVQFGPVVALNPATLLPLPEEGLQHNCLDILAEAHGTRPDLTDQPLPDADHTWYTDGSSLLQEGQRKAGAAVTTETEVIWAKALPAGTSAQRAELIALTQALKMAEGKKLNVYTDSRYAFATAHIHGEIYRRRGWLTSEGKEIKNKDEILALLKALFLPKRLSIIHCPGHQKGHSAEARGNRMADQAARKAAITETPDTSTLLIENSSPSGGSKRTADGSEFEAGKRTADGSEFEKRTADGSEFESPKKKAKVE

SEQ ID NO: 2692 - protein, 2116 aa, synthetic construct
MPAAKRVKLDGGDKKYSIGLDIGTNSVGWAVITDEYKVPSKKFKVLGNTDRHSIKKNLIGALLFDSGETAEATRLKRTARRRYTRRKNRICYLQEIFSNEMAKVDDSFFHRLEESFLVEEDKKHERHPIFGNIVDEVAYHEKYPTIYHLRKKLVDSTDKADLRLIYLALAHMIKFRGHFLIEGDLNPDNSDVDKLFIQLVQTYNQLFEENPINASGVDAKAILSARLSKSRRLENLIAQLPGEKKNGLFGNLIALSLGLTPNFKSNFDLAEDAKLQLSKDTYDDDLDNLLAQIGDQYADLFLAAKNLSDAILLSDILRVNTEITKAPLSASMIKRYDEHHQDLTLLKALVRQQLPEKYKEIFFDQSKNGYAGYIDGGASQEEFYKFIKPILEKMDGTEELLVKLNREDLLRKQRTFDNGSIPHQIHLGELHAILRRQEDFYPFLKDNREKIEKILTFRIPYYVGPLARGNSRFAWMTRKSEETITPWNFEEVVDKGASAQSFIERMTNFDKNLPNEKVLPKHSLLYEYFTVYNELTKVKYVTEGMRKPAFLSGEQKKAIVDLLFKTNRKVTVKQLKEDYFKKIECFDSVEISGVEDRFNASLGTYHDLLKIIKDKDFLDNEENEDILEDIVLTLTLFEDREMIEERLKTYAHLFDDKVMKQLKRRRYTGWGRLSRKLINGIRDKQSGKTILDFLKSDGFANRNFMQLIHDDSLTFKEDIQKAQVSGQGDSLHEHIANLAGSPAIKKGILQTVKVVDELVKVMGRHKPENIVIEMARENQTTQKGQKNSRERMKRIEEGIKELGSQILKEHPVENTQLQNEKLYLYYLQNGRDMYVDQELDINRLSDYDVDHIVPQSFLKDDSIDNKVLTRSDKARGKSDNVPSEEVVKKMKNYWRQLLNAKLITQRKFDNLTKAERGGLSELDKAGFIKRQLVETRQITKHVAQILDSRMNTKYDENDKLIREVKVITLKSKLVSDFRKDFQFYKVREINNYHHAHDAYLNAVVGTALIKKYPKLESEFVYGDYKVYDVRKMIAKSEQEIGKATAKYFFYSNIMNFFKTEITLANGEIRKRPLIETNGETGEIVWDKGRDFATVRKVLSMPQVNIVKKTEVQTGGFSKESILPKRNSDKLIARKKDWDPKKYGGFDSPTVAYSVLVVAKVEKGKSKKLKSVKELLGITIMERSSFEKNPIDFLEAKGYKEVKKDLIIKLPKYSLFELENGRKRMLASAGELQKGNELALPSKYVNFLYLASHYEKLKGSPEDNEQKQLFVEQHKHYLDEIIEQISEFSKRVILADANLDKVLSAYNKHRDKPIREQAENIIHLFTLTNLGAPAAFKYFDTTIDRKRYTSTKEVLDATLIHQSITGLYETRIDLSQLGGDGGGGSGGGEAAAKGGTLNIEDEYRLHETSKEPDVSLGSTWLSDFPQAWAETGGMGLAVRQAPLIIPLKATSTPVSIKQYPMSQEARLGIKPHIQRLLDQGILVPCQSPWNTPLLPVKKPGTNDYRPVQDLREVNKRVEDIHPTVPNPYNLLSGLPPSHQWYTVLDLKDAFFCLRLHPTSQPLFAFEWRDPEMGISGQLTWTRLPQGFKNSPTLFNEALHRDLADFRIQHPDLILLQYVDDLLLAATSELDCQQGTRALLQTLGNLGYRASAKKAQICQKQVKYLGYLLKEGQRWLTEARKETVMGQPTPKTPRQLREFLGKAGFCRLFIPGFAEMAAPLYPLTKPGTLFNWGPDQQKAYQEIKQALLTAPALGLPDLTKPFELFVDEKQGYAKGVLTQKLGPWRRPVAYLSKKLDPVAAGWPPCLRMVAAIAVLTKDAGKLTMGQPLVILAPHAVEALVKQPPDRWLSNARMTHYQALLLDTDRVQFGPVVALNPATLLPLPEEGLQHNCLDILAEAHGTRPDLTDQPLPDADHTWYTDGSSLLQEGQRKAGAAVTTETEVIWAKALPAGTSAQRAELIALTQALKMAEGKKLNVYTDSRYAFATAHIHGEIYRRRGWLTSEGKEIKNKDEILALLKALFLPKRLSIIHCPGHQKGHSAEARGNRMADQAARKAAITETPDTSTLLIENSSPSGGSKRTADGSEFEAGKRTADGSEFEKRTADGSEFESPKKKAKVE

SEQ ID NO: 2693 - protein, 2111 aa, synthetic construct
MPAAKRVKLDGGDKKYSIGLDIGTNSVGWAVITDEYKVPSKKFKVLGNTDRHSIKKNLIGALLFDSGETAEATRLKRTARRRYTRRKNRICYLQEIFSNEMAKVDDSFFHRLEESFLVEEDKKHERHPIFGNIVDEVAYHEKYPTIYHLRKKLVDSTDKADLRLIYLALAHMIKFRGHFLIEGDLNPDNSDVDKLFIQLVQTYNQLFEENPINASGVDAKAILSARLSKSRRLENLIAQLPGEKKNGLFGNLIALSLGLTPNFKSNFDLAEDAKLQLSKDTYDDDLDNLLAQIGDQYADLFLAAKNLSDAILLSDILRVNTEITKAPLSASMIKRYDEHHQDLTLLKALVRQQLPEKYKEIFFDQSKNGYAGYIDGGASQEEFYKFIKPILEKMDGTEELLVKLNREDLLRKQRTFDNGSIPHQIHLGELHAILRRQEDFYPFLKDNREKIEKILTFRIPYYVGPLARGNSRFAWMTRKSEETITPWNFEEVVDKGASAQSFIERMTNFDKNLPNEKVLPKHSLLYEYFTVYNELTKVKYVTEGMRKPAFLSGEQKKAIVDLLFKTNRKVTVKQLKEDYFKKIECFDSVEISGVEDRFNASLGTYHDLLKIIKDKDFLDNEENEDILEDIVLTLTLFEDREMIEERLKTYAHLFDDKVMKQLKRRRYTGWGRLSRKLINGIRDKQSGKTILDFLKSDGFANRNFMQLIHDDSLTFKEDIQKAQVSGQGDSLHEHIANLAGSPAIKKGILQTVKVVDELVKVMGRHKPENIVIEMARENQTTQKGQKNSRERMKRIEEGIKELGSQILKEHPVENTQLQNEKLYLYYLQNGRDMYVDQELDINRLSDYDVDHIVPQSFLKDDSIDNKVLTRSDKARGKSDNVPSEEVVKKMKNYWRQLLNAKLITQRKFDNLTKAERGGLSELDKAGFIKRQLVETRQITKHVAQILDSRMNTKYDENDKLIREVKVITLKSKLVSDFRKDFQFYKVREINNYHHAHDAYLNAVVGTALIKKYPKLESEFVYGDYKVYDVRKMIAKSEQEIGKATAKYFFYSNIMNFFKTEITLANGEIRKRPLIETNGETGEIVWDKGRDFATVRKVLSMPQVNIVKKTEVQTGGFSKESILPKRNSDKLIARKKDWDPKKYGGFDSPTVAYSVLVVAKVEKGKSKKLKSVKELLGITIMERSSFEKNPIDFLEAKGYKEVKKDLIIKLPKYSLFELENGRKRMLASAGELQKGNELALPSKYVNFLYLASHYEKLKGSPEDNEQKQLFVEQHKHYLDEIIEQISEFSKRVILADANLDKVLSAYNKHRDKPIREQAENIIHLFTLTNLGAPAAFKYFDTTIDRKRYTSTKEVLDATLIHQSITGLYETRIDLSQLGGDGGGGSGGSGGTLNIEDEYRLHETSKEPDVSLGSTWLSDFPQAWAETGGMGLAVRQAPLIIPLKATSTPVSIKQYPMSQEARLGIKPHIQRLLDQGILVPCQSPWNTPLLPVKKPGTNDYRPVQDLREVNKRVEDIHPTVPNPYNLLSGLPPSHQWYTVLDLKDAFFCLRLHPTSQPLFAFEWRDPEMGISGQLTWTRLPQGFKNSPTLFNEALHRDLADFRIQHPDLILLQYVDDLLLAATSELDCQQGTRALLQTLGNLGYRASAKKAQICQKQVKYLGYLLKEGQRWLTEARKETVMGQPTPKTPRQLREFLGKAGFCRLFIPGFAEMAAPLYPLTKPGTLFNWGPDQQKAYQEIKQALLTAPALGLPDLTKPFELFVDEKQGYAKGVLTQKLGPWRRPVAYLSKKLDPVAAGWPPCLRMVAAIAVLTKDAGKLTMGQPLVILAPHAVEALVKQPPDRWLSNARMTHYQALLLDTDRVQFGPVVALNPATLLPLPEEGLQHNCLDILAEAHGTRPDLTDQPLPDADHTWYTDGSSLLQEGQRKAGAAVTTETEVIWAKALPAGTSAQRAELIALTQALKMAEGKKLNVYTDSRYAFATAHIHGEIYRRRGWLTSEGKEIKNKDEILALLKALFLPKRLSIIHCPGHQKGHSAEARGNRMADQAARKAAITETPDTSTLLIENSSPSGGSKRTADGSEFEAGKRTADGSEFEKRTADGSEFESPKKKAKVE

SEQ ID NO: 2694 - protein, 2114 aa, synthetic construct
MPAAKRVKLDGGDKKYSIGLDIGTNSVGWAVITDEYKVPSKKFKVLGNTDRHSIKKNLIGALLFDSGETAEATRLKRTARRRYTRRKNRICYLQEIFSNEMAKVDDSFFHRLEESFLVEEDKKHERHPIFGNIVDEVAYHEKYPTIYHLRKKLVDSTDKADLRLIYLALAHMIKFRGHFLIEGDLNPDNSDVDKLFIQLVQTYNQLFEENPINASGVDAKAILSARLSKSRRLENLIAQLPGEKKNGLFGNLIALSLGLTPNFKSNFDLAEDAKLQLSKDTYDDDLDNLLAQIGDQYADLFLAAKNLSDAILLSDILRVNTEITKAPLSASMIKRYDEHHQDLTLLKALVRQQLPEKYKEIFFDQSKNGYAGYIDGGASQEEFYKFIKPILEKMDGTEELLVKLNREDLLRKQRTFDNGSIPHQIHLGELHAILRRQEDFYPFLKDNREKIEKILTFRIPYYVGPLARGNSRFAWMTRKSEETITPWNFEEVVDKGASAQSFIERMTNFDKNLPNEKVLPKHSLLYEYFTVYNELTKVKYVTEGMRKPAFLSGEQKKAIVDLLFKTNRKVTVKQLKEDYFKKIECFDSVEISGVEDRFNASLGTYHDLLKIIKDKDFLDNEENEDILEDIVLTLTLFEDREMIEERLKTYAHLFDDKVMKQLKRRRYTGWGRLSRKLINGIRDKQSGKTILDFLKSDGFANRNFMQLIHDDSLTFKEDIQKAQVSGQGDSLHEHIANLAGSPAIKKGILQTVKVVDELVKVMGRHKPENIVIEMARENQTTQKGQKNSRERMKRIEEGIKELGSQILKEHPVENTQLQNEKLYLYYLQNGRDMYVDQELDINRLSDYDVDHIVPQSFLKDDSIDNKVLTRSDKARGKSDNVPSEEVVKKMKNYWRQLLNAKLITQRKFDNLTKAERGGLSELDKAGFIKRQLVETRQITKHVAQILDSRMNTKYDENDKLIREVKVITLKSKLVSDFRKDFQFYKVREINNYHHAHDAYLNAVVGTALIKKYPKLESEFVYGDYKVYDVRKMIAKSEQEIGKATAKYFFYSNIMNFFKTEITLANGEIRKRPLIETNGETGEIVWDKGRDFATVRKVLSMPQVNIVKKTEVQTGGFSKESILPKRNSDKLIARKKDWDPKKYGGFDSPTVAYSVLVVAKVEKGKSKKLKSVKELLGITIMERSSFEKNPIDFLEAKGYKEVKKDLIIKLPKYSLFELENGRKRMLASAGELQKGNELALPSKYVNFLYLASHYEKLKGSPEDNEQKQLFVEQHKHYLDEIIEQISEFSKRVILADANLDKVLSAYNKHRDKPIREQAENIIHLFTLTNLGAPAAFKYFDTTIDRKRYTSTKEVLDATLIHQSITGLYETRIDLSQLGGDGGGSSGGSGGGGGTLNIEDEYRLHETSKEPDVSLGSTWLSDFPQAWAETGGMGLAVRQAPLIIPLKATSTPVSIKQYPMSQEARLGIKPHIQRLLDQGILVPCQSPWNTPLLPVKKPGTNDYRPVQDLREVNKRVEDIHPTVPNPYNLLSGLPPSHQWYTVLDLKDAFFCLRLHPTSQPLFAFEWRDPEMGISGQLTWTRLPQGFKNSPTLFNEALHRDLADFRIQHPDLILLQYVDDLLLAATSELDCQQGTRALLQTLGNLGYRASAKKAQICQKQVKYLGYLLKEGQRWLTEARKETVMGQPTPKTPRQLREFLGKAGFCRLFIPGFAEMAAPLYPLTKPGTLFNWGPDQQKAYQEIKQALLTAPALGLPDLTKPFELFVDEKQGYAKGVLTQKLGPWRRPVAYLSKKLDPVAAGWPPCLRMVAAIAVLTKDAGKLTMGQPLVILAPHAVEALVKQPPDRWLSNARMTHYQALLLDTDRVQFGPVVALNPATLLPLPEEGLQHNCLDILAEAHGTRPDLTDQPLPDADHTWYTDGSSLLQEGQRKAGAAVTTETEVIWAKALPAGTSAQRAELIALTQALKMAEGKKLNVYTDSRYAFATAHIHGEIYRRRGWLTSEGKEIKNKDEILALLKALFLPKRLSIIHCPGHQKGHSAEARGNRMADQAARKAAITETPDTSTLLIENSSPSGGSKRTADGSEFEAGKRTADGSEFEKRTADGSEFESPKKKAKVE

SEQ ID NO: 2695 - protein, 2116 aa, synthetic construct
MPAAKRVKLDGGDKKYSIGLDIGTNSVGWAVITDEYKVPSKKFKVLGNTDRHSIKKNLIGALLFDSGETAEATRLKRTARRRYTRRKNRICYLQEIFSNEMAKVDDSFFHRLEESFLVEEDKKHERHPIFGNIVDEVAYHEKYPTIYHLRKKLVDSTDKADLRLIYLALAHMIKFRGHFLIEGDLNPDNSDVDKLFIQLVQTYNQLFEENPINASGVDAKAILSARLSKSRRLENLIAQLPGEKKNGLFGNLIALSLGLTPNFKSNFDLAEDAKLQLSKDTYDDDLDNLLAQIGDQYADLFLAAKNLSDAILLSDILRVNTEITKAPLSASMIKRYDEHHQDLTLLKALVRQQLPEKYKEIFFDQSKNGYAGYIDGGASQEEFYKFIKPILEKMDGTEELLVKLNREDLLRKQRTFDNGSIPHQIHLGELHAILRRQEDFYPFLKDNREKIEKILTFRIPYYVGPLARGNSRFAWMTRKSEETITPWNFEEVVDKGASAQSFIERMTNFDKNLPNEKVLPKHSLLYEYFTVYNELTKVKYVTEGMRKPAFLSGEQKKAIVDLLFKTNRKVTVKQLKEDYFKKIECFDSVEISGVEDRFNASLGTYHDLLKIIKDKDFLDNEENEDILEDIVLTLTLFEDREMIEERLKTYAHLFDDKVMKQLKRRRYTGWGRLSRKLINGIRDKQSGKTILDFLKSDGFANRNFMQLIHDDSLTFKEDIQKAQVSGQGDSLHEHIANLAGSPAIKKGILQTVKVVDELVKVMGRHKPENIVIEMARENQTTQKGQKNSRERMKRIEEGIKELGSQILKEHPVENTQLQNEKLYLYYLQNGRDMYVDQELDINRLSDYDVDHIVPQSFLKDDSIDNKVLTRSDKARGKSDNVPSEEVVKKMKNYWRQLLNAKLITQRKFDNLTKAERGGLSELDKAGFIKRQLVETRQITKHVAQILDSRMNTKYDENDKLIREVKVITLKSKLVSDFRKDFQFYKVREINNYHHAHDAYLNAVVGTALIKKYPKLESEFVYGDYKVYDVRKMIAKSEQEIGKATAKYFFYSNIMNFFKTEITLANGEIRKRPLIETNGETGEIVWDKGRDFATVRKVLSMPQVNIVKKTEVQTGGFSKESILPKRNSDKLIARKKDWDPKKYGGFDSPTVAYSVLVVAKVEKGKSKKLKSVKELLGITIMERSSFEKNPIDFLEAKGYKEVKKDLIIKLPKYSLFELENGRKRMLASAGELQKGNELALPSKYVNFLYLASHYEKLKGSPEDNEQKQLFVEQHKHYLDEIIEQISEFSKRVILADANLDKVLSAYNKHRDKPIREQAENIIHLFTLTNLGAPAAFKYFDTTIDRKRYTSTKEVLDATLIHQSITGLYETRIDLSQLGGDGGEAAAKGGGGSSGGTLNIEDEYRLHETSKEPDVSLGSTWLSDFPQAWAETGGMGLAVRQAPLIIPLKATSTPVSIKQYPMSQEARLGIKPHIQRLLDQGILVPCQSPWNTPLLPVKKPGTNDYRPVQDLREVNKRVEDIHPTVPNPYNLLSGLPPSHQWYTVLDLKDAFFCLRLHPTSQPLFAFEWRDPEMGISGQLTWTRLPQGFKNSPTLFNEALHRDLADFRIQHPDLILLQYVDDLLLAATSELDCQQGTRALLQTLGNLGYRASAKKAQICQKQVKYLGYLLKEGQRWLTEARKETVMGQPTPKTPRQLREFLGKAGFCRLFIPGFAEMAAPLYPLTKPGTLFNWGPDQQKAYQEIKQALLTAPALGLPDLTKPFELFVDEKQGYAKGVLTQKLGPWRRPVAYLSKKLDPVAAGWPPCLRMVAAIAVLTKDAGKLTMGQPLVILAPHAVEALVKQPPDRWLSNARMTHYQALLLDTDRVQFGPVVALNPATLLPLPEEGLQHNCLDILAEAHGTRPDLTDQPLPDADHTWYTDGSSLLQEGQRKAGAAVTTETEVIWAKALPAGTSAQRAELIALTQALKMAEGKKLNVYTDSRYAFATAHIHGEIYRRRGWLTSEGKEIKNKDEILALLKALFLPKRLSIIHCPGHQKGHSAEARGNRMADQAARKAAITETPDTSTLLIENSSPSGGSKRTADGSEFEAGKRTADGSEFEKRTADGSEFESPKKKAKVE

SEQ ID NO: 2696 - protein, 2117 aa, synthetic construct
MPAAKRVKLDGGDKKYSIGLDIGTNSVGWAVITDEYKVPSKKFKVLGNTDRHSIKKNLIGALLFDSGETAEATRLKRTARRRYTRRKNRICYLQEIFSNEMAKVDDSFFHRLEESFLVEEDKKHERHPIFGNIVDEVAYHEKYPTIYHLRKKLVDSTDKADLRLIYLALAHMIKFRGHFLIEGDLNPDNSDVDKLFIQLVQTYNQLFEENPINASGVDAKAILSARLSKSRRLENLIAQLPGEKKNGLFGNLIALSLGLTPNFKSNFDLAEDAKLQLSKDTYDDDLDNLLAQIGDQYADLFLAAKNLSDAILLSDILRVNTEITKAPLSASMIKRYDEHHQDLTLLKALVRQQLPEKYKEIFFDQSKNGYAGYIDGGASQEEFYKFIKPILEKMDGTEELLVKLNREDLLRKQRTFDNGSIPHQIHLGELHAILRRQEDFYPFLKDNREKIEKILTFRIPYYVGPLARGNSRFAWMTRKSEETITPWNFEEVVDKGASAQSFIERMTNFDKNLPNEKVLPKHSLLYEYFTVYNELTKVKYVTEGMRKPAFLSGEQKKAIVDLLFKTNRKVTVKQLKEDYFKKIECFDSVEISGVEDRFNASLGTYHDLLKIIKDKDFLDNEENEDILEDIVLTLTLFEDREMIEERLKTYAHLFDDKVMKQLKRRRYTGWGRLSRKLINGIRDKQSGKTILDFLKSDGFANRNFMQLIHDDSLTFKEDIQKAQVSGQGDSLHEHIANLAGSPAIKKGILQTVKVVDELVKVMGRHKPENIVIEMARENQTTQKGQKNSRERMKRIEEGIKELGSQILKEHPVENTQLQNEKLYLYYLQNGRDMYVDQELDINRLSDYDVDHIVPQSFLKDDSIDNKVLTRSDKARGKSDNVPSEEVVKKMKNYWRQLLNAKLITQRKFDNLTKAERGGLSELDKAGFIKRQLVETRQITKHVAQILDSRMNTKYDENDKLIREVKVITLKSKLVSDFRKDFQFYKVREINNYHHAHDAYLNAVVGTALIKKYPKLESEFVYGDYKVYDVRKMIAKSEQEIGKATAKYFFYSNIMNFFKTEITLANGEIRKRPLIETNGETGEIVWDKGRDFATVRKVLSMPQVNIVKKTEVQTGGFSKESILPKRNSDKLIARKKDWDPKKYGGFDSPTVAYSVLVVAKVEKGKSKKLKSVKELLGITIMERSSFEKNPIDFLEAKGYKEVKKDLIIKLPKYSLFELENGRKRMLASAGELQKGNELALPSKYVNFLYLASHYEKLKGSPEDNEQKQLFVEQHKHYLDEIIEQISEFSKRVILADANLDKVLSAYNKHRDKPIREQAENIIHLFTLTNLGAPAAFKYFDTTIDRKRYTSTKEVLDATLIHQSITGLYETRIDLSQLGGDGGGSAGSAAGSGEFGGTLNIEDEYRLHETSKEPDVSLGSTWLSDFPQAWAETGGMGLAVRQAPLIIPLKATSTPVSIKQYPMSQEARLGIKPHIQRLLDQGILVPCQSPWNTPLLPVKKPGTNDYRPVQDLREVNKRVEDIHPTVPNPYNLLSGLPPSHQWYTVLDLKDAFFCLRLHPTSQPLFAFEWRDPEMGISGQLTWTRLPQGFKNSPTLFNEALHRDLADFRIQHPDLILLQYVDDLLLAATSELDCQQGTRALLQTLGNLGYRASAKKAQICQKQVKYLGYLLKEGQRWLTEARKETVMGQPTPKTPRQLREFLGKAGFCRLFIPGFAEMAAPLYPLTKPGTLFNWGPDQQKAYQEIKQALLTAPALGLPDLTKPFELFVDEKQGYAKGVLTQKLGPWRRPVAYLSKKLDPVAAGWPPCLRMVAAIAVLTKDAGKLTMGQPLVILAPHAVEALVKQPPDRWLSNARMTHYQALLLDTDRVQFGPVVALNPATLLPLPEEGLQHNCLDILAEAHGTRPDLTDQPLPDADHTWYTDGSSLLQEGQRKAGAAVTTETEVIWAKALPAGTSAQRAELIALTQALKMAEGKKLNVYTDSRYAFATAHIHGEIYRRRGWLTSEGKEIKNKDEILALLKALFLPKRLSIIHCPGHQKGHSAEARGNRMADQAARKAAITETPDTSTLLIENSSPSGGSKRTADGSEFEAGKRTADGSEFEKRTADGSEFESPKKKAKVE

SEQ ID NO: 2697 - protein, 2114 aa, synthetic construct
MPAAKRVKLDGGDKKYSIGLDIGTNSVGWAVITDEYKVPSKKFKVLGNTDRHSIKKNLIGALLFDSGETAEATRLKRTARRRYTRRKNRICYLQEIFSNEMAKVDDSFFHRLEESFLVEEDKKHERHPIFGNIVDEVAYHEKYPTIYHLRKKLVDSTDKADLRLIYLALAHMIKFRGHFLIEGDLNPDNSDVDKLFIQLVQTYNQLFEENPINASGVDAKAILSARLSKSRRLENLIAQLPGEKKNGLFGNLIALSLGLTPNFKSNFDLAEDAKLQLSKDTYDDDLDNLLAQIGDQYADLFLAAKNLSDAILLSDILRVNTEITKAPLSASMIKRYDEHHQDLTLLKALVRQQLPEKYKEIFFDQSKNGYAGYIDGGASQEEFYKFIKPILEKMDGTEELLVKLNREDLLRKQRTFDNGSIPHQIHLGELHAILRRQEDFYPFLKDNREKIEKILTFRIPYYVGPLARGNSRFAWMTRKSEETITPWNFEEVVDKGASAQSFIERMTNFDKNLPNEKVLPKHSLLYEYFTVYNELTKVKYVTEGMRKPAFLSGEQKKAIVDLLFKTNRKVTVKQLKEDYFKKIECFDSVEISGVEDRFNASLGTYHDLLKIIKDKDFLDNEENEDILEDIVLTLTLFEDREMIEERLKTYAHLFDDKVMKQLKRRRYTGWGRLSRKLINGIRDKQSGKTILDFLKSDGFANRNFMQLIHDDSLTFKEDIQKAQVSGQGDSLHEHIANLAGSPAIKKGILQTVKVVDELVKVMGRHKPENIVIEMARENQTTQKGQKNSRERMKRIEEGIKELGSQILKEHPVENTQLQNEKLYLYYLQNGRDMYVDQELDINRLSDYDVDHIVPQSFLKDDSIDNKVLTRSDKARGKSDNVPSEEVVKKMKNYWRQLLNAKLITQRKFDNLTKAERGGLSELDKAGFIKRQLVETRQITKHVAQILDSRMNTKYDENDKLIREVKVITLKSKLVSDFRKDFQFYKVREINNYHHAHDAYLNAVVGTALIKKYPKLESEFVYGDYKVYDVRKMIAKSEQEIGKATAKYFFYSNIMNFFKTEITLANGEIRKRPLIETNGETGEIVWDKGRDFATVRKVLSMPQVNIVKKTEVQTGGFSKESILPKRNSDKLIARKKDWDPKKYGGFDSPTVAYSVLVVAKVEKGKSKKLKSVKELLGITIMERSSFEKNPIDFLEAKGYKEVKKDLIIKLPKYSLFELENGRKRMLASAGELQKGNELALPSKYVNFLYLASHYEKLKGSPEDNEQKQLFVEQHKHYLDEIIEQISEFSKRVILADANLDKVLSAYNKHRDKPIREQAENIIHLFTLTNLGAPAAFKYFDTTIDRKRYTSTKEVLDATLIHQSITGLYETRIDLSQLGGDGGGGSGGSGGSGGTLNIEDEYRLHETSKEPDVSLGSTWLSDFPQAWAETGGMGLAVRQAPLIIPLKATSTPVSIKQYPMSQEARLGIKPHIQRLLDQGILVPCQSPWNTPLLPVKKPGTNDYRPVQDLREVNKRVEDIHPTVPNPYNLLSGLPPSHQWYTVLDLKDAFFCLRLHPTSQPLFAFEWRDPEMGISGQLTWTRLPQGFKNSPTLFNEALHRDLADFRIQHPDLILLQYVDDLLLAATSELDCQQGTRALLQTLGNLGYRASAKKAQICQKQVKYLGYLLKEGQRWLTEARKETVMGQPTPKTPRQLREFLGKAGFCRLFIPGFAEMAAPLYPLTKPGTLFNWGPDQQKAYQEIKQALLTAPALGLPDLTKPFELFVDEKQGYAKGVLTQKLGPWRRPVAYLSKKLDPVAAGWPPCLRMVAAIAVLTKDAGKLTMGQPLVILAPHAVEALVKQPPDRWLSNARMTHYQALLLDTDRVQFGPVVALNPATLLPLPEEGLQHNCLDILAEAHGTRPDLTDQPLPDADHTWYTDGSSLLQEGQRKAGAAVTTETEVIWAKALPAGTSAQRAELIALTQALKMAEGKKLNVYTDSRYAFATAHIHGEIYRRRGWLTSEGKEIKNKDEILALLKALFLPKRLSIIHCPGHQKGHSAEARGNRMADQAARKAAITETPDTSTLLIENSSPSGGSKRTADGSEFEAGKRTADGSEFEKRTADGSEFESPKKKAKVE

SEQ ID NO: 2698 - protein, 2114 aa, synthetic construct
MPAAKRVKLDGGDKKYSIGLDIGTNSVGWAVITDEYKVPSKKFKVLGNTDRHSIKKNLIGALLFDSGETAEATRLKRTARRRYTRRKNRICYLQEIFSNEMAKVDDSFFHRLEESFLVEEDKKHERHPIFGNIVDEVAYHEKYPTIYHLRKKLVDSTDKADLRLIYLALAHMIKFRGHFLIEGDLNPDNSDVDKLFIQLVQTYNQLFEENPINASGVDAKAILSARLSKSRRLENLIAQLPGEKKNGLFGNLIALSLGLTPNFKSNFDLAEDAKLQLSKDTYDDDLDNLLAQIGDQYADLFLAAKNLSDAILLSDILRVNTEITKAPLSASMIKRYDEHHQDLTLLKALVRQQLPEKYKEIFFDQSKNGYAGYIDGGASQEEFYKFIKPILEKMDGTEELLVKLNREDLLRKQRTFDNGSIPHQIHLGELHAILRRQEDFYPFLKDNREKIEKILTFRIPYYVGPLARGNSRFAWMTRKSEETITPWNFEEVVDKGASAQSFIERMTNFDKNLPNEKVLPKHSLLYEYFTVYNELTKVKYVTEGMRKPAFLSGEQKKAIVDLLFKTNRKVTVKQLKEDYFKKIECFDSVEISGVEDRFNASLGTYHDLLKIIKDKDFLDNEENEDILEDIVLTLTLFEDREMIEERLKTYAHLFDDKVMKQLKRRRYTGWGRLSRKLINGIRDKQSGKTILDFLKSDGFANRNFMQLIHDDSLTFKEDIQKAQVSGQGDSLHEHIANLAGSPAIKKGILQTVKVVDELVKVMGRHKPENIVIEMARENQTTQKGQKNSRERMKRIEEGIKELGSQILKEHPVENTQLQNEKLYLYYLQNGRDMYVDQELDINRLSDYDVDHIVPQSFLKDDSIDNKVLTRSDKARGKSDNVPSEEVVKKMKNYWRQLLNAKLITQRKFDNLTKAERGGLSELDKAGFIKRQLVETRQITKHVAQILDSRMNTKYDENDKLIREVKVITLKSKLVSDFRKDFQFYKVREINNYHHAHDAYLNAVVGTALIKKYPKLESEFVYGDYKVYDVRKMIAKSEQEIGKATAKYFFYSNIMNFFKTEITLANGEIRKRPLIETNGETGEIVWDKGRDFATVRKVLSMPQVNIVKKTEVQTGGFSKESILPKRNSDKLIARKKDWDPKKYGGFDSPTVAYSVLVVAKVEKGKSKKLKSVKELLGITIMERSSFEKNPIDFLEAKGYKEVKKDLIIKLPKYSLFELENGRKRMLASAGELQKGNELALPSKYVNFLYLASHYEKLKGSPEDNEQKQLFVEQHKHYLDEIIEQISEFSKRVILADANLDKVLSAYNKHRDKPIREQAENIIHLFTLTNLGAPAAFKYFDTTIDRKRYTSTKEVLDATLIHQSITGLYETRIDLSQLGGDGGGGGPAPGSSGGTLNIEDEYRLHETSKEPDVSLGSTWLSDFPQAWAETGGMGLAVRQAPLIIPLKATSTPVSIKQYPMSQEARLGIKPHIQRLLDQGILVPCQSPWNTPLLPVKKPGTNDYRPVQDLREVNKRVEDIHPTVPNPYNLLSGLPPSHQWYTVLDLKDAFFCLRLHPTSQPLFAFEWRDPEMGISGQLTWTRLPQGFKNSPTLFNEALHRDLADFRIQHPDLILLQYVDDLLLAATSELDCQQGTRALLQTLGNLGYRASAKKAQICQKQVKYLGYLLKEGQRWLTEARKETVMGQPTPKTPRQLREFLGKAGFCRLFIPGFAEMAAPLYPLTKPGTLFNWGPDQQKAYQEIKQALLTAPALGLPDLTKPFELFVDEKQGYAKGVLTQKLGPWRRPVAYLSKKLDPVAAGWPPCLRMVAAIAVLTKDAGKLTMGQPLVILAPHAVEALVKQPPDRWLSNARMTHYQALLLDTDRVQFGPVVALNPATLLPLPEEGLQHNCLDILAEAHGTRPDLTDQPLPDADHTWYTDGSSLLQEGQRKAGAAVTTETEVIWAKALPAGTSAQRAELIALTQALKMAEGKKLNVYTDSRYAFATAHIHGEIYRRRGWLTSEGKEIKNKDEILALLKALFLPKRLSIIHCPGHQKGHSAEARGNRMADQAARKAAITETPDTSTLLIENSSPSGGSKRTADGSEFEAGKRTADGSEFEKRTADGSEFESPKKKAKVE

SEQ ID NO: 2699 - protein, 2114 aa, synthetic construct
MPAAKRVKLDGGDKKYSIGLDIGTNSVGWAVITDEYKVPSKKFKVLGNTDRHSIKKNLIGALLFDSGETAEATRLKRTARRRYTRRKNRICYLQEIFSNEMAKVDDSFFHRLEESFLVEEDKKHERHPIFGNIVDEVAYHEKYPTIYHLRKKLVDSTDKADLRLIYLALAHMIKFRGHFLIEGDLNPDNSDVDKLFIQLVQTYNQLFEENPINASGVDAKAILSARLSKSRRLENLIAQLPGEKKNGLFGNLIALSLGLTPNFKSNFDLAEDAKLQLSKDTYDDDLDNLLAQIGDQYADLFLAAKNLSDAILLSDILRVNTEITKAPLSASMIKRYDEHHQDLTLLKALVRQQLPEKYKEIFFDQSKNGYAGYIDGGASQEEFYKFIKPILEKMDGTEELLVKLNREDLLRKQRTFDNGSIPHQIHLGELHAILRRQEDFYPFLKDNREKIEKILTFRIPYYVGPLARGNSRFAWMTRKSEETITPWNFEEVVDKGASAQSFIERMTNFDKNLPNEKVLPKHSLLYEYFTVYNELTKVKYVTEGMRKPAFLSGEQKKAIVDLLFKTNRKVTVKQLKEDYFKKIECFDSVEISGVEDRFNASLGTYHDLLKIIKDKDFLDNEENEDILEDIVLTLTLFEDREMIEERLKTYAHLFDDKVMKQLKRRRYTGWGRLSRKLINGIRDKQSGKTILDFLKSDGFANRNFMQLIHDDSLTFKEDIQKAQVSGQGDSLHEHIANLAGSPAIKKGILQTVKVVDELVKVMGRHKPENIVIEMARENQTTQKGQKNSRERMKRIEEGIKELGSQILKEHPVENTQLQNEKLYLYYLQNGRDMYVDQELDINRLSDYDVDHIVPQSFLKDDSIDNKVLTRSDKARGKSDNVPSEEVVKKMKNYWRQLLNAKLITQRKFDNLTKAERGGLSELDKAGFIKRQLVETRQITKHVAQILDSRMNTKYDENDKLIREVKVITLKSKLVSDFRKDFQFYKVREINNYHHAHDAYLNAVVGTALIKKYPKLESEFVYGDYKVYDVRKMIAKSEQEIGKATAKYFFYSNIMNFFKTEITLANGEIRKRPLIETNGETGEIVWDKGRDFATVRKVLSMPQVNIVKKTEVQTGGFSKESILPKRNSDKLIARKKDWDPKKYGGFDSPTVAYSVLVVAKVEKGKSKKLKSVKELLGITIMERSSFEKNPIDFLEAKGYKEVKKDLIIKLPKYSLFELENGRKRMLASAGELQKGNELALPSKYVNFLYLASHYEKLKGSPEDNEQKQLFVEQHKHYLDEIIEQISEFSKRVILADANLDKVLSAYNKHRDKPIREQAENIIHLFTLTNLGAPAAFKYFDTTIDRKRYTSTKEVLDATLIHQSITGLYETRIDLSQLGGDGGGSSGGSPAPGGTLNIEDEYRLHETSKEPDVSLGSTWLSDFPQAWAETGGMGLAVRQAPLIIPLKATSTPVSIKQYPMSQEARLGIKPHIQRLLDQGILVPCQSPWNTPLLPVKKPGTNDYRPVQDLREVNKRVEDIHPTVPNPYNLLSGLPPSHQWYTVLDLKDAFFCLRLHPTSQPLFAFEWRDPEMGISGQLTWTRLPQGFKNSPTLFNEALHRDLADFRIQHPDLILLQYVDDLLLAATSELDCQQGTRALLQTLGNLGYRASAKKAQICQKQVKYLGYLLKEGQRWLTEARKETVMGQPTPKTPRQLREFLGKAGFCRLFIPGFAEMAAPLYPLTKPGTLFNWGPDQQKAYQEIKQALLTAPALGLPDLTKPFELFVDEKQGYAKGVLTQKLGPWRRPVAYLSKKLDPVAAGWPPCLRMVAAIAVLTKDAGKLTMGQPLVILAPHAVEALVKQPPDRWLSNARMTHYQALLLDTDRVQFGPVVALNPATLLPLPEEGLQHNCLDILAEAHGTRPDLTDQPLPDADHTWYTDGSSLLQEGQRKAGAAVTTETEVIWAKALPAGTSAQRAELIALTQALKMAEGKKLNVYTDSRYAFATAHIHGEIYRRRGWLTSEGKEIKNKDEILALLKALFLPKRLSIIHCPGHQKGHSAEARGNRMADQAARKAAITETPDTSTLLIENSSPSGGSKRTADGSEFEAGKRTADGSEFEKRTADGSEFESPKKKAKVE

SEQ ID NO: 2700 - protein, 2113 aa, synthetic construct
MPAAKRVKLDGGDKKYSIGLDIGTNSVGWAVITDEYKVPSKKFKVLGNTDRHSIKKNLIGALLFDSGETAEATRLKRTARRRYTRRKNRICYLQEIFSNEMAKVDDSFFHRLEESFLVEEDKKHERHPIFGNIVDEVAYHEKYPTIYHLRKKLVDSTDKADLRLIYLALAHMIKFRGHFLIEGDLNPDNSDVDKLFIQLVQTYNQLFEENPINASGVDAKAILSARLSKSRRLENLIAQLPGEKKNGLFGNLIALSLGLTPNFKSNFDLAEDAKLQLSKDTYDDDLDNLLAQIGDQYADLFLAAKNLSDAILLSDILRVNTEITKAPLSASMIKRYDEHHQDLTLLKALVRQQLPEKYKEIFFDQSKNGYAGYIDGGASQEEFYKFIKPILEKMDGTEELLVKLNREDLLRKQRTFDNGSIPHQIHLGELHAILRRQEDFYPFLKDNREKIEKILTFRIPYYVGPLARGNSRFAWMTRKSEETITPWNFEEVVDKGASAQSFIERMTNFDKNLPNEKVLPKHSLLYEYFTVYNELTKVKYVTEGMRKPAFLSGEQKKAIVDLLFKTNRKVTVKQLKEDYFKKIECFDSVEISGVEDRFNASLGTYHDLLKIIKDKDFLDNEENEDILEDIVLTLTLFEDREMIEERLKTYAHLFDDKVMKQLKRRRYTGWGRLSRKLINGIRDKQSGKTILDFLKSDGFANRNFMQLIHDDSLTFKEDIQKAQVSGQGDSLHEHIANLAGSPAIKKGILQTVKVVDELVKVMGRHKPENIVIEMARENQTTQKGQKNSRERMKRIEEGIKELGSQILKEHPVENTQLQNEKLYLYYLQNGRDMYVDQELDINRLSDYDVDHIVPQSFLKDDSIDNKVLTRSDKARGKSDNVPSEEVVKKMKNYWRQLLNAKLITQRKFDNLTKAERGGLSELDKAGFIKRQLVETRQITKHVAQILDSRMNTKYDENDKLIREVKVITLKSKLVSDFRKDFQFYKVREINNYHHAHDAYLNAVVGTALIKKYPKLESEFVYGDYKVYDVRKMIAKSEQEIGKATAKYFFYSNIMNFFKTEITLANGEIRKRPLIETNGETGEIVWDKGRDFATVRKVLSMPQVNIVKKTEVQTGGFSKESILPKRNSDKLIARKKDWDPKKYGGFDSPTVAYSVLVVAKVEKGKSKKLKSVKELLGITIMERSSFEKNPIDFLEAKGYKEVKKDLIIKLPKYSLFELENGRKRMLASAGELQKGNELALPSKYVNFLYLASHYEKLKGSPEDNEQKQLFVEQHKHYLDEIIEQISEFSKRVILADANLDKVLSAYNKHRDKPIREQAENIIHLFTLTNLGAPAAFKYFDTTIDRKRYTSTKEVLDATLIHQSITGLYETRIDLSQLGGDGGGGSEAAAKGGTLNIEDEYRLHETSKEPDVSLGSTWLSDFPQAWAETGGMGLAVRQAPLIIPLKATSTPVSIKQYPMSQEARLGIKPHIQRLLDQGILVPCQSPWNTPLLPVKKPGTNDYRPVQDLREVNKRVEDIHPTVPNPYNLLSGLPPSHQWYTVLDLKDAFFCLRLHPTSQPLFAFEWRDPEMGISGQLTWTRLPQGFKNSPTLFNEALHRDLADFRIQHPDLILLQYVDDLLLAATSELDCQQGTRALLQTLGNLGYRASAKKAQICQKQVKYLGYLLKEGQRWLTEARKETVMGQPTPKTPRQLREFLGKAGFCRLFIPGFAEMAAPLYPLTKPGTLFNWGPDQQKAYQEIKQALLTAPALGLPDLTKPFELFVDEKQGYAKGVLTQKLGPWRRPVAYLSKKLDPVAAGWPPCLRMVAAIAVLTKDAGKLTMGQPLVILAPHAVEALVKQPPDRWLSNARMTHYQALLLDTDRVQFGPVVALNPATLLPLPEEGLQHNCLDILAEAHGTRPDLTDQPLPDADHTWYTDGSSLLQEGQRKAGAAVTTETEVIWAKALPAGTSAQRAELIALTQALKMAEGKKLNVYTDSRYAFATAHIHGEIYRRRGWLTSEGKEIKNKDEILALLKALFLPKRLSIIHCPGHQKGHSAEARGNRMADQAARKAAITETPDTSTLLIENSSPSGGSKRTADGSEFEAGKRTADGSEFEKRTADGSEFESPKKKAKVE

SEQ ID NO: 2701 - protein, 2116 aa, synthetic construct
MPAAKRVKLDGGDKKYSIGLDIGTNSVGWAVITDEYKVPSKKFKVLGNTDRHSIKKNLIGALLFDSGETAEATRLKRTARRRYTRRKNRICYLQEIFSNEMAKVDDSFFHRLEESFLVEEDKKHERHPIFGNIVDEVAYHEKYPTIYHLRKKLVDSTDKADLRLIYLALAHMIKFRGHFLIEGDLNPDNSDVDKLFIQLVQTYNQLFEENPINASGVDAKAILSARLSKSRRLENLIAQLPGEKKNGLFGNLIALSLGLTPNFKSNFDLAEDAKLQLSKDTYDDDLDNLLAQIGDQYADLFLAAKNLSDAILLSDILRVNTEITKAPLSASMIKRYDEHHQDLTLLKALVRQQLPEKYKEIFFDQSKNGYAGYIDGGASQEEFYKFIKPILEKMDGTEELLVKLNREDLLRKQRTFDNGSIPHQIHLGELHAILRRQEDFYPFLKDNREKIEKILTFRIPYYVGPLARGNSRFAWMTRKSEETITPWNFEEVVDKGASAQSFIERMTNFDKNLPNEKVLPKHSLLYEYFTVYNELTKVKYVTEGMRKPAFLSGEQKKAIVDLLFKTNRKVTVKQLKEDYFKKIECFDSVEISGVEDRFNASLGTYHDLLKIIKDKDFLDNEENEDILEDIVLTLTLFEDREMIEERLKTYAHLFDDKVMKQLKRRRYTGWGRLSRKLINGIRDKQSGKTILDFLKSDGFANRNFMQLIHDDSLTFKEDIQKAQVSGQGDSLHEHIANLAGSPAIKKGILQTVKVVDELVKVMGRHKPENIVIEMARENQTTQKGQKNSRERMKRIEEGIKELGSQILKEHPVENTQLQNEKLYLYYLQNGRDMYVDQELDINRLSDYDVDHIVPQSFLKDDSIDNKVLTRSDKARGKSDNVPSEEVVKKMKNYWRQLLNAKLITQRKFDNLTKAERGGLSELDKAGFIKRQLVETRQITKHVAQILDSRMNTKYDENDKLIREVKVITLKSKLVSDFRKDFQFYKVREINNYHHAHDAYLNAVVGTALIKKYPKLESEFVYGDYKVYDVRKMIAKSEQEIGKATAKYFFYSNIMNFFKTEITLANGEIRKRPLIETNGETGEIVWDKGRDFATVRKVLSMPQVNIVKKTEVQTGGFSKESILPKRNSDKLIARKKDWDPKKYGGFDSPTVAYSVLVVAKVEKGKSKKLKSVKELLGITIMERSSFEKNPIDFLEAKGYKEVKKDLIIKLPKYSLFELENGRKRMLASAGELQKGNELALPSKYVNFLYLASHYEKLKGSPEDNEQKQLFVEQHKHYLDEIIEQISEFSKRVILADANLDKVLSAYNKHRDKPIREQAENIIHLFTLTNLGAPAAFKYFDTTIDRKRYTSTKEVLDATLIHQSITGLYETRIDLSQLGGDGGGGSPAPEAAAKGGTLNIEDEYRLHETSKEPDVSLGSTWLSDFPQAWAETGGMGLAVRQAPLIIPLKATSTPVSIKQYPMSQEARLGIKPHIQRLLDQGILVPCQSPWNTPLLPVKKPGTNDYRPVQDLREVNKRVEDIHPTVPNPYNLLSGLPPSHQWYTVLDLKDAFFCLRLHPTSQPLFAFEWRDPEMGISGQLTWTRLPQGFKNSPTLFNEALHRDLADFRIQHPDLILLQYVDDLLLAATSELDCQQGTRALLQTLGNLGYRASAKKAQICQKQVKYLGYLLKEGQRWLTEARKETVMGQPTPKTPRQLREFLGKAGFCRLFIPGFAEMAAPLYPLTKPGTLFNWGPDQQKAYQEIKQALLTAPALGLPDLTKPFELFVDEKQGYAKGVLTQKLGPWRRPVAYLSKKLDPVAAGWPPCLRMVAAIAVLTKDAGKLTMGQPLVILAPHAVEALVKQPPDRWLSNARMTHYQALLLDTDRVQFGPVVALNPATLLPLPEEGLQHNCLDILAEAHGTRPDLTDQPLPDADHTWYTDGSSLLQEGQRKAGAAVTTETEVIWAKALPAGTSAQRAELIALTQALKMAEGKKLNVYTDSRYAFATAHIHGEIYRRRGWLTSEGKEIKNKDEILALLKALFLPKRLSIIHCPGHQKGHSAEARGNRMADQAARKAAITETPDTSTLLIENSSPSGGSKRTADGSEFEAGKRTADGSEFEKRTADGSEFESPKKKAKVE

SEQ ID NO: 2702 - protein, 2114 aa, synthetic construct
MPAAKRVKLDGGDKKYSIGLDIGTNSVGWAVITDEYKVPSKKFKVLGNTDRHSIKKNLIGALLFDSGETAEATRLKRTARRRYTRRKNRICYLQEIFSNEMAKVDDSFFHRLEESFLVEEDKKHERHPIFGNIVDEVAYHEKYPTIYHLRKKLVDSTDKADLRLIYLALAHMIKFRGHFLIEGDLNPDNSDVDKLFIQLVQTYNQLFEENPINASGVDAKAILSARLSKSRRLENLIAQLPGEKKNGLFGNLIALSLGLTPNFKSNFDLAEDAKLQLSKDTYDDDLDNLLAQIGDQYADLFLAAKNLSDAILLSDILRVNTEITKAPLSASMIKRYDEHHQDLTLLKALVRQQLPEKYKEIFFDQSKNGYAGYIDGGASQEEFYKFIKPILEKMDGTEELLVKLNREDLLRKQRTFDNGSIPHQIHLGELHAILRRQEDFYPFLKDNREKIEKILTFRIPYYVGPLARGNSRFAWMTRKSEETITPWNFEEVVDKGASAQSFIERMTNFDKNLPNEKVLPKHSLLYEYFTVYNELTKVKYVTEGMRKPAFLSGEQKKAIVDLLFKTNRKVTVKQLKEDYFKKIECFDSVEISGVEDRFNASLGTYHDLLKIIKDKDFLDNEENEDILEDIVLTLTLFEDREMIEERLKTYAHLFDDKVMKQLKRRRYTGWGRLSRKLINGIRDKQSGKTILDFLKSDGFANRNFMQLIHDDSLTFKEDIQKAQVSGQGDSLHEHIANLAGSPAIKKGILQTVKVVDELVKVMGRHKPENIVIEMARENQTTQKGQKNSRERMKRIEEGIKELGSQILKEHPVENTQLQNEKLYLYYLQNGRDMYVDQELDINRLSDYDVDHIVPQSFLKDDSIDNKVLTRSDKARGKSDNVPSEEVVKKMKNYWRQLLNAKLITQRKFDNLTKAERGGLSELDKAGFIKRQLVETRQITKHVAQILDSRMNTKYDENDKLIREVKVITLKSKLVSDFRKDFQFYKVREINNYHHAHDAYLNAVVGTALIKKYPKLESEFVYGDYKVYDVRKMIAKSEQEIGKATAKYFFYSNIMNFFKTEITLANGEIRKRPLIETNGETGEIVWDKGRDFATVRKVLSMPQVNIVKKTEVQTGGFSKESILPKRNSDKLIARKKDWDPKKYGGFDSPTVAYSVLVVAKVEKGKSKKLKSVKELLGITIMERSSFEKNPIDFLEAKGYKEVKKDLIIKLPKYSLFELENGRKRMLASAGELQKGNELALPSKYVNFLYLASHYEKLKGSPEDNEQKQLFVEQHKHYLDEIIEQISEFSKRVILADANLDKVLSAYNKHRDKPIREQAENIIHLFTLTNLGAPAAFKYFDTTIDRKRYTSTKEVLDATLIHQSITGLYETRIDLSQLGGDGGGGSGGGGSSGGTLNIEDEYRLHETSKEPDVSLGSTWLSDFPQAWAETGGMGLAVRQAPLIIPLKATSTPVSIKQYPMSQEARLGIKPHIQRLLDQGILVPCQSPWNTPLLPVKKPGTNDYRPVQDLREVNKRVEDIHPTVPNPYNLLSGLPPSHQWYTVLDLKDAFFCLRLHPTSQPLFAFEWRDPEMGISGQLTWTRLPQGFKNSPTLFNEALHRDLADFRIQHPDLILLQYVDDLLLAATSELDCQQGTRALLQTLGNLGYRASAKKAQICQKQVKYLGYLLKEGQRWLTEARKETVMGQPTPKTPRQLREFLGKAGFCRLFIPGFAEMAAPLYPLTKPGTLFNWGPDQQKAYQEIKQALLTAPALGLPDLTKPFELFVDEKQGYAKGVLTQKLGPWRRPVAYLSKKLDPVAAGWPPCLRMVAAIAVLTKDAGKLTMGQPLVILAPHAVEALVKQPPDRWLSNARMTHYQALLLDTDRVQFGPVVALNPATLLPLPEEGLQHNCLDILAEAHGTRPDLTDQPLPDADHTWYTDGSSLLQEGQRKAGAAVTTETEVIWAKALPAGTSAQRAELIALTQALKMAEGKKLNVYTDSRYAFATAHIHGEIYRRRGWLTSEGKEIKNKDEILALLKALFLPKRLSIIHCPGHQKGHSAEARGNRMADQAARKAAITETPDTSTLLIENSSPSGGSKRTADGSEFEAGKRTADGSEFEKRTADGSEFESPKKKAKVE

SEQ ID NO: 2703 - protein, 2116 aa, synthetic construct
MPAAKRVKLDGGDKKYSIGLDIGTNSVGWAVITDEYKVPSKKFKVLGNTDRHSIKKNLIGALLFDSGETAEATRLKRTARRRYTRRKNRICYLQEIFSNEMAKVDDSFFHRLEESFLVEEDKKHERHPIFGNIVDEVAYHEKYPTIYHLRKKLVDSTDKADLRLIYLALAHMIKFRGHFLIEGDLNPDNSDVDKLFIQLVQTYNQLFEENPINASGVDAKAILSARLSKSRRLENLIAQLPGEKKNGLFGNLIALSLGLTPNFKSNFDLAEDAKLQLSKDTYDDDLDNLLAQIGDQYADLFLAAKNLSDAILLSDILRVNTEITKAPLSASMIKRYDEHHQDLTLLKALVRQQLPEKYKEIFFDQSKNGYAGYIDGGASQEEFYKFIKPILEKMDGTEELLVKLNREDLLRKQRTFDNGSIPHQIHLGELHAILRRQEDFYPFLKDNREKIEKILTFRIPYYVGPLARGNSRFAWMTRKSEETITPWNFEEVVDKGASAQSFIERMTNFDKNLPNEKVLPKHSLLYEYFTVYNELTKVKYVTEGMRKPAFLSGEQKKAIVDLLFKTNRKVTVKQLKEDYFKKIECFDSVEISGVEDRFNASLGTYHDLLKIIKDKDFLDNEENEDILEDIVLTLTLFEDREMIEERLKTYAHLFDDKVMKQLKRRRYTGWGRLSRKLINGIRDKQSGKTILDFLKSDGFANRNFMQLIHDDSLTFKEDIQKAQVSGQGDSLHEHIANLAGSPAIKKGILQTVKVVDELVKVMGRHKPENIVIEMARENQTTQKGQKNSRERMKRIEEGIKELGSQILKEHPVENTQLQNEKLYLYYLQNGRDMYVDQELDINRLSDYDVDHIVPQSFLKDDSIDNKVLTRSDKARGKSDNVPSEEVVKKMKNYWRQLLNAKLITQRKFDNLTKAERGGLSELDKAGFIKRQLVETRQITKHVAQILDSRMNTKYDENDKLIREVKVITLKSKLVSDFRKDFQFYKVREINNYHHAHDAYLNAVVGTALIKKYPKLESEFVYGDYKVYDVRKMIAKSEQEIGKATAKYFFYSNIMNFFKTEITLANGEIRKRPLIETNGETGEIVWDKGRDFATVRKVLSMPQVNIVKKTEVQTGGFSKESILPKRNSDKLIARKKDWDPKKYGGFDSPTVAYSVLVVAKVEKGKSKKLKSVKELLGITIMERSSFEKNPIDFLEAKGYKEVKKDLIIKLPKYSLFELENGRKRMLASAGELQKGNELALPSKYVNFLYLASHYEKLKGSPEDNEQKQLFVEQHKHYLDEIIEQISEFSKRVILADANLDKVLSAYNKHRDKPIREQAENIIHLFTLTNLGAPAAFKYFDTTIDRKRYTSTKEVLDATLIHQSITGLYETRIDLSQLGGDGGGSSEAAAKGGSGGTLNIEDEYRLHETSKEPDVSLGSTWLSDFPQAWAETGGMGLAVRQAPLIIPLKATSTPVSIKQYPMSQEARLGIKPHIQRLLDQGILVPCQSPWNTPLLPVKKPGTNDYRPVQDLREVNKRVEDIHPTVPNPYNLLSGLPPSHQWYTVLDLKDAFFCLRLHPTSQPLFAFEWRDPEMGISGQLTWTRLPQGFKNSPTLFNEALHRDLADFRIQHPDLILLQYVDDLLLAATSELDCQQGTRALLQTLGNLGYRASAKKAQICQKQVKYLGYLLKEGQRWLTEARKETVMGQPTPKTPRQLREFLGKAGFCRLFIPGFAEMAAPLYPLTKPGTLFNWGPDQQKAYQEIKQALLTAPALGLPDLTKPFELFVDEKQGYAKGVLTQKLGPWRRPVAYLSKKLDPVAAGWPPCLRMVAAIAVLTKDAGKLTMGQPLVILAPHAVEALVKQPPDRWLSNARMTHYQALLLDTDRVQFGPVVALNPATLLPLPEEGLQHNCLDILAEAHGTRPDLTDQPLPDADHTWYTDGSSLLQEGQRKAGAAVTTETEVIWAKALPAGTSAQRAELIALTQALKMAEGKKLNVYTDSRYAFATAHIHGEIYRRRGWLTSEGKEIKNKDEILALLKALFLPKRLSIIHCPGHQKGHSAEARGNRMADQAARKAAITETPDTSTLLIENSSPSGGSKRTADGSEFEAGKRTADGSEFEKRTADGSEFESPKKKAKVE

SEQ ID NO: 2704 - protein, 2094 aa, synthetic construct
MPAAKRVKLDGGDKKYSIGLDIGTNSVGWAVITDEYKVPSKKFKVLGNTDRHSIKKNLIGALLFDSGETAEATRLKRTARRRYTRRKNRICYLQEIFSNEMAKVDDSFFHRLEESFLVEEDKKHERHPIFGNIVDEVAYHEKYPTIYHLRKKLVDSTDKADLRLIYLALAHMIKFRGHFLIEGDLNPDNSDVDKLFIQLVQTYNQLFEENPINASGVDAKAILSARLSKSRRLENLIAQLPGEKKNGLFGNLIALSLGLTPNFKSNFDLAEDAKLQLSKDTYDDDLDNLLAQIGDQYADLFLAAKNLSDAILLSDILRVNTEITKAPLSASMIKRYDEHHQDLTLLKALVRQQLPEKYKEIFFDQSKNGYAGYIDGGASQEEFYKFIKPILEKMDGTEELLVKLNREDLLRKQRTFDNGSIPHQIHLGELHAILRRQEDFYPFLKDNREKIEKILTFRIPYYVGPLARGNSRFAWMTRKSEETITPWNFEEVVDKGASAQSFIERMTNFDKNLPNEKVLPKHSLLYEYFTVYNELTKVKYVTEGMRKPAFLSGEQKKAIVDLLFKTNRKVTVKQLKEDYFKKIECFDSVEISGVEDRFNASLGTYHDLLKIIKDKDFLDNEENEDILEDIVLTLTLFEDREMIEERLKTYAHLFDDKVMKQLKRRRYTGWGRLSRKLINGIRDKQSGKTILDFLKSDGFANRNFMQLIHDDSLTFKEDIQKAQVSGQGDSLHEHIANLAGSPAIKKGILQTVKVVDELVKVMGRHKPENIVIEMARENQTTQKGQKNSRERMKRIEEGIKELGSQILKEHPVENTQLQNEKLYLYYLQNGRDMYVDQELDINRLSDYDVDHIVPQSFLKDDSIDNKVLTRSDKARGKSDNVPSEEVVKKMKNYWRQLLNAKLITQRKFDNLTKAERGGLSELDKAGFIKRQLVETRQITKHVAQILDSRMNTKYDENDKLIREVKVITLKSKLVSDFRKDFQFYKVREINNYHHAHDAYLNAVVGTALIKKYPKLESEFVYGDYKVYDVRKMIAKSEQEIGKATAKYFFYSNIMNFFKTEITLANGEIRKRPLIETNGETGEIVWDKGRDFATVRKVLSMPQVNIVKKTEVQTGGFSKESILPKRNSDKLIARKKDWDPKKYGGFDSPTVAYSVLVVAKVEKGKSKKLKSVKELLGITIMERSSFEKNPIDFLEAKGYKEVKKDLIIKLPKYSLFELENGRKRMLASAGELQKGNELALPSKYVNFLYLASHYEKLKGSPEDNEQKQLFVEQHKHYLDEIIEQISEFSKRVILADANLDKVLSAYNKHRDKPIREQAENIIHLFTLTNLGAPAAFKYFDTTIDRKRYTSTKEVLDATLIHQSITGLYETRIDLSQLGGDGGGGSPAPGSSGGTLNIEDEHRLHETSKEPDVSLGSTWLSDFPQAWAETGGMGLAVRQAPLIIPLKATSTPVSIKQYPMSQEARLGIKPHIQRLLDQGILVPCQSPWNTPLLPVKKPGTNDYRPVQDLREVNKRVEDIHPTVPNPYNLLSGLPPSHQWYTVLDLKDAFFCLRLHPTSQPLFAFEWRDPEMGISGQLTWTRLPQGFKNSPTLFDEALHRDLADFRIQHPDLILLQYVDDLLLAATSELDCQQGTRALLQTLGNLGYRASAKKAQICQKQVKYLGYLLKEGQRWLTEARKETVMGQPTPKTPRQLREFLGTAGFCRLWIPGFAEMAAPLYPLTKTGTLFNWGPDQQKAYQEIKQALLTAPALGLPDLTKPFELFVDEKQGYAKGVLTQKLGPWRRPVAYLSKKLDPVAAGWPPCLRMVAAIAVLTKDAGKLTMGQPLVILAPHAVEALVKQPPDRWLSNARMTHYQALLLDTDRVQFGPVVALNPATLLPLPEEGLQHNCLDILAEAHGTRPDLTDQPLPDADHTWYTDGSSLLQEGQRKAGAAVTTETEVIWAKALPAGTSAQRAELIALTQALKMAEGKKLNVYTDSRYAFATAHIHGEIYRRRGLLTSEGKEIKNKDEILALLKALFLPKRLSIIHCPGHQKGHSAEARGNRMADQAARKAAITETPDTSTLLAGKRTADGSEFEKRTADGSEFESPKKKAKVE

SEQ ID NO: 2705 - protein, 2096 aa, synthetic construct
MPAAKRVKLDGGDKKYSIGLDIGTNSVGWAVITDEYKVPSKKFKVLGNTDRHSIKKNLIGALLFDSGETAEATRLKRTARRRYTRRKNRICYLQEIFSNEMAKVDDSFFHRLEESFLVEEDKKHERHPIFGNIVDEVAYHEKYPTIYHLRKKLVDSTDKADLRLIYLALAHMIKFRGHFLIEGDLNPDNSDVDKLFIQLVQTYNQLFEENPINASGVDAKAILSARLSKSRRLENLIAQLPGEKKNGLFGNLIALSLGLTPNFKSNFDLAEDAKLQLSKDTYDDDLDNLLAQIGDQYADLFLAAKNLSDAILLSDILRVNTEITKAPLSASMIKRYDEHHQDLTLLKALVRQQLPEKYKEIFFDQSKNGYAGYIDGGASQEEFYKFIKPILEKMDGTEELLVKLNREDLLRKQRTFDNGSIPHQIHLGELHAILRRQEDFYPFLKDNREKIEKILTFRIPYYVGPLARGNSRFAWMTRKSEETITPWNFEEVVDKGASAQSFIERMTNFDKNLPNEKVLPKHSLLYEYFTVYNELTKVKYVTEGMRKPAFLSGEQKKAIVDLLFKTNRKVTVKQLKEDYFKKIECFDSVEISGVEDRFNASLGTYHDLLKIIKDKDFLDNEENEDILEDIVLTLTLFEDREMIEERLKTYAHLFDDKVMKQLKRRRYTGWGRLSRKLINGIRDKQSGKTILDFLKSDGFANRNFMQLIHDDSLTFKEDIQKAQVSGQGDSLHEHIANLAGSPAIKKGILQTVKVVDELVKVMGRHKPENIVIEMARENQTTQKGQKNSRERMKRIEEGIKELGSQILKEHPVENTQLQNEKLYLYYLQNGRDMYVDQELDINRLSDYDVDHIVPQSFLKDDSIDNKVLTRSDKARGKSDNVPSEEVVKKMKNYWRQLLNAKLITQRKFDNLTKAERGGLSELDKAGFIKRQLVETRQITKHVAQILDSRMNTKYDENDKLIREVKVITLKSKLVSDFRKDFQFYKVREINNYHHAHDAYLNAVVGTALIKKYPKLESEFVYGDYKVYDVRKMIAKSEQEIGKATAKYFFYSNIMNFFKTEITLANGEIRKRPLIETNGETGEIVWDKGRDFATVRKVLSMPQVNIVKKTEVQTGGFSKESILPKRNSDKLIARKKDWDPKKYGGFDSPTVAYSVLVVAKVEKGKSKKLKSVKELLGITIMERSSFEKNPIDFLEAKGYKEVKKDLIIKLPKYSLFELENGRKRMLASAGELQKGNELALPSKYVNFLYLASHYEKLKGSPEDNEQKQLFVEQHKHYLDEIIEQISEFSKRVILADANLDKVLSAYNKHRDKPIREQAENIIHLFTLTNLGAPAAFKYFDTTIDRKRYTSTKEVLDATLIHQSITGLYETRIDLSQLGGDGGEAAAKGSSGGGGGTLNIEDEHRLHETSKEPDVSLGSTWLSDFPQAWAETGGMGLAVRQAPLIIPLKATSTPVSIKQYPMSQEARLGIKPHIQRLLDQGILVPCQSPWNTPLLPVKKPGTNDYRPVQDLREVNKRVEDIHPTVPNPYNLLSGLPPSHQWYTVLDLKDAFFCLRLHPTSQPLFAFEWRDPEMGISGQLTWTRLPQGFKNSPTLFDEALHRDLADFRIQHPDLILLQYVDDLLLAATSELDCQQGTRALLQTLGNLGYRASAKKAQICQKQVKYLGYLLKEGQRWLTEARKETVMGQPTPKTPRQLREFLGTAGFCRLWIPGFAEMAAPLYPLTKTGTLFNWGPDQQKAYQEIKQALLTAPALGLPDLTKPFELFVDEKQGYAKGVLTQKLGPWRRPVAYLSKKLDPVAAGWPPCLRMVAAIAVLTKDAGKLTMGQPLVILAPHAVEALVKQPPDRWLSNARMTHYQALLLDTDRVQFGPVVALNPATLLPLPEEGLQHNCLDILAEAHGTRPDLTDQPLPDADHTWYTDGSSLLQEGQRKAGAAVTTETEVIWAKALPAGTSAQRAELIALTQALKMAEGKKLNVYTDSRYAFATAHIHGEIYRRRGLLTSEGKEIKNKDEILALLKALFLPKRLSIIHCPGHQKGHSAEARGNRMADQAARKAAITETPDTSTLLAGKRTADGSEFEKRTADGSEFESPKKKAKVE

SEQ ID NO: 2706 - protein, 2096 aa, synthetic construct
MPAAKRVKLDGGDKKYSIGLDIGTNSVGWAVITDEYKVPSKKFKVLGNTDRHSIKKNLIGALLFDSGETAEATRLKRTARRRYTRRKNRICYLQEIFSNEMAKVDDSFFHRLEESFLVEEDKKHERHPIFGNIVDEVAYHEKYPTIYHLRKKLVDSTDKADLRLIYLALAHMIKFRGHFLIEGDLNPDNSDVDKLFIQLVQTYNQLFEENPINASGVDAKAILSARLSKSRRLENLIAQLPGEKKNGLFGNLIALSLGLTPNFKSNFDLAEDAKLQLSKDTYDDDLDNLLAQIGDQYADLFLAAKNLSDAILLSDILRVNTEITKAPLSASMIKRYDEHHQDLTLLKALVRQQLPEKYKEIFFDQSKNGYAGYIDGGASQEEFYKFIKPILEKMDGTEELLVKLNREDLLRKQRTFDNGSIPHQIHLGELHAILRRQEDFYPFLKDNREKIEKILTFRIPYYVGPLARGNSRFAWMTRKSEETITPWNFEEVVDKGASAQSFIERMTNFDKNLPNEKVLPKHSLLYEYFTVYNELTKVKYVTEGMRKPAFLSGEQKKAIVDLLFKTNRKVTVKQLKEDYFKKIECFDSVEISGVEDRFNASLGTYHDLLKIIKDKDFLDNEENEDILEDIVLTLTLFEDREMIEERLKTYAHLFDDKVMKQLKRRRYTGWGRLSRKLINGIRDKQSGKTILDFLKSDGFANRNFMQLIHDDSLTFKEDIQKAQVSGQGDSLHEHIANLAGSPAIKKGILQTVKVVDELVKVMGRHKPENIVIEMARENQTTQKGQKNSRERMKRIEEGIKELGSQILKEHPVENTQLQNEKLYLYYLQNGRDMYVDQELDINRLSDYDVDHIVPQSFLKDDSIDNKVLTRSDKARGKSDNVPSEEVVKKMKNYWRQLLNAKLITQRKFDNLTKAERGGLSELDKAGFIKRQLVETRQITKHVAQILDSRMNTKYDENDKLIREVKVITLKSKLVSDFRKDFQFYKVREINNYHHAHDAYLNAVVGTALIKKYPKLESEFVYGDYKVYDVRKMIAKSEQEIGKATAKYFFYSNIMNFFKTEITLANGEIRKRPLIETNGETGEIVWDKGRDFATVRKVLSMPQVNIVKKTEVQTGGFSKESILPKRNSDKLIARKKDWDPKKYGGFDSPTVAYSVLVVAKVEKGKSKKLKSVKELLGITIMERSSFEKNPIDFLEAKGYKEVKKDLIIKLPKYSLFELENGRKRMLASAGELQKGNELALPSKYVNFLYLASHYEKLKGSPEDNEQKQLFVEQHKHYLDEIIEQISEFSKRVILADANLDKVLSAYNKHRDKPIREQAENIIHLFTLTNLGAPAAFKYFDTTIDRKRYTSTKEVLDATLIHQSITGLYETRIDLSQLGGDGGGSSGGGEAAAKGGTLNIEDEHRLHETSKEPDVSLGSTWLSDFPQAWAETGGMGLAVRQAPLIIPLKATSTPVSIKQYPMSQEARLGIKPHIQRLLDQGILVPCQSPWNTPLLPVKKPGTNDYRPVQDLREVNKRVEDIHPTVPNPYNLLSGLPPSHQWYTVLDLKDAFFCLRLHPTSQPLFAFEWRDPEMGISGQLTWTRLPQGFKNSPTLFDEALHRDLADFRIQHPDLILLQYVDDLLLAATSELDCQQGTRALLQTLGNLGYRASAKKAQICQKQVKYLGYLLKEGQRWLTEARKETVMGQPTPKTPRQLREFLGTAGFCRLWIPGFAEMAAPLYPLTKTGTLFNWGPDQQKAYQEIKQALLTAPALGLPDLTKPFELFVDEKQGYAKGVLTQKLGPWRRPVAYLSKKLDPVAAGWPPCLRMVAAIAVLTKDAGKLTMGQPLVILAPHAVEALVKQPPDRWLSNARMTHYQALLLDTDRVQFGPVVALNPATLLPLPEEGLQHNCLDILAEAHGTRPDLTDQPLPDADHTWYTDGSSLLQEGQRKAGAAVTTETEVIWAKALPAGTSAQRAELIALTQALKMAEGKKLNVYTDSRYAFATAHIHGEIYRRRGLLTSEGKEIKNKDEILALLKALFLPKRLSIIHCPGHQKGHSAEARGNRMADQAARKAAITETPDTSTLLAGKRTADGSEFEKRTADGSEFESPKKKAKVE

SEQ ID NO: 2707 - protein, 2093 aa, synthetic construct
MPAAKRVKLDGGDKKYSIGLDIGTNSVGWAVITDEYKVPSKKFKVLGNTDRHSIKKNLIGALLFDSGETAEATRLKRTARRRYTRRKNRICYLQEIFSNEMAKVDDSFFHRLEESFLVEEDKKHERHPIFGNIVDEVAYHEKYPTIYHLRKKLVDSTDKADLRLIYLALAHMIKFRGHFLIEGDLNPDNSDVDKLFIQLVQTYNQLFEENPINASGVDAKAILSARLSKSRRLENLIAQLPGEKKNGLFGNLIALSLGLTPNFKSNFDLAEDAKLQLSKDTYDDDLDNLLAQIGDQYADLFLAAKNLSDAILLSDILRVNTEITKAPLSASMIKRYDEHHQDLTLLKALVRQQLPEKYKEIFFDQSKNGYAGYIDGGASQEEFYKFIKPILEKMDGTEELLVKLNREDLLRKQRTFDNGSIPHQIHLGELHAILRRQEDFYPFLKDNREKIEKILTFRIPYYVGPLARGNSRFAWMTRKSEETITPWNFEEVVDKGASAQSFIERMTNFDKNLPNEKVLPKHSLLYEYFTVYNELTKVKYVTEGMRKPAFLSGEQKKAIVDLLFKTNRKVTVKQLKEDYFKKIECFDSVEISGVEDRFNASLGTYHDLLKIIKDKDFLDNEENEDILEDIVLTLTLFEDREMIEERLKTYAHLFDDKVMKQLKRRRYTGWGRLSRKLINGIRDKQSGKTILDFLKSDGFANRNFMQLIHDDSLTFKEDIQKAQVSGQGDSLHEHIANLAGSPAIKKGILQTVKVVDELVKVMGRHKPENIVIEMARENQTTQKGQKNSRERMKRIEEGIKELGSQILKEHPVENTQLQNEKLYLYYLQNGRDMYVDQELDINRLSDYDVDHIVPQSFLKDDSIDNKVLTRSDKARGKSDNVPSEEVVKKMKNYWRQLLNAKLITQRKFDNLTKAERGGLSELDKAGFIKRQLVETRQITKHVAQILDSRMNTKYDENDKLIREVKVITLKSKLVSDFRKDFQFYKVREINNYHHAHDAYLNAVVGTALIKKYPKLESEFVYGDYKVYDVRKMIAKSEQEIGKATAKYFFYSNIMNFFKTEITLANGEIRKRPLIETNGETGEIVWDKGRDFATVRKVLSMPQVNIVKKTEVQTGGFSKESILPKRNSDKLIARKKDWDPKKYGGFDSPTVAYSVLVVAKVEKGKSKKLKSVKELLGITIMERSSFEKNPIDFLEAKGYKEVKKDLIIKLPKYSLFELENGRKRMLASAGELQKGNELALPSKYVNFLYLASHYEKLKGSPEDNEQKQLFVEQHKHYLDEIIEQISEFSKRVILADANLDKVLSAYNKHRDKPIREQAENIIHLFTLTNLGAPAAFKYFDTTIDRKRYTSTKEVLDATLIHQSITGLYETRIDLSQLGGDGGEAAAKGSSGGTLNIEDEHRLHETSKEPDVSLGSTWLSDFPQAWAETGGMGLAVRQAPLIIPLKATSTPVSIKQYPMSQEARLGIKPHIQRLLDQGILVPCQSPWNTPLLPVKKPGTNDYRPVQDLREVNKRVEDIHPTVPNPYNLLSGLPPSHQWYTVLDLKDAFFCLRLHPTSQPLFAFEWRDPEMGISGQLTWTRLPQGFKNSPTLFDEALHRDLADFRIQHPDLILLQYVDDLLLAATSELDCQQGTRALLQTLGNLGYRASAKKAQICQKQVKYLGYLLKEGQRWLTEARKETVMGQPTPKTPRQLREFLGTAGFCRLWIPGFAEMAAPLYPLTKTGTLFNWGPDQQKAYQEIKQALLTAPALGLPDLTKPFELFVDEKQGYAKGVLTQKLGPWRRPVAYLSKKLDPVAAGWPPCLRMVAAIAVLTKDAGKLTMGQPLVILAPHAVEALVKQPPDRWLSNARMTHYQALLLDTDRVQFGPVVALNPATLLPLPEEGLQHNCLDILAEAHGTRPDLTDQPLPDADHTWYTDGSSLLQEGQRKAGAAVTTETEVIWAKALPAGTSAQRAELIALTQALKMAEGKKLNVYTDSRYAFATAHIHGEIYRRRGLLTSEGKEIKNKDEILALLKALFLPKRLSIIHCPGHQKGHSAEARGNRMADQAARKAAITETPDTSTLLAGKRTADGSEFEKRTADGSEFESPKKKAKVE

SEQ ID NO: 2708 - protein, 2096 aa, synthetic construct
MPAAKRVKLDGGDKKYSIGLDIGTNSVGWAVITDEYKVPSKKFKVLGNTDRHSIKKNLIGALLFDSGETAEATRLKRTARRRYTRRKNRICYLQEIFSNEMAKVDDSFFHRLEESFLVEEDKKHERHPIFGNIVDEVAYHEKYPTIYHLRKKLVDSTDKADLRLIYLALAHMIKFRGHFLIEGDLNPDNSDVDKLFIQLVQTYNQLFEENPINASGVDAKAILSARLSKSRRLENLIAQLPGEKKNGLFGNLIALSLGLTPNFKSNFDLAEDAKLQLSKDTYDDDLDNLLAQIGDQYADLFLAAKNLSDAILLSDILRVNTEITKAPLSASMIKRYDEHHQDLTLLKALVRQQLPEKYKEIFFDQSKNGYAGYIDGGASQEEFYKFIKPILEKMDGTEELLVKLNREDLLRKQRTFDNGSIPHQIHLGELHAILRRQEDFYPFLKDNREKIEKILTFRIPYYVGPLARGNSRFAWMTRKSEETITPWNFEEVVDKGASAQSFIERMTNFDKNLPNEKVLPKHSLLYEYFTVYNELTKVKYVTEGMRKPAFLSGEQKKAIVDLLFKTNRKVTVKQLKEDYFKKIECFDSVEISGVEDRFNASLGTYHDLLKIIKDKDFLDNEENEDILEDIVLTLTLFEDREMIEERLKTYAHLFDDKVMKQLKRRRYTGWGRLSRKLINGIRDKQSGKTILDFLKSDGFANRNFMQLIHDDSLTFKEDIQKAQVSGQGDSLHEHIANLAGSPAIKKGILQTVKVVDELVKVMGRHKPENIVIEMARENQTTQKGQKNSRERMKRIEEGIKELGSQILKEHPVENTQLQNEKLYLYYLQNGRDMYVDQELDINRLSDYDVDHIVPQSFLKDDSIDNKVLTRSDKARGKSDNVPSEEVVKKMKNYWRQLLNAKLITQRKFDNLTKAERGGLSELDKAGFIKRQLVETRQITKHVAQILDSRMNTKYDENDKLIREVKVITLKSKLVSDFRKDFQFYKVREINNYHHAHDAYLNAVVGTALIKKYPKLESEFVYGDYKVYDVRKMIAKSEQEIGKATAKYFFYSNIMNFFKTEITLANGEIRKRPLIETNGETGEIVWDKGRDFATVRKVLSMPQVNIVKKTEVQTGGFSKESILPKRNSDKLIARKKDWDPKKYGGFDSPTVAYSVLVVAKVEKGKSKKLKSVKELLGITIMERSSFEKNPIDFLEAKGYKEVKKDLIIKLPKYSLFELENGRKRMLASAGELQKGNELALPSKYVNFLYLASHYEKLKGSPEDNEQKQLFVEQHKHYLDEIIEQISEFSKRVILADANLDKVLSAYNKHRDKPIREQAENIIHLFTLTNLGAPAAFKYFDTTIDRKRYTSTKEVLDATLIHQSITGLYETRIDLSQLGGDGGGGGGGSEAAAKGGTLNIEDEHRLHETSKEPDVSLGSTWLSDFPQAWAETGGMGLAVRQAPLIIPLKATSTPVSIKQYPMSQEARLGIKPHIQRLLDQGILVPCQSPWNTPLLPVKKPGTNDYRPVQDLREVNKRVEDIHPTVPNPYNLLSGLPPSHQWYTVLDLKDAFFCLRLHPTSQPLFAFEWRDPEMGISGQLTWTRLPQGFKNSPTLFDEALHRDLADFRIQHPDLILLQYVDDLLLAATSELDCQQGTRALLQTLGNLGYRASAKKAQICQKQVKYLGYLLKEGQRWLTEARKETVMGQPTPKTPRQLREFLGTAGFCRLWIPGFAEMAAPLYPLTKTGTLFNWGPDQQKAYQEIKQALLTAPALGLPDLTKPFELFVDEKQGYAKGVLTQKLGPWRRPVAYLSKKLDPVAAGWPPCLRMVAAIAVLTKDAGKLTMGQPLVILAPHAVEALVKQPPDRWLSNARMTHYQALLLDTDRVQFGPVVALNPATLLPLPEEGLQHNCLDILAEAHGTRPDLTDQPLPDADHTWYTDGSSLLQEGQRKAGAAVTTETEVIWAKALPAGTSAQRAELIALTQALKMAEGKKLNVYTDSRYAFATAHIHGEIYRRRGLLTSEGKEIKNKDEILALLKALFLPKRLSIIHCPGHQKGHSAEARGNRMADQAARKAAITETPDTSTLLAGKRTADGSEFEKRTADGSEFESPKKKAKVE

SEQ ID NO: 2709 - protein, 2096 aa, synthetic construct
MPAAKRVKLDGGDKKYSIGLDIGTNSVGWAVITDEYKVPSKKFKVLGNTDRHSIKKNLIGALLFDSGETAEATRLKRTARRRYTRRKNRICYLQEIFSNEMAKVDDSFFHRLEESFLVEEDKKHERHPIFGNIVDEVAYHEKYPTIYHLRKKLVDSTDKADLRLIYLALAHMIKFRGHFLIEGDLNPDNSDVDKLFIQLVQTYNQLFEENPINASGVDAKAILSARLSKSRRLENLIAQLPGEKKNGLFGNLIALSLGLTPNFKSNFDLAEDAKLQLSKDTYDDDLDNLLAQIGDQYADLFLAAKNLSDAILLSDILRVNTEITKAPLSASMIKRYDEHHQDLTLLKALVRQQLPEKYKEIFFDQSKNGYAGYIDGGASQEEFYKFIKPILEKMDGTEELLVKLNREDLLRKQRTFDNGSIPHQIHLGELHAILRRQEDFYPFLKDNREKIEKILTFRIPYYVGPLARGNSRFAWMTRKSEETITPWNFEEVVDKGASAQSFIERMTNFDKNLPNEKVLPKHSLLYEYFTVYNELTKVKYVTEGMRKPAFLSGEQKKAIVDLLFKTNRKVTVKQLKEDYFKKIECFDSVEISGVEDRFNASLGTYHDLLKIIKDKDFLDNEENEDILEDIVLTLTLFEDREMIEERLKTYAHLFDDKVMKQLKRRRYTGWGRLSRKLINGIRDKQSGKTILDFLKSDGFANRNFMQLIHDDSLTFKEDIQKAQVSGQGDSLHEHIANLAGSPAIKKGILQTVKVVDELVKVMGRHKPENIVIEMARENQTTQKGQKNSRERMKRIEEGIKELGSQILKEHPVENTQLQNEKLYLYYLQNGRDMYVDQELDINRLSDYDVDHIVPQSFLKDDSIDNKVLTRSDKARGKSDNVPSEEVVKKMKNYWRQLLNAKLITQRKFDNLTKAERGGLSELDKAGFIKRQLVETRQITKHVAQILDSRMNTKYDENDKLIREVKVITLKSKLVSDFRKDFQFYKVREINNYHHAHDAYLNAVVGTALIKKYPKLESEFVYGDYKVYDVRKMIAKSEQEIGKATAKYFFYSNIMNFFKTEITLANGEIRKRPLIETNGETGEIVWDKGRDFATVRKVLSMPQVNIVKKTEVQTGGFSKESILPKRNSDKLIARKKDWDPKKYGGFDSPTVAYSVLVVAKVEKGKSKKLKSVKELLGITIMERSSFEKNPIDFLEAKGYKEVKKDLIIKLPKYSLFELENGRKRMLASAGELQKGNELALPSKYVNFLYLASHYEKLKGSPEDNEQKQLFVEQHKHYLDEIIEQISEFSKRVILADANLDKVLSAYNKHRDKPIREQAENIIHLFTLTNLGAPAAFKYFDTTIDRKRYTSTKEVLDATLIHQSITGLYETRIDLSQLGGDGGPAPAPAPAPAPGGTLNIEDEHRLHETSKEPDVSLGSTWLSDFPQAWAETGGMGLAVRQAPLIIPLKATSTPVSIKQYPMSQEARLGIKPHIQRLLDQGILVPCQSPWNTPLLPVKKPGTNDYRPVQDLREVNKRVEDIHPTVPNPYNLLSGLPPSHQWYTVLDLKDAFFCLRLHPTSQPLFAFEWRDPEMGISGQLTWTRLPQGFKNSPTLFDEALHRDLADFRIQHPDLILLQYVDDLLLAATSELDCQQGTRALLQTLGNLGYRASAKKAQICQKQVKYLGYLLKEGQRWLTEARKETVMGQPTPKTPRQLREFLGTAGFCRLWIPGFAEMAAPLYPLTKTGTLFNWGPDQQKAYQEIKQALLTAPALGLPDLTKPFELFVDEKQGYAKGVLTQKLGPWRRPVAYLSKKLDPVAAGWPPCLRMVAAIAVLTKDAGKLTMGQPLVILAPHAVEALVKQPPDRWLSNARMTHYQALLLDTDRVQFGPVVALNPATLLPLPEEGLQHNCLDILAEAHGTRPDLTDQPLPDADHTWYTDGSSLLQEGQRKAGAAVTTETEVIWAKALPAGTSAQRAELIALTQALKMAEGKKLNVYTDSRYAFATAHIHGEIYRRRGLLTSEGKEIKNKDEILALLKALFLPKRLSIIHCPGHQKGHSAEARGNRMADQAARKAAITETPDTSTLLAGKRTADGSEFEKRTADGSEFESPKKKAKVE

SEQ ID NO: 2710 - protein, 2091 aa, synthetic construct
MPAAKRVKLDGGDKKYSIGLDIGTNSVGWAVITDEYKVPSKKFKVLGNTDRHSIKKNLIGALLFDSGETAEATRLKRTARRRYTRRKNRICYLQEIFSNEMAKVDDSFFHRLEESFLVEEDKKHERHPIFGNIVDEVAYHEKYPTIYHLRKKLVDSTDKADLRLIYLALAHMIKFRGHFLIEGDLNPDNSDVDKLFIQLVQTYNQLFEENPINASGVDAKAILSARLSKSRRLENLIAQLPGEKKNGLFGNLIALSLGLTPNFKSNFDLAEDAKLQLSKDTYDDDLDNLLAQIGDQYADLFLAAKNLSDAILLSDILRVNTEITKAPLSASMIKRYDEHHQDLTLLKALVRQQLPEKYKEIFFDQSKNGYAGYIDGGASQEEFYKFIKPILEKMDGTEELLVKLNREDLLRKQRTFDNGSIPHQIHLGELHAILRRQEDFYPFLKDNREKIEKILTFRIPYYVGPLARGNSRFAWMTRKSEETITPWNFEEVVDKGASAQSFIERMTNFDKNLPNEKVLPKHSLLYEYFTVYNELTKVKYVTEGMRKPAFLSGEQKKAIVDLLFKTNRKVTVKQLKEDYFKKIECFDSVEISGVEDRFNASLGTYHDLLKIIKDKDFLDNEENEDILEDIVLTLTLFEDREMIEERLKTYAHLFDDKVMKQLKRRRYTGWGRLSRKLINGIRDKQSGKTILDFLKSDGFANRNFMQLIHDDSLTFKEDIQKAQVSGQGDSLHEHIANLAGSPAIKKGILQTVKVVDELVKVMGRHKPENIVIEMARENQTTQKGQKNSRERMKRIEEGIKELGSQILKEHPVENTQLQNEKLYLYYLQNGRDMYVDQELDINRLSDYDVDHIVPQSFLKDDSIDNKVLTRSDKARGKSDNVPSEEVVKKMKNYWRQLLNAKLITQRKFDNLTKAERGGLSELDKAGFIKRQLVETRQITKHVAQILDSRMNTKYDENDKLIREVKVITLKSKLVSDFRKDFQFYKVREINNYHHAHDAYLNAVVGTALIKKYPKLESEFVYGDYKVYDVRKMIAKSEQEIGKATAKYFFYSNIMNFFKTEITLANGEIRKRPLIETNGETGEIVWDKGRDFATVRKVLSMPQVNIVKKTEVQTGGFSKESILPKRNSDKLIARKKDWDPKKYGGFDSPTVAYSVLVVAKVEKGKSKKLKSVKELLGITIMERSSFEKNPIDFLEAKGYKEVKKDLIIKLPKYSLFELENGRKRMLASAGELQKGNELALPSKYVNFLYLASHYEKLKGSPEDNEQKQLFVEQHKHYLDEIIEQISEFSKRVILADANLDKVLSAYNKHRDKPIREQAENIIHLFTLTNLGAPAAFKYFDTTIDRKRYTSTKEVLDATLIHQSITGLYETRIDLSQLGGDGGGSSPAPGGTLNIEDEHRLHETSKEPDVSLGSTWLSDFPQAWAETGGMGLAVRQAPLIIPLKATSTPVSIKQYPMSQEARLGIKPHIQRLLDQGILVPCQSPWNTPLLPVKKPGTNDYRPVQDLREVNKRVEDIHPTVPNPYNLLSGLPPSHQWYTVLDLKDAFFCLRLHPTSQPLFAFEWRDPEMGISGQLTWTRLPQGFKNSPTLFDEALHRDLADFRIQHPDLILLQYVDDLLLAATSELDCQQGTRALLQTLGNLGYRASAKKAQICQKQVKYLGYLLKEGQRWLTEARKETVMGQPTPKTPRQLREFLGTAGFCRLWIPGFAEMAAPLYPLTKTGTLFNWGPDQQKAYQEIKQALLTAPALGLPDLTKPFELFVDEKQGYAKGVLTQKLGPWRRPVAYLSKKLDPVAAGWPPCLRMVAAIAVLTKDAGKLTMGQPLVILAPHAVEALVKQPPDRWLSNARMTHYQALLLDTDRVQFGPVVALNPATLLPLPEEGLQHNCLDILAEAHGTRPDLTDQPLPDADHTWYTDGSSLLQEGQRKAGAAVTTETEVIWAKALPAGTSAQRAELIALTQALKMAEGKKLNVYTDSRYAFATAHIHGEIYRRRGLLTSEGKEIKNKDEILALLKALFLPKRLSIIHCPGHQKGHSAEARGNRMADQAARKAAITETPDTSTLLAGKRTADGSEFEKRTADGSEFESPKKKAKVE

SEQ ID NO: 2711 - protein, 2131 aa, synthetic construct
MPAAKRVKLDGGDKKYSIGLDIGTNSVGWAVITDEYKVPSKKFKVLGNTDRHSIKKNLIGALLFDSGETAEATRLKRTARRRYTRRKNRICYLQEIFSNEMAKVDDSFFHRLEESFLVEEDKKHERHPIFGNIVDEVAYHEKYPTIYHLRKKLVDSTDKADLRLIYLALAHMIKFRGHFLIEGDLNPDNSDVDKLFIQLVQTYNQLFEENPINASGVDAKAILSARLSKSRRLENLIAQLPGEKKNGLFGNLIALSLGLTPNFKSNFDLAEDAKLQLSKDTYDDDLDNLLAQIGDQYADLFLAAKNLSDAILLSDILRVNTEITKAPLSASMIKRYDEHHQDLTLLKALVRQQLPEKYKEIFFDQSKNGYAGYIDGGASQEEFYKFIKPILEKMDGTEELLVKLNREDLLRKQRTFDNGSIPHQIHLGELHAILRRQEDFYPFLKDNREKIEKILTFRIPYYVGPLARGNSRFAWMTRKSEETITPWNFEEVVDKGASAQSFIERMTNFDKNLPNEKVLPKHSLLYEYFTVYNELTKVKYVTEGMRKPAFLSGEQKKAIVDLLFKTNRKVTVKQLKEDYFKKIECFDSVEISGVEDRFNASLGTYHDLLKIIKDKDFLDNEENEDILEDIVLTLTLFEDREMIEERLKTYAHLFDDKVMKQLKRRRYTGWGRLSRKLINGIRDKQSGKTILDFLKSDGFANRNFMQLIHDDSLTFKEDIQKAQVSGQGDSLHEHIANLAGSPAIKKGILQTVKVVDELVKVMGRHKPENIVIEMARENQTTQKGQKNSRERMKRIEEGIKELGSQILKEHPVENTQLQNEKLYLYYLQNGRDMYVDQELDINRLSDYDVDHIVPQSFLKDDSIDNKVLTRSDKARGKSDNVPSEEVVKKMKNYWRQLLNAKLITQRKFDNLTKAERGGLSELDKAGFIKRQLVETRQITKHVAQILDSRMNTKYDENDKLIREVKVITLKSKLVSDFRKDFQFYKVREINNYHHAHDAYLNAVVGTALIKKYPKLESEFVYGDYKVYDVRKMIAKSEQEIGKATAKYFFYSNIMNFFKTEITLANGEIRKRPLIETNGETGEIVWDKGRDFATVRKVLSMPQVNIVKKTEVQTGGFSKESILPKRNSDKLIARKKDWDPKKYGGFDSPTVAYSVLVVAKVEKGKSKKLKSVKELLGITIMERSSFEKNPIDFLEAKGYKEVKKDLIIKLPKYSLFELENGRKRMLASAGELQKGNELALPSKYVNFLYLASHYEKLKGSPEDNEQKQLFVEQHKHYLDEIIEQISEFSKRVILADANLDKVLSAYNKHRDKPIREQAENIIHLFTLTNLGAPAAFKYFDTTIDRKRYTSTKEVLDATLIHQSITGLYETRIDLSQLGGDGGAEAAAKEAAAKEAAAKEAAAKALEAEAAAKEAAAKEAAAKEAAAKAGGTLNIEDEHRLHETSKEPDVSLGSTWLSDFPQAWAETGGMGLAVRQAPLIIPLKATSTPVSIKQYPMSQEARLGIKPHIQRLLDQGILVPCQSPWNTPLLPVKKPGTNDYRPVQDLREVNKRVEDIHPTVPNPYNLLSGLPPSHQWYTVLDLKDAFFCLRLHPTSQPLFAFEWRDPEMGISGQLTWTRLPQGFKNSPTLFNEALHRDLADFRIQHPDLILLQYVDDLLLAATSELDCQQGTRALLQTLGNLGYRASAKKAQICQKQVKYLGYLLKEGQRWLTEARKETVMGQPTPKTPRQLREFLGTAGFCRLWIPGFAEMAAPLYPLTKPGTLFNWGPDQQKAYQEIKQALLTAPALGLPDLTKPFELFVDEKQGYAKGVLTQKLGPWRRPVAYLSKKLDPVAAGWPPCLRMVAAIAVLTKDAGKLTMGQPLVILAPHAVEALVKQPPDRWLSNARMTHYQALLLDTDRVQFGPVVALNPATLLPLPEEGLQHNCLDILAEAHGTRPDLTDQPLPDADHTWYTDGSSLLQEGQRKAGAAVTTETEVIWAKALPAGTSAQRAELIALTQALKMAEGKKLNVYTDSRYAFATAHIHGEIYRRRGWLTSEGKEIKNKDEILALLKALFLPKRLSIIHCPGHQKGHSAEARGNRMADQAARKAAITETPDTSTLLAGKRTADGSEFEKRTADGSEFESPKKKAKVE

SEQ ID NO: 2712 - protein, 2100 aa, synthetic construct
MPAAKRVKLDGGDKKYSIGLDIGTNSVGWAVITDEYKVPSKKFKVLGNTDRHSIKKNLIGALLFDSGETAEATRLKRTARRRYTRRKNRICYLQEIFSNEMAKVDDSFFHRLEESFLVEEDKKHERHPIFGNIVDEVAYHEKYPTIYHLRKKLVDSTDKADLRLIYLALAHMIKFRGHFLIEGDLNPDNSDVDKLFIQLVQTYNQLFEENPINASGVDAKAILSARLSKSRRLENLIAQLPGEKKNGLFGNLIALSLGLTPNFKSNFDLAEDAKLQLSKDTYDDDLDNLLAQIGDQYADLFLAAKNLSDAILLSDILRVNTEITKAPLSASMIKRYDEHHQDLTLLKALVRQQLPEKYKEIFFDQSKNGYAGYIDGGASQEEFYKFIKPILEKMDGTEELLVKLNREDLLRKQRTFDNGSIPHQIHLGELHAILRRQEDFYPFLKDNREKIEKILTFRIPYYVGPLARGNSRFAWMTRKSEETITPWNFEEVVDKGASAQSFIERMTNFDKNLPNEKVLPKHSLLYEYFTVYNELTKVKYVTEGMRKPAFLSGEQKKAIVDLLFKTNRKVTVKQLKEDYFKKIECFDSVEISGVEDRFNASLGTYHDLLKIIKDKDFLDNEENEDILEDIVLTLTLFEDREMIEERLKTYAHLFDDKVMKQLKRRRYTGWGRLSRKLINGIRDKQSGKTILDFLKSDGFANRNFMQLIHDDSLTFKEDIQKAQVSGQGDSLHEHIANLAGSPAIKKGILQTVKVVDELVKVMGRHKPENIVIEMARENQTTQKGQKNSRERMKRIEEGIKELGSQILKEHPVENTQLQNEKLYLYYLQNGRDMYVDQELDINRLSDYDVDHIVPQSFLKDDSIDNKVLTRSDKARGKSDNVPSEEVVKKMKNYWRQLLNAKLITQRKFDNLTKAERGGLSELDKAGFIKRQLVETRQITKHVAQILDSRMNTKYDENDKLIREVKVITLKSKLVSDFRKDFQFYKVREINNYHHAHDAYLNAVVGTALIKKYPKLESEFVYGDYKVYDVRKMIAKSEQEIGKATAKYFFYSNIMNFFKTEITLANGEIRKRPLIETNGETGEIVWDKGRDFATVRKVLSMPQVNIVKKTEVQTGGFSKESILPKRNSDKLIARKKDWDPKKYGGFDSPTVAYSVLVVAKVEKGKSKKLKSVKELLGITIMERSSFEKNPIDFLEAKGYKEVKKDLIIKLPKYSLFELENGRKRMLASAGELQKGNELALPSKYVNFLYLASHYEKLKGSPEDNEQKQLFVEQHKHYLDEIIEQISEFSKRVILADANLDKVLSAYNKHRDKPIREQAENIIHLFTLTNLGAPAAFKYFDTTIDRKRYTSTKEVLDATLIHQSITGLYETRIDLSQLGGDGGEAAAKGGGGSEAAAKGGTLNIEDEHRLHETSKEPDVSLGSTWLSDFPQAWAETGGMGLAVRQAPLIIPLKATSTPVSIKQYPMSQEARLGIKPHIQRLLDQGILVPCQSPWNTPLLPVKKPGTNDYRPVQDLREVNKRVEDIHPTVPNPYNLLSGLPPSHQWYTVLDLKDAFFCLRLHPTSQPLFAFEWRDPEMGISGQLTWTRLPQGFKNSPTLFNEALHRDLADFRIQHPDLILLQYVDDLLLAATSELDCQQGTRALLQTLGNLGYRASAKKAQICQKQVKYLGYLLKEGQRWLTEARKETVMGQPTPKTPRQLREFLGTAGFCRLWIPGFAEMAAPLYPLTKPGTLFNWGPDQQKAYQEIKQALLTAPALGLPDLTKPFELFVDEKQGYAKGVLTQKLGPWRRPVAYLSKKLDPVAAGWPPCLRMVAAIAVLTKDAGKLTMGQPLVILAPHAVEALVKQPPDRWLSNARMTHYQALLLDTDRVQFGPVVALNPATLLPLPEEGLQHNCLDILAEAHGTRPDLTDQPLPDADHTWYTDGSSLLQEGQRKAGAAVTTETEVIWAKALPAGTSAQRAELIALTQALKMAEGKKLNVYTDSRYAFATAHIHGEIYRRRGWLTSEGKEIKNKDEILALLKALFLPKRLSIIHCPGHQKGHSAEARGNRMADQAARKAAITETPDTSTLLAGKRTADGSEFEKRTADGSEFESPKKKAKVE

SEQ ID NO: 2713 - protein, 2096 aa, synthetic construct
MPAAKRVKLDGGDKKYSIGLDIGTNSVGWAVITDEYKVPSKKFKVLGNTDRHSIKKNLIGALLFDSGETAEATRLKRTARRRYTRRKNRICYLQEIFSNEMAKVDDSFFHRLEESFLVEEDKKHERHPIFGNIVDEVAYHEKYPTIYHLRKKLVDSTDKADLRLIYLALAHMIKFRGHFLIEGDLNPDNSDVDKLFIQLVQTYNQLFEENPINASGVDAKAILSARLSKSRRLENLIAQLPGEKKNGLFGNLIALSLGLTPNFKSNFDLAEDAKLQLSKDTYDDDLDNLLAQIGDQYADLFLAAKNLSDAILLSDILRVNTEITKAPLSASMIKRYDEHHQDLTLLKALVRQQLPEKYKEIFFDQSKNGYAGYIDGGASQEEFYKFIKPILEKMDGTEELLVKLNREDLLRKQRTFDNGSIPHQIHLGELHAILRRQEDFYPFLKDNREKIEKILTFRIPYYVGPLARGNSRFAWMTRKSEETITPWNFEEVVDKGASAQSFIERMTNFDKNLPNEKVLPKHSLLYEYFTVYNELTKVKYVTEGMRKPAFLSGEQKKAIVDLLFKTNRKVTVKQLKEDYFKKIECFDSVEISGVEDRFNASLGTYHDLLKIIKDKDFLDNEENEDILEDIVLTLTLFEDREMIEERLKTYAHLFDDKVMKQLKRRRYTGWGRLSRKLINGIRDKQSGKTILDFLKSDGFANRNFMQLIHDDSLTFKEDIQKAQVSGQGDSLHEHIANLAGSPAIKKGILQTVKVVDELVKVMGRHKPENIVIEMARENQTTQKGQKNSRERMKRIEEGIKELGSQILKEHPVENTQLQNEKLYLYYLQNGRDMYVDQELDINRLSDYDVDHIVPQSFLKDDSIDNKVLTRSDKARGKSDNVPSEEVVKKMKNYWRQLLNAKLITQRKFDNLTKAERGGLSELDKAGFIKRQLVETRQITKHVAQILDSRMNTKYDENDKLIREVKVITLKSKLVSDFRKDFQFYKVREINNYHHAHDAYLNAVVGTALIKKYPKLESEFVYGDYKVYDVRKMIAKSEQEIGKATAKYFFYSNIMNFFKTEITLANGEIRKRPLIETNGETGEIVWDKGRDFATVRKVLSMPQVNIVKKTEVQTGGFSKESILPKRNSDKLIARKKDWDPKKYGGFDSPTVAYSVLVVAKVEKGKSKKLKSVKELLGITIMERSSFEKNPIDFLEAKGYKEVKKDLIIKLPKYSLFELENGRKRMLASAGELQKGNELALPSKYVNFLYLASHYEKLKGSPEDNEQKQLFVEQHKHYLDEIIEQISEFSKRVILADANLDKVLSAYNKHRDKPIREQAENIIHLFTLTNLGAPAAFKYFDTTIDRKRYTSTKEVLDATLIHQSITGLYETRIDLSQLGGDGGGGSEAAAKGGGGGTLNIEDEHRLHETSKEPDVSLGSTWLSDFPQAWAETGGMGLAVRQAPLIIPLKATSTPVSIKQYPMSQEARLGIKPHIQRLLDQGILVPCQSPWNTPLLPVKKPGTNDYRPVQDLREVNKRVEDIHPTVPNPYNLLSGLPPSHQWYTVLDLKDAFFCLRLHPTSQPLFAFEWRDPEMGISGQLTWTRLPQGFKNSPTLFNEALHRDLADFRIQHPDLILLQYVDDLLLAATSELDCQQGTRALLQTLGNLGYRASAKKAQICQKQVKYLGYLLKEGQRWLTEARKETVMGQPTPKTPRQLREFLGTAGFCRLWIPGFAEMAAPLYPLTKPGTLFNWGPDQQKAYQEIKQALLTAPALGLPDLTKPFELFVDEKQGYAKGVLTQKLGPWRRPVAYLSKKLDPVAAGWPPCLRMVAAIAVLTKDAGKLTMGQPLVILAPHAVEALVKQPPDRWLSNARMTHYQALLLDTDRVQFGPVVALNPATLLPLPEEGLQHNCLDILAEAHGTRPDLTDQPLPDADHTWYTDGSSLLQEGQRKAGAAVTTETEVIWAKALPAGTSAQRAELIALTQALKMAEGKKLNVYTDSRYAFATAHIHGEIYRRRGWLTSEGKEIKNKDEILALLKALFLPKRLSIIHCPGHQKGHSAEARGNRMADQAARKAAITETPDTSTLLAGKRTADGSEFEKRTADGSEFESPKKKAKVE

SEQ ID NO: 2714 - protein, 2096 aa, synthetic construct
MPAAKRVKLDGGDKKYSIGLDIGTNSVGWAVITDEYKVPSKKFKVLGNTDRHSIKKNLIGALLFDSGETAEATRLKRTARRRYTRRKNRICYLQEIFSNEMAKVDDSFFHRLEESFLVEEDKKHERHPIFGNIVDEVAYHEKYPTIYHLRKKLVDSTDKADLRLIYLALAHMIKFRGHFLIEGDLNPDNSDVDKLFIQLVQTYNQLFEENPINASGVDAKAILSARLSKSRRLENLIAQLPGEKKNGLFGNLIALSLGLTPNFKSNFDLAEDAKLQLSKDTYDDDLDNLLAQIGDQYADLFLAAKNLSDAILLSDILRVNTEITKAPLSASMIKRYDEHHQDLTLLKALVRQQLPEKYKEIFFDQSKNGYAGYIDGGASQEEFYKFIKPILEKMDGTEELLVKLNREDLLRKQRTFDNGSIPHQIHLGELHAILRRQEDFYPFLKDNREKIEKILTFRIPYYVGPLARGNSRFAWMTRKSEETITPWNFEEVVDKGASAQSFIERMTNFDKNLPNEKVLPKHSLLYEYFTVYNELTKVKYVTEGMRKPAFLSGEQKKAIVDLLFKTNRKVTVKQLKEDYFKKIECFDSVEISGVEDRFNASLGTYHDLLKIIKDKDFLDNEENEDILEDIVLTLTLFEDREMIEERLKTYAHLFDDKVMKQLKRRRYTGWGRLSRKLINGIRDKQSGKTILDFLKSDGFANRNFMQLIHDDSLTFKEDIQKAQVSGQGDSLHEHIANLAGSPAIKKGILQTVKVVDELVKVMGRHKPENIVIEMARENQTTQKGQKNSRERMKRIEEGIKELGSQILKEHPVENTQLQNEKLYLYYLQNGRDMYVDQELDINRLSDYDVDHIVPQSFLKDDSIDNKVLTRSDKARGKSDNVPSEEVVKKMKNYWRQLLNAKLITQRKFDNLTKAERGGLSELDKAGFIKRQLVETRQITKHVAQILDSRMNTKYDENDKLIREVKVITLKSKLVSDFRKDFQFYKVREINNYHHAHDAYLNAVVGTALIKKYPKLESEFVYGDYKVYDVRKMIAKSEQEIGKATAKYFFYSNIMNFFKTEITLANGEIRKRPLIETNGETGEIVWDKGRDFATVRKVLSMPQVNIVKKTEVQTGGFSKESILPKRNSDKLIARKKDWDPKKYGGFDSPTVAYSVLVVAKVEKGKSKKLKSVKELLGITIMERSSFEKNPIDFLEAKGYKEVKKDLIIKLPKYSLFELENGRKRMLASAGELQKGNELALPSKYVNFLYLASHYEKLKGSPEDNEQKQLFVEQHKHYLDEIIEQISEFSKRVILADANLDKVLSAYNKHRDKPIREQAENIIHLFTLTNLGAPAAFKYFDTTIDRKRYTSTKEVLDATLIHQSITGLYETRIDLSQLGGDGGEAAAKPAPGGSGGTLNIEDEHRLHETSKEPDVSLGSTWLSDFPQAWAETGGMGLAVRQAPLIIPLKATSTPVSIKQYPMSQEARLGIKPHIQRLLDQGILVPCQSPWNTPLLPVKKPGTNDYRPVQDLREVNKRVEDIHPTVPNPYNLLSGLPPSHQWYTVLDLKDAFFCLRLHPTSQPLFAFEWRDPEMGISGQLTWTRLPQGFKNSPTLFNEALHRDLADFRIQHPDLILLQYVDDLLLAATSELDCQQGTRALLQTLGNLGYRASAKKAQICQKQVKYLGYLLKEGQRWLTEARKETVMGQPTPKTPRQLREFLGTAGFCRLWIPGFAEMAAPLYPLTKPGTLFNWGPDQQKAYQEIKQALLTAPALGLPDLTKPFELFVDEKQGYAKGVLTQKLGPWRRPVAYLSKKLDPVAAGWPPCLRMVAAIAVLTKDAGKLTMGQPLVILAPHAVEALVKQPPDRWLSNARMTHYQALLLDTDRVQFGPVVALNPATLLPLPEEGLQHNCLDILAEAHGTRPDLTDQPLPDADHTWYTDGSSLLQEGQRKAGAAVTTETEVIWAKALPAGTSAQRAELIALTQALKMAEGKKLNVYTDSRYAFATAHIHGEIYRRRGWLTSEGKEIKNKDEILALLKALFLPKRLSIIHCPGHQKGHSAEARGNRMADQAARKAAITETPDTSTLLAGKRTADGSEFEKRTADGSEFESPKKKAKVE

SEQ ID NO: 2715 - protein, 2094 aa, synthetic construct
MPAAKRVKLDGGDKKYSIGLDIGTNSVGWAVITDEYKVPSKKFKVLGNTDRHSIKKNLIGALLFDSGETAEATRLKRTARRRYTRRKNRICYLQEIFSNEMAKVDDSFFHRLEESFLVEEDKKHERHPIFGNIVDEVAYHEKYPTIYHLRKKLVDSTDKADLRLIYLALAHMIKFRGHFLIEGDLNPDNSDVDKLFIQLVQTYNQLFEENPINASGVDAKAILSARLSKSRRLENLIAQLPGEKKNGLFGNLIALSLGLTPNFKSNFDLAEDAKLQLSKDTYDDDLDNLLAQIGDQYADLFLAAKNLSDAILLSDILRVNTEITKAPLSASMIKRYDEHHQDLTLLKALVRQQLPEKYKEIFFDQSKNGYAGYIDGGASQEEFYKFIKPILEKMDGTEELLVKLNREDLLRKQRTFDNGSIPHQIHLGELHAILRRQEDFYPFLKDNREKIEKILTFRIPYYVGPLARGNSRFAWMTRKSEETITPWNFEEVVDKGASAQSFIERMTNFDKNLPNEKVLPKHSLLYEYFTVYNELTKVKYVTEGMRKPAFLSGEQKKAIVDLLFKTNRKVTVKQLKEDYFKKIECFDSVEISGVEDRFNASLGTYHDLLKIIKDKDFLDNEENEDILEDIVLTLTLFEDREMIEERLKTYAHLFDDKVMKQLKRRRYTGWGRLSRKLINGIRDKQSGKTILDFLKSDGFANRNFMQLIHDDSLTFKEDIQKAQVSGQGDSLHEHIANLAGSPAIKKGILQTVKVVDELVKVMGRHKPENIVIEMARENQTTQKGQKNSRERMKRIEEGIKELGSQILKEHPVENTQLQNEKLYLYYLQNGRDMYVDQELDINRLSDYDVDHIVPQSFLKDDSIDNKVLTRSDKARGKSDNVPSEEVVKKMKNYWRQLLNAKLITQRKFDNLTKAERGGLSELDKAGFIKRQLVETRQITKHVAQILDSRMNTKYDENDKLIREVKVITLKSKLVSDFRKDFQFYKVREINNYHHAHDAYLNAVVGTALIKKYPKLESEFVYGDYKVYDVRKMIAKSEQEIGKATAKYFFYSNIMNFFKTEITLANGEIRKRPLIETNGETGEIVWDKGRDFATVRKVLSMPQVNIVKKTEVQTGGFSKESILPKRNSDKLIARKKDWDPKKYGGFDSPTVAYSVLVVAKVEKGKSKKLKSVKELLGITIMERSSFEKNPIDFLEAKGYKEVKKDLIIKLPKYSLFELENGRKRMLASAGELQKGNELALPSKYVNFLYLASHYEKLKGSPEDNEQKQLFVEQHKHYLDEIIEQISEFSKRVILADANLDKVLSAYNKHRDKPIREQAENIIHLFTLTNLGAPAAFKYFDTTIDRKRYTSTKEVLDATLIHQSITGLYETRIDLSQLGGDGGGSSGGGGGSGGTLNIEDEHRLHETSKEPDVSLGSTWLSDFPQAWAETGGMGLAVRQAPLIIPLKATSTPVSIKQYPMSQEARLGIKPHIQRLLDQGILVPCQSPWNTPLLPVKKPGTNDYRPVQDLREVNKRVEDIHPTVPNPYNLLSGLPPSHQWYTVLDLKDAFFCLRLHPTSQPLFAFEWRDPEMGISGQLTWTRLPQGFKNSPTLFNEALHRDLADFRIQHPDLILLQYVDDLLLAATSELDCQQGTRALLQTLGNLGYRASAKKAQICQKQVKYLGYLLKEGQRWLTEARKETVMGQPTPKTPRQLREFLGTAGFCRLWIPGFAEMAAPLYPLTKPGTLFNWGPDQQKAYQEIKQALLTAPALGLPDLTKPFELFVDEKQGYAKGVLTQKLGPWRRPVAYLSKKLDPVAAGWPPCLRMVAAIAVLTKDAGKLTMGQPLVILAPHAVEALVKQPPDRWLSNARMTHYQALLLDTDRVQFGPVVALNPATLLPLPEEGLQHNCLDILAEAHGTRPDLTDQPLPDADHTWYTDGSSLLQEGQRKAGAAVTTETEVIWAKALPAGTSAQRAELIALTQALKMAEGKKLNVYTDSRYAFATAHIHGEIYRRRGWLTSEGKEIKNKDEILALLKALFLPKRLSIIHCPGHQKGHSAEARGNRMADQAARKAAITETPDTSTLLAGKRTADGSEFEKRTADGSEFESPKKKAKVE

SEQ ID NO: 2716 - protein, 2110 aa, synthetic construct
MPAAKRVKLDGGDKKYSIGLDIGTNSVGWAVITDEYKVPSKKFKVLGNTDRHSIKKNLIGALLFDSGETAEATRLKRTARRRYTRRKNRICYLQEIFSNEMAKVDDSFFHRLEESFLVEEDKKHERHPIFGNIVDEVAYHEKYPTIYHLRKKLVDSTDKADLRLIYLALAHMIKFRGHFLIEGDLNPDNSDVDKLFIQLVQTYNQLFEENPINASGVDAKAILSARLSKSRRLENLIAQLPGEKKNGLFGNLIALSLGLTPNFKSNFDLAEDAKLQLSKDTYDDDLDNLLAQIGDQYADLFLAAKNLSDAILLSDILRVNTEITKAPLSASMIKRYDEHHQDLTLLKALVRQQLPEKYKEIFFDQSKNGYAGYIDGGASQEEFYKFIKPILEKMDGTEELLVKLNREDLLRKQRTFDNGSIPHQIHLGELHAILRRQEDFYPFLKDNREKIEKILTFRIPYYVGPLARGNSRFAWMTRKSEETITPWNFEEVVDKGASAQSFIERMTNFDKNLPNEKVLPKHSLLYEYFTVYNELTKVKYVTEGMRKPAFLSGEQKKAIVDLLFKTNRKVTVKQLKEDYFKKIECFDSVEISGVEDRFNASLGTYHDLLKIIKDKDFLDNEENEDILEDIVLTLTLFEDREMIEERLKTYAHLFDDKVMKQLKRRRYTGWGRLSRKLINGIRDKQSGKTILDFLKSDGFANRNFMQLIHDDSLTFKEDIQKAQVSGQGDSLHEHIANLAGSPAIKKGILQTVKVVDELVKVMGRHKPENIVIEMARENQTTQKGQKNSRERMKRIEEGIKELGSQILKEHPVENTQLQNEKLYLYYLQNGRDMYVDQELDINRLSDYDVDHIVPQSFLKDDSIDNKVLTRSDKARGKSDNVPSEEVVKKMKNYWRQLLNAKLITQRKFDNLTKAERGGLSELDKAGFIKRQLVETRQITKHVAQILDSRMNTKYDENDKLIREVKVITLKSKLVSDFRKDFQFYKVREINNYHHAHDAYLNAVVGTALIKKYPKLESEFVYGDYKVYDVRKMIAKSEQEIGKATAKYFFYSNIMNFFKTEITLANGEIRKRPLIETNGETGEIVWDKGRDFATVRKVLSMPQVNIVKKTEVQTGGFSKESILPKRNSDKLIARKKDWDPKKYGGFDSPTVAYSVLVVAKVEKGKSKKLKSVKELLGITIMERSSFEKNPIDFLEAKGYKEVKKDLIIKLPKYSLFELENGRKRMLASAGELQKGNELALPSKYVNFLYLASHYEKLKGSPEDNEQKQLFVEQHKHYLDEIIEQISEFSKRVILADANLDKVLSAYNKHRDKPIREQAENIIHLFTLTNLGAPAAFKYFDTTIDRKRYTSTKEVLDATLIHQSITGLYETRIDLSQLGGDGGEAAAKEAAAKEAAAKEAAAKEAAAKGGTLNIEDEHRLHETSKEPDVSLGSTWLSDFPQAWAETGGMGLAVRQAPLIIPLKATSTPVSIKQYPMSQEARLGIKPHIQRLLDQGILVPCQSPWNTPLLPVKKPGTNDYRPVQDLREVNKRVEDIHPTVPNPYNLLSGLPPSHQWYTVLDLKDAFFCLRLHPTSQPLFAFEWRDPEMGISGQLTWTRLPQGFKNSPTLFNEALHRDLADFRIQHPDLILLQYVDDLLLAATSELDCQQGTRALLQTLGNLGYRASAKKAQICQKQVKYLGYLLKEGQRWLTEARKETVMGQPTPKTPRQLREFLGTAGFCRLWIPGFAEMAAPLYPLTKPGTLFNWGPDQQKAYQEIKQALLTAPALGLPDLTKPFELFVDEKQGYAKGVLTQKLGPWRRPVAYLSKKLDPVAAGWPPCLRMVAAIAVLTKDAGKLTMGQPLVILAPHAVEALVKQPPDRWLSNARMTHYQALLLDTDRVQFGPVVALNPATLLPLPEEGLQHNCLDILAEAHGTRPDLTDQPLPDADHTWYTDGSSLLQEGQRKAGAAVTTETEVIWAKALPAGTSAQRAELIALTQALKMAEGKKLNVYTDSRYAFATAHIHGEIYRRRGWLTSEGKEIKNKDEILALLKALFLPKRLSIIHCPGHQKGHSAEARGNRMADQAARKAAITETPDTSTLLAGKRTADGSEFEKRTADGSEFESPKKKAKVE

SEQ ID NO: 2717 - protein, 2091 aa, synthetic construct
MPAAKRVKLDGGDKKYSIGLDIGTNSVGWAVITDEYKVPSKKFKVLGNTDRHSIKKNLIGALLFDSGETAEATRLKRTARRRYTRRKNRICYLQEIFSNEMAKVDDSFFHRLEESFLVEEDKKHERHPIFGNIVDEVAYHEKYPTIYHLRKKLVDSTDKADLRLIYLALAHMIKFRGHFLIEGDLNPDNSDVDKLFIQLVQTYNQLFEENPINASGVDAKAILSARLSKSRRLENLIAQLPGEKKNGLFGNLIALSLGLTPNFKSNFDLAEDAKLQLSKDTYDDDLDNLLAQIGDQYADLFLAAKNLSDAILLSDILRVNTEITKAPLSASMIKRYDEHHQDLTLLKALVRQQLPEKYKEIFFDQSKNGYAGYIDGGASQEEFYKFIKPILEKMDGTEELLVKLNREDLLRKQRTFDNGSIPHQIHLGELHAILRRQEDFYPFLKDNREKIEKILTFRIPYYVGPLARGNSRFAWMTRKSEETITPWNFEEVVDKGASAQSFIERMTNFDKNLPNEKVLPKHSLLYEYFTVYNELTKVKYVTEGMRKPAFLSGEQKKAIVDLLFKTNRKVTVKQLKEDYFKKIECFDSVEISGVEDRFNASLGTYHDLLKIIKDKDFLDNEENEDILEDIVLTLTLFEDREMIEERLKTYAHLFDDKVMKQLKRRRYTGWGRLSRKLINGIRDKQSGKTILDFLKSDGFANRNFMQLIHDDSLTFKEDIQKAQVSGQGDSLHEHIANLAGSPAIKKGILQTVKVVDELVKVMGRHKPENIVIEMARENQTTQKGQKNSRERMKRIEEGIKELGSQILKEHPVENTQLQNEKLYLYYLQNGRDMYVDQELDINRLSDYDVDHIVPQSFLKDDSIDNKVLTRSDKARGKSDNVPSEEVVKKMKNYWRQLLNAKLITQRKFDNLTKAERGGLSELDKAGFIKRQLVETRQITKHVAQILDSRMNTKYDENDKLIREVKVITLKSKLVSDFRKDFQFYKVREINNYHHAHDAYLNAVVGTALIKKYPKLESEFVYGDYKVYDVRKMIAKSEQEIGKATAKYFFYSNIMNFFKTEITLANGEIRKRPLIETNGETGEIVWDKGRDFATVRKVLSMPQVNIVKKTEVQTGGFSKESILPKRNSDKLIARKKDWDPKKYGGFDSPTVAYSVLVVAKVEKGKSKKLKSVKELLGITIMERSSFEKNPIDFLEAKGYKEVKKDLIIKLPKYSLFELENGRKRMLASAGELQKGNELALPSKYVNFLYLASHYEKLKGSPEDNEQKQLFVEQHKHYLDEIIEQISEFSKRVILADANLDKVLSAYNKHRDKPIREQAENIIHLFTLTNLGAPAAFKYFDTTIDRKRYTSTKEVLDATLIHQSITGLYETRIDLSQLGGDGGGGGGGSGGTLNIEDEHRLHETSKEPDVSLGSTWLSDFPQAWAETGGMGLAVRQAPLIIPLKATSTPVSIKQYPMSQEARLGIKPHIQRLLDQGILVPCQSPWNTPLLPVKKPGTNDYRPVQDLREVNKRVEDIHPTVPNPYNLLSGLPPSHQWYTVLDLKDAFFCLRLHPTSQPLFAFEWRDPEMGISGQLTWTRLPQGFKNSPTLFNEALHRDLADFRIQHPDLILLQYVDDLLLAATSELDCQQGTRALLQTLGNLGYRASAKKAQICQKQVKYLGYLLKEGQRWLTEARKETVMGQPTPKTPRQLREFLGTAGFCRLWIPGFAEMAAPLYPLTKPGTLFNWGPDQQKAYQEIKQALLTAPALGLPDLTKPFELFVDEKQGYAKGVLTQKLGPWRRPVAYLSKKLDPVAAGWPPCLRMVAAIAVLTKDAGKLTMGQPLVILAPHAVEALVKQPPDRWLSNARMTHYQALLLDTDRVQFGPVVALNPATLLPLPEEGLQHNCLDILAEAHGTRPDLTDQPLPDADHTWYTDGSSLLQEGQRKAGAAVTTETEVIWAKALPAGTSAQRAELIALTQALKMAEGKKLNVYTDSRYAFATAHIHGEIYRRRGWLTSEGKEIKNKDEILALLKALFLPKRLSIIHCPGHQKGHSAEARGNRMADQAARKAAITETPDTSTLLAGKRTADGSEFEKRTADGSEFESPKKKAKVE

SEQ ID NO: 2718 - protein, 2093 aa, synthetic construct
MPAAKRVKLDGGDKKYSIGLDIGTNSVGWAVITDEYKVPSKKFKVLGNTDRHSIKKNLIGALLFDSGETAEATRLKRTARRRYTRRKNRICYLQEIFSNEMAKVDDSFFHRLEESFLVEEDKKHERHPIFGNIVDEVAYHEKYPTIYHLRKKLVDSTDKADLRLIYLALAHMIKFRGHFLIEGDLNPDNSDVDKLFIQLVQTYNQLFEENPINASGVDAKAILSARLSKSRRLENLIAQLPGEKKNGLFGNLIALSLGLTPNFKSNFDLAEDAKLQLSKDTYDDDLDNLLAQIGDQYADLFLAAKNLSDAILLSDILRVNTEITKAPLSASMIKRYDEHHQDLTLLKALVRQQLPEKYKEIFFDQSKNGYAGYIDGGASQEEFYKFIKPILEKMDGTEELLVKLNREDLLRKQRTFDNGSIPHQIHLGELHAILRRQEDFYPFLKDNREKIEKILTFRIPYYVGPLARGNSRFAWMTRKSEETITPWNFEEVVDKGASAQSFIERMTNFDKNLPNEKVLPKHSLLYEYFTVYNELTKVKYVTEGMRKPAFLSGEQKKAIVDLLFKTNRKVTVKQLKEDYFKKIECFDSVEISGVEDRFNASLGTYHDLLKIIKDKDFLDNEENEDILEDIVLTLTLFEDREMIEERLKTYAHLFDDKVMKQLKRRRYTGWGRLSRKLINGIRDKQSGKTILDFLKSDGFANRNFMQLIHDDSLTFKEDIQKAQVSGQGDSLHEHIANLAGSPAIKKGILQTVKVVDELVKVMGRHKPENIVIEMARENQTTQKGQKNSRERMKRIEEGIKELGSQILKEHPVENTQLQNEKLYLYYLQNGRDMYVDQELDINRLSDYDVDHIVPQSFLKDDSIDNKVLTRSDKARGKSDNVPSEEVVKKMKNYWRQLLNAKLITQRKFDNLTKAERGGLSELDKAGFIKRQLVETRQITKHVAQILDSRMNTKYDENDKLIREVKVITLKSKLVSDFRKDFQFYKVREINNYHHAHDAYLNAVVGTALIKKYPKLESEFVYGDYKVYDVRKMIAKSEQEIGKATAKYFFYSNIMNFFKTEITLANGEIRKRPLIETNGETGEIVWDKGRDFATVRKVLSMPQVNIVKKTEVQTGGFSKESILPKRNSDKLIARKKDWDPKKYGGFDSPTVAYSVLVVAKVEKGKSKKLKSVKELLGITIMERSSFEKNPIDFLEAKGYKEVKKDLIIKLPKYSLFELENGRKRMLASAGELQKGNELALPSKYVNFLYLASHYEKLKGSPEDNEQKQLFVEQHKHYLDEIIEQISEFSKRVILADANLDKVLSAYNKHRDKPIREQAENIIHLFTLTNLGAPAAFKYFDTTIDRKRYTSTKEVLDATLIHQSITGLYETRIDLSQLGGDGGGSSEAAAKGGTLNIEDEHRLHETSKEPDVSLGSTWLSDFPQAWAETGGMGLAVRQAPLIIPLKATSTPVSIKQYPMSQEARLGIKPHIQRLLDQGILVPCQSPWNTPLLPVKKPGTNDYRPVQDLREVNKRVEDIHPTVPNPYNLLSGLPPSHQWYTVLDLKDAFFCLRLHPTSQPLFAFEWRDPEMGISGQLTWTRLPQGFKNSPTLFNEALHRDLADFRIQHPDLILLQYVDDLLLAATSELDCQQGTRALLQTLGNLGYRASAKKAQICQKQVKYLGYLLKEGQRWLTEARKETVMGQPTPKTPRQLREFLGTAGFCRLWIPGFAEMAAPLYPLTKPGTLFNWGPDQQKAYQEIKQALLTAPALGLPDLTKPFELFVDEKQGYAKGVLTQKLGPWRRPVAYLSKKLDPVAAGWPPCLRMVAAIAVLTKDAGKLTMGQPLVILAPHAVEALVKQPPDRWLSNARMTHYQALLLDTDRVQFGPVVALNPATLLPLPEEGLQHNCLDILAEAHGTRPDLTDQPLPDADHTWYTDGSSLLQEGQRKAGAAVTTETEVIWAKALPAGTSAQRAELIALTQALKMAEGKKLNVYTDSRYAFATAHIHGEIYRRRGWLTSEGKEIKNKDEILALLKALFLPKRLSIIHCPGHQKGHSAEARGNRMADQAARKAAITETPDTSTLLAGKRTADGSEFEKRTADGSEFESPKKKAKVE

SEQ ID NO: 2719 - protein, 2096 aa, synthetic construct
MPAAKRVKLDGGDKKYSIGLDIGTNSVGWAVITDEYKVPSKKFKVLGNTDRHSIKKNLIGALLFDSGETAEATRLKRTARRRYTRRKNRICYLQEIFSNEMAKVDDSFFHRLEESFLVEEDKKHERHPIFGNIVDEVAYHEKYPTIYHLRKKLVDSTDKADLRLIYLALAHMIKFRGHFLIEGDLNPDNSDVDKLFIQLVQTYNQLFEENPINASGVDAKAILSARLSKSRRLENLIAQLPGEKKNGLFGNLIALSLGLTPNFKSNFDLAEDAKLQLSKDTYDDDLDNLLAQIGDQYADLFLAAKNLSDAILLSDILRVNTEITKAPLSASMIKRYDEHHQDLTLLKALVRQQLPEKYKEIFFDQSKNGYAGYIDGGASQEEFYKFIKPILEKMDGTEELLVKLNREDLLRKQRTFDNGSIPHQIHLGELHAILRRQEDFYPFLKDNREKIEKILTFRIPYYVGPLARGNSRFAWMTRKSEETITPWNFEEVVDKGASAQSFIERMTNFDKNLPNEKVLPKHSLLYEYFTVYNELTKVKYVTEGMRKPAFLSGEQKKAIVDLLFKTNRKVTVKQLKEDYFKKIECFDSVEISGVEDRFNASLGTYHDLLKIIKDKDFLDNEENEDILEDIVLTLTLFEDREMIEERLKTYAHLFDDKVMKQLKRRRYTGWGRLSRKLINGIRDKQSGKTILDFLKSDGFANRNFMQLIHDDSLTFKEDIQKAQVSGQGDSLHEHIANLAGSPAIKKGILQTVKVVDELVKVMGRHKPENIVIEMARENQTTQKGQKNSRERMKRIEEGIKELGSQILKEHPVENTQLQNEKLYLYYLQNGRDMYVDQELDINRLSDYDVDHIVPQSFLKDDSIDNKVLTRSDKARGKSDNVPSEEVVKKMKNYWRQLLNAKLITQRKFDNLTKAERGGLSELDKAGFIKRQLVETRQITKHVAQILDSRMNTKYDENDKLIREVKVITLKSKLVSDFRKDFQFYKVREINNYHHAHDAYLNAVVGTALIKKYPKLESEFVYGDYKVYDVRKMIAKSEQEIGKATAKYFFYSNIMNFFKTEITLANGEIRKRPLIETNGETGEIVWDKGRDFATVRKVLSMPQVNIVKKTEVQTGGFSKESILPKRNSDKLIARKKDWDPKKYGGFDSPTVAYSVLVVAKVEKGKSKKLKSVKELLGITIMERSSFEKNPIDFLEAKGYKEVKKDLIIKLPKYSLFELENGRKRMLASAGELQKGNELALPSKYVNFLYLASHYEKLKGSPEDNEQKQLFVEQHKHYLDEIIEQISEFSKRVILADANLDKVLSAYNKHRDKPIREQAENIIHLFTLTNLGAPAAFKYFDTTIDRKRYTSTKEVLDATLIHQSITGLYETRIDLSQLGGDGGGGGEAAAKPAPGGTLNIEDEHRLHETSKEPDVSLGSTWLSDFPQAWAETGGMGLAVRQAPLIIPLKATSTPVSIKQYPMSQEARLGIKPHIQRLLDQGILVPCQSPWNTPLLPVKKPGTNDYRPVQDLREVNKRVEDIHPTVPNPYNLLSGLPPSHQWYTVLDLKDAFFCLRLHPTSQPLFAFEWRDPEMGISGQLTWTRLPQGFKNSPTLFNEALHRDLADFRIQHPDLILLQYVDDLLLAATSELDCQQGTRALLQTLGNLGYRASAKKAQICQKQVKYLGYLLKEGQRWLTEARKETVMGQPTPKTPRQLREFLGTAGFCRLWIPGFAEMAAPLYPLTKPGTLFNWGPDQQKAYQEIKQALLTAPALGLPDLTKPFELFVDEKQGYAKGVLTQKLGPWRRPVAYLSKKLDPVAAGWPPCLRMVAAIAVLTKDAGKLTMGQPLVILAPHAVEALVKQPPDRWLSNARMTHYQALLLDTDRVQFGPVVALNPATLLPLPEEGLQHNCLDILAEAHGTRPDLTDQPLPDADHTWYTDGSSLLQEGQRKAGAAVTTETEVIWAKALPAGTSAQRAELIALTQALKMAEGKKLNVYTDSRYAFATAHIHGEIYRRRGWLTSEGKEIKNKDEILALLKALFLPKRLSIIHCPGHQKGHSAEARGNRMADQAARKAAITETPDTSTLLAGKRTADGSEFEKRTADGSEFESPKKKAKVE

SEQ ID NO: 2720 - protein, 2105 aa, synthetic construct
MPAAKRVKLDGGDKKYSIGLDIGTNSVGWAVITDEYKVPSKKFKVLGNTDRHSIKKNLIGALLFDSGETAEATRLKRTARRRYTRRKNRICYLQEIFSNEMAKVDDSFFHRLEESFLVEEDKKHERHPIFGNIVDEVAYHEKYPTIYHLRKKLVDSTDKADLRLIYLALAHMIKFRGHFLIEGDLNPDNSDVDKLFIQLVQTYNQLFEENPINASGVDAKAILSARLSKSRRLENLIAQLPGEKKNGLFGNLIALSLGLTPNFKSNFDLAEDAKLQLSKDTYDDDLDNLLAQIGDQYADLFLAAKNLSDAILLSDILRVNTEITKAPLSASMIKRYDEHHQDLTLLKALVRQQLPEKYKEIFFDQSKNGYAGYIDGGASQEEFYKFIKPILEKMDGTEELLVKLNREDLLRKQRTFDNGSIPHQIHLGELHAILRRQEDFYPFLKDNREKIEKILTFRIPYYVGPLARGNSRFAWMTRKSEETITPWNFEEVVDKGASAQSFIERMTNFDKNLPNEKVLPKHSLLYEYFTVYNELTKVKYVTEGMRKPAFLSGEQKKAIVDLLFKTNRKVTVKQLKEDYFKKIECFDSVEISGVEDRFNASLGTYHDLLKIIKDKDFLDNEENEDILEDIVLTLTLFEDREMIEERLKTYAHLFDDKVMKQLKRRRYTGWGRLSRKLINGIRDKQSGKTILDFLKSDGFANRNFMQLIHDDSLTFKEDIQKAQVSGQGDSLHEHIANLAGSPAIKKGILQTVKVVDELVKVMGRHKPENIVIEMARENQTTQKGQKNSRERMKRIEEGIKELGSQILKEHPVENTQLQNEKLYLYYLQNGRDMYVDQELDINRLSDYDVDHIVPQSFLKDDSIDNKVLTRSDKARGKSDNVPSEEVVKKMKNYWRQLLNAKLITQRKFDNLTKAERGGLSELDKAGFIKRQLVETRQITKHVAQILDSRMNTKYDENDKLIREVKVITLKSKLVSDFRKDFQFYKVREINNYHHAHDAYLNAVVGTALIKKYPKLESEFVYGDYKVYDVRKMIAKSEQEIGKATAKYFFYSNIMNFFKTEITLANGEIRKRPLIETNGETGEIVWDKGRDFATVRKVLSMPQVNIVKKTEVQTGGFSKESILPKRNSDKLIARKKDWDPKKYGGFDSPTVAYSVLVVAKVEKGKSKKLKSVKELLGITIMERSSFEKNPIDFLEAKGYKEVKKDLIIKLPKYSLFELENGRKRMLASAGELQKGNELALPSKYVNFLYLASHYEKLKGSPEDNEQKQLFVEQHKHYLDEIIEQISEFSKRVILADANLDKVLSAYNKHRDKPIREQAENIIHLFTLTNLGAPAAFKYFDTTIDRKRYTSTKEVLDATLIHQSITGLYETRIDLSQLGGDGGEAAAKEAAAKEAAAKEAAAKGGTLNIEDEHRLHETSKEPDVSLGSTWLSDFPQAWAETGGMGLAVRQAPLIIPLKATSTPVSIKQYPMSQEARLGIKPHIQRLLDQGILVPCQSPWNTPLLPVKKPGTNDYRPVQDLREVNKRVEDIHPTVPNPYNLLSGLPPSHQWYTVLDLKDAFFCLRLHPTSQPLFAFEWRDPEMGISGQLTWTRLPQGFKNSPTLFNEALHRDLADFRIQHPDLILLQYVDDLLLAATSELDCQQGTRALLQTLGNLGYRASAKKAQICQKQVKYLGYLLKEGQRWLTEARKETVMGQPTPKTPRQLREFLGTAGFCRLWIPGFAEMAAPLYPLTKPGTLFNWGPDQQKAYQEIKQALLTAPALGLPDLTKPFELFVDEKQGYAKGVLTQKLGPWRRPVAYLSKKLDPVAAGWPPCLRMVAAIAVLTKDAGKLTMGQPLVILAPHAVEALVKQPPDRWLSNARMTHYQALLLDTDRVQFGPVVALNPATLLPLPEEGLQHNCLDILAEAHGTRPDLTDQPLPDADHTWYTDGSSLLQEGQRKAGAAVTTETEVIWAKALPAGTSAQRAELIALTQALKMAEGKKLNVYTDSRYAFATAHIHGEIYRRRGWLTSEGKEIKNKDEILALLKALFLPKRLSIIHCPGHQKGHSAEARGNRMADQAARKAAITETPDTSTLLAGKRTADGSEFEKRTADGSEFESPKKKAKVE

SEQ ID NO: 2721 - protein, 2096 aa, synthetic construct
MPAAKRVKLDGGDKKYSIGLDIGTNSVGWAVITDEYKVPSKKFKVLGNTDRHSIKKNLIGALLFDSGETAEATRLKRTARRRYTRRKNRICYLQEIFSNEMAKVDDSFFHRLEESFLVEEDKKHERHPIFGNIVDEVAYHEKYPTIYHLRKKLVDSTDKADLRLIYLALAHMIKFRGHFLIEGDLNPDNSDVDKLFIQLVQTYNQLFEENPINASGVDAKAILSARLSKSRRLENLIAQLPGEKKNGLFGNLIALSLGLTPNFKSNFDLAEDAKLQLSKDTYDDDLDNLLAQIGDQYADLFLAAKNLSDAILLSDILRVNTEITKAPLSASMIKRYDEHHQDLTLLKALVRQQLPEKYKEIFFDQSKNGYAGYIDGGASQEEFYKFIKPILEKMDGTEELLVKLNREDLLRKQRTFDNGSIPHQIHLGELHAILRRQEDFYPFLKDNREKIEKILTFRIPYYVGPLARGNSRFAWMTRKSEETITPWNFEEVVDKGASAQSFIERMTNFDKNLPNEKVLPKHSLLYEYFTVYNELTKVKYVTEGMRKPAFLSGEQKKAIVDLLFKTNRKVTVKQLKEDYFKKIECFDSVEISGVEDRFNASLGTYHDLLKIIKDKDFLDNEENEDILEDIVLTLTLFEDREMIEERLKTYAHLFDDKVMKQLKRRRYTGWGRLSRKLINGIRDKQSGKTILDFLKSDGFANRNFMQLIHDDSLTFKEDIQKAQVSGQGDSLHEHIANLAGSPAIKKGILQTVKVVDELVKVMGRHKPENIVIEMARENQTTQKGQKNSRERMKRIEEGIKELGSQILKEHPVENTQLQNEKLYLYYLQNGRDMYVDQELDINRLSDYDVDHIVPQSFLKDDSIDNKVLTRSDKARGKSDNVPSEEVVKKMKNYWRQLLNAKLITQRKFDNLTKAERGGLSELDKAGFIKRQLVETRQITKHVAQILDSRMNTKYDENDKLIREVKVITLKSKLVSDFRKDFQFYKVREINNYHHAHDAYLNAVVGTALIKKYPKLESEFVYGDYKVYDVRKMIAKSEQEIGKATAKYFFYSNIMNFFKTEITLANGEIRKRPLIETNGETGEIVWDKGRDFATVRKVLSMPQVNIVKKTEVQTGGFSKESILPKRNSDKLIARKKDWDPKKYGGFDSPTVAYSVLVVAKVEKGKSKKLKSVKELLGITIMERSSFEKNPIDFLEAKGYKEVKKDLIIKLPKYSLFELENGRKRMLASAGELQKGNELALPSKYVNFLYLASHYEKLKGSPEDNEQKQLFVEQHKHYLDEIIEQISEFSKRVILADANLDKVLSAYNKHRDKPIREQAENIIHLFTLTNLGAPAAFKYFDTTIDRKRYTSTKEVLDATLIHQSITGLYETRIDLSQLGGDGGGGGEAAAKGGSGGTLNIEDEHRLHETSKEPDVSLGSTWLSDFPQAWAETGGMGLAVRQAPLIIPLKATSTPVSIKQYPMSQEARLGIKPHIQRLLDQGILVPCQSPWNTPLLPVKKPGTNDYRPVQDLREVNKRVEDIHPTVPNPYNLLSGLPPSHQWYTVLDLKDAFFCLRLHPTSQPLFAFEWRDPEMGISGQLTWTRLPQGFKNSPTLFNEALHRDLADFRIQHPDLILLQYVDDLLLAATSELDCQQGTRALLQTLGNLGYRASAKKAQICQKQVKYLGYLLKEGQRWLTEARKETVMGQPTPKTPRQLREFLGTAGFCRLWIPGFAEMAAPLYPLTKPGTLFNWGPDQQKAYQEIKQALLTAPALGLPDLTKPFELFVDEKQGYAKGVLTQKLGPWRRPVAYLSKKLDPVAAGWPPCLRMVAAIAVLTKDAGKLTMGQPLVILAPHAVEALVKQPPDRWLSNARMTHYQALLLDTDRVQFGPVVALNPATLLPLPEEGLQHNCLDILAEAHGTRPDLTDQPLPDADHTWYTDGSSLLQEGQRKAGAAVTTETEVIWAKALPAGTSAQRAELIALTQALKMAEGKKLNVYTDSRYAFATAHIHGEIYRRRGWLTSEGKEIKNKDEILALLKALFLPKRLSIIHCPGHQKGHSAEARGNRMADQAARKAAITETPDTSTLLAGKRTADGSEFEKRTADGSEFESPKKKAKVE

SEQ ID NO: 2722 - protein, 2096 aa, synthetic construct
MPAAKRVKLDGGDKKYSIGLDIGTNSVGWAVITDEYKVPSKKFKVLGNTDRHSIKKNLIGALLFDSGETAEATRLKRTARRRYTRRKNRICYLQEIFSNEMAKVDDSFFHRLEESFLVEEDKKHERHPIFGNIVDEVAYHEKYPTIYHLRKKLVDSTDKADLRLIYLALAHMIKFRGHFLIEGDLNPDNSDVDKLFIQLVQTYNQLFEENPINASGVDAKAILSARLSKSRRLENLIAQLPGEKKNGLFGNLIALSLGLTPNFKSNFDLAEDAKLQLSKDTYDDDLDNLLAQIGDQYADLFLAAKNLSDAILLSDILRVNTEITKAPLSASMIKRYDEHHQDLTLLKALVRQQLPEKYKEIFFDQSKNGYAGYIDGGASQEEFYKFIKPILEKMDGTEELLVKLNREDLLRKQRTFDNGSIPHQIHLGELHAILRRQEDFYPFLKDNREKIEKILTFRIPYYVGPLARGNSRFAWMTRKSEETITPWNFEEVVDKGASAQSFIERMTNFDKNLPNEKVLPKHSLLYEYFTVYNELTKVKYVTEGMRKPAFLSGEQKKAIVDLLFKTNRKVTVKQLKEDYFKKIECFDSVEISGVEDRFNASLGTYHDLLKIIKDKDFLDNEENEDILEDIVLTLTLFEDREMIEERLKTYAHLFDDKVMKQLKRRRYTGWGRLSRKLINGIRDKQSGKTILDFLKSDGFANRNFMQLIHDDSLTFKEDIQKAQVSGQGDSLHEHIANLAGSPAIKKGILQTVKVVDELVKVMGRHKPENIVIEMARENQTTQKGQKNSRERMKRIEEGIKELGSQILKEHPVENTQLQNEKLYLYYLQNGRDMYVDQELDINRLSDYDVDHIVPQSFLKDDSIDNKVLTRSDKARGKSDNVPSEEVVKKMKNYWRQLLNAKLITQRKFDNLTKAERGGLSELDKAGFIKRQLVETRQITKHVAQILDSRMNTKYDENDKLIREVKVITLKSKLVSDFRKDFQFYKVREINNYHHAHDAYLNAVVGTALIKKYPKLESEFVYGDYKVYDVRKMIAKSEQEIGKATAKYFFYSNIMNFFKTEITLANGEIRKRPLIETNGETGEIVWDKGRDFATVRKVLSMPQVNIVKKTEVQTGGFSKESILPKRNSDKLIARKKDWDPKKYGGFDSPTVAYSVLVVAKVEKGKSKKLKSVKELLGITIMERSSFEKNPIDFLEAKGYKEVKKDLIIKLPKYSLFELENGRKRMLASAGELQKGNELALPSKYVNFLYLASHYEKLKGSPEDNEQKQLFVEQHKHYLDEIIEQISEFSKRVILADANLDKVLSAYNKHRDKPIREQAENIIHLFTLTNLGAPAAFKYFDTTIDRKRYTSTKEVLDATLIHQSITGLYETRIDLSQLGGDGGGGGGGSEAAAKGGTLNIEDEHRLHETSKEPDVSLGSTWLSDFPQAWAETGGMGLAVRQAPLIIPLKATSTPVSIKQYPMSQEARLGIKPHIQRLLDQGILVPCQSPWNTPLLPVKKPGTNDYRPVQDLREVNKRVEDIHPTVPNPYNLLSGLPPSHQWYTVLDLKDAFFCLRLHPTSQPLFAFEWRDPEMGISGQLTWTRLPQGFKNSPTLFNEALHRDLADFRIQHPDLILLQYVDDLLLAATSELDCQQGTRALLQTLGNLGYRASAKKAQICQKQVKYLGYLLKEGQRWLTEARKETVMGQPTPKTPRQLREFLGTAGFCRLWIPGFAEMAAPLYPLTKPGTLFNWGPDQQKAYQEIKQALLTAPALGLPDLTKPFELFVDEKQGYAKGVLTQKLGPWRRPVAYLSKKLDPVAAGWPPCLRMVAAIAVLTKDAGKLTMGQPLVILAPHAVEALVKQPPDRWLSNARMTHYQALLLDTDRVQFGPVVALNPATLLPLPEEGLQHNCLDILAEAHGTRPDLTDQPLPDADHTWYTDGSSLLQEGQRKAGAAVTTETEVIWAKALPAGTSAQRAELIALTQALKMAEGKKLNVYTDSRYAFATAHIHGEIYRRRGWLTSEGKEIKNKDEILALLKALFLPKRLSIIHCPGHQKGHSAEARGNRMADQAARKAAITETPDTSTLLAGKRTADGSEFEKRTADGSEFESPKKKAKVE

SEQ ID NO: 2723 - protein, 2096 aa, synthetic construct
MPAAKRVKLDGGDKKYSIGLDIGTNSVGWAVITDEYKVPSKKFKVLGNTDRHSIKKNLIGALLFDSGETAEATRLKRTARRRYTRRKNRICYLQEIFSNEMAKVDDSFFHRLEESFLVEEDKKHERHPIFGNIVDEVAYHEKYPTIYHLRKKLVDSTDKADLRLIYLALAHMIKFRGHFLIEGDLNPDNSDVDKLFIQLVQTYNQLFEENPINASGVDAKAILSARLSKSRRLENLIAQLPGEKKNGLFGNLIALSLGLTPNFKSNFDLAEDAKLQLSKDTYDDDLDNLLAQIGDQYADLFLAAKNLSDAILLSDILRVNTEITKAPLSASMIKRYDEHHQDLTLLKALVRQQLPEKYKEIFFDQSKNGYAGYIDGGASQEEFYKFIKPILEKMDGTEELLVKLNREDLLRKQRTFDNGSIPHQIHLGELHAILRRQEDFYPFLKDNREKIEKILTFRIPYYVGPLARGNSRFAWMTRKSEETITPWNFEEVVDKGASAQSFIERMTNFDKNLPNEKVLPKHSLLYEYFTVYNELTKVKYVTEGMRKPAFLSGEQKKAIVDLLFKTNRKVTVKQLKEDYFKKIECFDSVEISGVEDRFNASLGTYHDLLKIIKDKDFLDNEENEDILEDIVLTLTLFEDREMIEERLKTYAHLFDDKVMKQLKRRRYTGWGRLSRKLINGIRDKQSGKTILDFLKSDGFANRNFMQLIHDDSLTFKEDIQKAQVSGQGDSLHEHIANLAGSPAIKKGILQTVKVVDELVKVMGRHKPENIVIEMARENQTTQKGQKNSRERMKRIEEGIKELGSQILKEHPVENTQLQNEKLYLYYLQNGRDMYVDQELDINRLSDYDVDHIVPQSFLKDDSIDNKVLTRSDKARGKSDNVPSEEVVKKMKNYWRQLLNAKLITQRKFDNLTKAERGGLSELDKAGFIKRQLVETRQITKHVAQILDSRMNTKYDENDKLIREVKVITLKSKLVSDFRKDFQFYKVREINNYHHAHDAYLNAVVGTALIKKYPKLESEFVYGDYKVYDVRKMIAKSEQEIGKATAKYFFYSNIMNFFKTEITLANGEIRKRPLIETNGETGEIVWDKGRDFATVRKVLSMPQVNIVKKTEVQTGGFSKESILPKRNSDKLIARKKDWDPKKYGGFDSPTVAYSVLVVAKVEKGKSKKLKSVKELLGITIMERSSFEKNPIDFLEAKGYKEVKKDLIIKLPKYSLFELENGRKRMLASAGELQKGNELALPSKYVNFLYLASHYEKLKGSPEDNEQKQLFVEQHKHYLDEIIEQISEFSKRVILADANLDKVLSAYNKHRDKPIREQAENIIHLFTLTNLGAPAAFKYFDTTIDRKRYTSTKEVLDATLIHQSITGLYETRIDLSQLGGDGGEAAAKGSSPAPGGTLNIEDEHRLHETSKEPDVSLGSTWLSDFPQAWAETGGMGLAVRQAPLIIPLKATSTPVSIKQYPMSQEARLGIKPHIQRLLDQGILVPCQSPWNTPLLPVKKPGTNDYRPVQDLREVNKRVEDIHPTVPNPYNLLSGLPPSHQWYTVLDLKDAFFCLRLHPTSQPLFAFEWRDPEMGISGQLTWTRLPQGFKNSPTLFNEALHRDLADFRIQHPDLILLQYVDDLLLAATSELDCQQGTRALLQTLGNLGYRASAKKAQICQKQVKYLGYLLKEGQRWLTEARKETVMGQPTPKTPRQLREFLGTAGFCRLWIPGFAEMAAPLYPLTKPGTLFNWGPDQQKAYQEIKQALLTAPALGLPDLTKPFELFVDEKQGYAKGVLTQKLGPWRRPVAYLSKKLDPVAAGWPPCLRMVAAIAVLTKDAGKLTMGQPLVILAPHAVEALVKQPPDRWLSNARMTHYQALLLDTDRVQFGPVVALNPATLLPLPEEGLQHNCLDILAEAHGTRPDLTDQPLPDADHTWYTDGSSLLQEGQRKAGAAVTTETEVIWAKALPAGTSAQRAELIALTQALKMAEGKKLNVYTDSRYAFATAHIHGEIYRRRGWLTSEGKEIKNKDEILALLKALFLPKRLSIIHCPGHQKGHSAEARGNRMADQAARKAAITETPDTSTLLAGKRTADGSEFEKRTADGSEFESPKKKAKVE

SEQ ID NO: 2724 - protein, 2093 aa, synthetic construct
MPAAKRVKLDGGDKKYSIGLDIGTNSVGWAVITDEYKVPSKKFKVLGNTDRHSIKKNLIGALLFDSGETAEATRLKRTARRRYTRRKNRICYLQEIFSNEMAKVDDSFFHRLEESFLVEEDKKHERHPIFGNIVDEVAYHEKYPTIYHLRKKLVDSTDKADLRLIYLALAHMIKFRGHFLIEGDLNPDNSDVDKLFIQLVQTYNQLFEENPINASGVDAKAILSARLSKSRRLENLIAQLPGEKKNGLFGNLIALSLGLTPNFKSNFDLAEDAKLQLSKDTYDDDLDNLLAQIGDQYADLFLAAKNLSDAILLSDILRVNTEITKAPLSASMIKRYDEHHQDLTLLKALVRQQLPEKYKEIFFDQSKNGYAGYIDGGASQEEFYKFIKPILEKMDGTEELLVKLNREDLLRKQRTFDNGSIPHQIHLGELHAILRRQEDFYPFLKDNREKIEKILTFRIPYYVGPLARGNSRFAWMTRKSEETITPWNFEEVVDKGASAQSFIERMTNFDKNLPNEKVLPKHSLLYEYFTVYNELTKVKYVTEGMRKPAFLSGEQKKAIVDLLFKTNRKVTVKQLKEDYFKKIECFDSVEISGVEDRFNASLGTYHDLLKIIKDKDFLDNEENEDILEDIVLTLTLFEDREMIEERLKTYAHLFDDKVMKQLKRRRYTGWGRLSRKLINGIRDKQSGKTILDFLKSDGFANRNFMQLIHDDSLTFKEDIQKAQVSGQGDSLHEHIANLAGSPAIKKGILQTVKVVDELVKVMGRHKPENIVIEMARENQTTQKGQKNSRERMKRIEEGIKELGSQILKEHPVENTQLQNEKLYLYYLQNGRDMYVDQELDINRLSDYDVDHIVPQSFLKDDSIDNKVLTRSDKARGKSDNVPSEEVVKKMKNYWRQLLNAKLITQRKFDNLTKAERGGLSELDKAGFIKRQLVETRQITKHVAQILDSRMNTKYDENDKLIREVKVITLKSKLVSDFRKDFQFYKVREINNYHHAHDAYLNAVVGTALIKKYPKLESEFVYGDYKVYDVRKMIAKSEQEIGKATAKYFFYSNIMNFFKTEITLANGEIRKRPLIETNGETGEIVWDKGRDFATVRKVLSMPQVNIVKKTEVQTGGFSKESILPKRNSDKLIARKKDWDPKKYGGFDSPTVAYSVLVVAKVEKGKSKKLKSVKELLGITIMERSSFEKNPIDFLEAKGYKEVKKDLIIKLPKYSLFELENGRKRMLASAGELQKGNELALPSKYVNFLYLASHYEKLKGSPEDNEQKQLFVEQHKHYLDEIIEQISEFSKRVILADANLDKVLSAYNKHRDKPIREQAENIIHLFTLTNLGAPAAFKYFDTTIDRKRYTSTKEVLDATLIHQSITGLYETRIDLSQLGGDGGEAAAKPAPGGTLNIEDEHRLHETSKEPDVSLGSTWLSDFPQAWAETGGMGLAVRQAPLIIPLKATSTPVSIKQYPMSQEARLGIKPHIQRLLDQGILVPCQSPWNTPLLPVKKPGTNDYRPVQDLREVNKRVEDIHPTVPNPYNLLSGLPPSHQWYTVLDLKDAFFCLRLHPTSQPLFAFEWRDPEMGISGQLTWTRLPQGFKNSPTLFNEALHRDLADFRIQHPDLILLQYVDDLLLAATSELDCQQGTRALLQTLGNLGYRASAKKAQICQKQVKYLGYLLKEGQRWLTEARKETVMGQPTPKTPRQLREFLGTAGFCRLWIPGFAEMAAPLYPLTKPGTLFNWGPDQQKAYQEIKQALLTAPALGLPDLTKPFELFVDEKQGYAKGVLTQKLGPWRRPVAYLSKKLDPVAAGWPPCLRMVAAIAVLTKDAGKLTMGQPLVILAPHAVEALVKQPPDRWLSNARMTHYQALLLDTDRVQFGPVVALNPATLLPLPEEGLQHNCLDILAEAHGTRPDLTDQPLPDADHTWYTDGSSLLQEGQRKAGAAVTTETEVIWAKALPAGTSAQRAELIALTQALKMAEGKKLNVYTDSRYAFATAHIHGEIYRRRGWLTSEGKEIKNKDEILALLKALFLPKRLSIIHCPGHQKGHSAEARGNRMADQAARKAAITETPDTSTLLAGKRTADGSEFEKRTADGSEFESPKKKAKVE

SEQ ID NO: 2725 - protein, 2100 aa, synthetic construct
MPAAKRVKLDGGDKKYSIGLDIGTNSVGWAVITDEYKVPSKKFKVLGNTDRHSIKKNLIGALLFDSGETAEATRLKRTARRRYTRRKNRICYLQEIFSNEMAKVDDSFFHRLEESFLVEEDKKHERHPIFGNIVDEVAYHEKYPTIYHLRKKLVDSTDKADLRLIYLALAHMIKFRGHFLIEGDLNPDNSDVDKLFIQLVQTYNQLFEENPINASGVDAKAILSARLSKSRRLENLIAQLPGEKKNGLFGNLIALSLGLTPNFKSNFDLAEDAKLQLSKDTYDDDLDNLLAQIGDQYADLFLAAKNLSDAILLSDILRVNTEITKAPLSASMIKRYDEHHQDLTLLKALVRQQLPEKYKEIFFDQSKNGYAGYIDGGASQEEFYKFIKPILEKMDGTEELLVKLNREDLLRKQRTFDNGSIPHQIHLGELHAILRRQEDFYPFLKDNREKIEKILTFRIPYYVGPLARGNSRFAWMTRKSEETITPWNFEEVVDKGASAQSFIERMTNFDKNLPNEKVLPKHSLLYEYFTVYNELTKVKYVTEGMRKPAFLSGEQKKAIVDLLFKTNRKVTVKQLKEDYFKKIECFDSVEISGVEDRFNASLGTYHDLLKIIKDKDFLDNEENEDILEDIVLTLTLFEDREMIEERLKTYAHLFDDKVMKQLKRRRYTGWGRLSRKLINGIRDKQSGKTILDFLKSDGFANRNFMQLIHDDSLTFKEDIQKAQVSGQGDSLHEHIANLAGSPAIKKGILQTVKVVDELVKVMGRHKPENIVIEMARENQTTQKGQKNSRERMKRIEEGIKELGSQILKEHPVENTQLQNEKLYLYYLQNGRDMYVDQELDINRLSDYDVDHIVPQSFLKDDSIDNKVLTRSDKARGKSDNVPSEEVVKKMKNYWRQLLNAKLITQRKFDNLTKAERGGLSELDKAGFIKRQLVETRQITKHVAQILDSRMNTKYDENDKLIREVKVITLKSKLVSDFRKDFQFYKVREINNYHHAHDAYLNAVVGTALIKKYPKLESEFVYGDYKVYDVRKMIAKSEQEIGKATAKYFFYSNIMNFFKTEITLANGEIRKRPLIETNGETGEIVWDKGRDFATVRKVLSMPQVNIVKKTEVQTGGFSKESILPKRNSDKLIARKKDWDPKKYGGFDSPTVAYSVLVVAKVEKGKSKKLKSVKELLGITIMERSSFEKNPIDFLEAKGYKEVKKDLIIKLPKYSLFELENGRKRMLASAGELQKGNELALPSKYVNFLYLASHYEKLKGSPEDNEQKQLFVEQHKHYLDEIIEQISEFSKRVILADANLDKVLSAYNKHRDKPIREQAENIIHLFTLTNLGAPAAFKYFDTTIDRKRYTSTKEVLDATLIHQSITGLYETRIDLSQLGGDGGGGGGSEAAAKGGGGSGGTLNIEDEHRLHETSKEPDVSLGSTWLSDFPQAWAETGGMGLAVRQAPLIIPLKATSTPVSIKQYPMSQEARLGIKPHIQRLLDQGILVPCQSPWNTPLLPVKKPGTNDYRPVQDLREVNKRVEDIHPTVPNPYNLLSGLPPSHQWYTVLDLKDAFFCLRLHPTSQPLFAFEWRDPEMGISGQLTWTRLPQGFKNSPTLFNEALHRDLADFRIQHPDLILLQYVDDLLLAATSELDCQQGTRALLQTLGNLGYRASAKKAQICQKQVKYLGYLLKEGQRWLTEARKETVMGQPTPKTPRQLREFLGTAGFCRLWIPGFAEMAAPLYPLTKPGTLFNWGPDQQKAYQEIKQALLTAPALGLPDLTKPFELFVDEKQGYAKGVLTQKLGPWRRPVAYLSKKLDPVAAGWPPCLRMVAAIAVLTKDAGKLTMGQPLVILAPHAVEALVKQPPDRWLSNARMTHYQALLLDTDRVQFGPVVALNPATLLPLPEEGLQHNCLDILAEAHGTRPDLTDQPLPDADHTWYTDGSSLLQEGQRKAGAAVTTETEVIWAKALPAGTSAQRAELIALTQALKMAEGKKLNVYTDSRYAFATAHIHGEIYRRRGWLTSEGKEIKNKDEILALLKALFLPKRLSIIHCPGHQKGHSAEARGNRMADQAARKAAITETPDTSTLLAGKRTADGSEFEKRTADGSEFESPKKKAKVE

SEQ ID NO: 2726 - protein, 2093 aa, synthetic construct
MPAAKRVKLDGGDKKYSIGLDIGTNSVGWAVITDEYKVPSKKFKVLGNTDRHSIKKNLIGALLFDSGETAEATRLKRTARRRYTRRKNRICYLQEIFSNEMAKVDDSFFHRLEESFLVEEDKKHERHPIFGNIVDEVAYHEKYPTIYHLRKKLVDSTDKADLRLIYLALAHMIKFRGHFLIEGDLNPDNSDVDKLFIQLVQTYNQLFEENPINASGVDAKAILSARLSKSRRLENLIAQLPGEKKNGLFGNLIALSLGLTPNFKSNFDLAEDAKLQLSKDTYDDDLDNLLAQIGDQYADLFLAAKNLSDAILLSDILRVNTEITKAPLSASMIKRYDEHHQDLTLLKALVRQQLPEKYKEIFFDQSKNGYAGYIDGGASQEEFYKFIKPILEKMDGTEELLVKLNREDLLRKQRTFDNGSIPHQIHLGELHAILRRQEDFYPFLKDNREKIEKILTFRIPYYVGPLARGNSRFAWMTRKSEETITPWNFEEVVDKGASAQSFIERMTNFDKNLPNEKVLPKHSLLYEYFTVYNELTKVKYVTEGMRKPAFLSGEQKKAIVDLLFKTNRKVTVKQLKEDYFKKIECFDSVEISGVEDRFNASLGTYHDLLKIIKDKDFLDNEENEDILEDIVLTLTLFEDREMIEERLKTYAHLFDDKVMKQLKRRRYTGWGRLSRKLINGIRDKQSGKTILDFLKSDGFANRNFMQLIHDDSLTFKEDIQKAQVSGQGDSLHEHIANLAGSPAIKKGILQTVKVVDELVKVMGRHKPENIVIEMARENQTTQKGQKNSRERMKRIEEGIKELGSQILKEHPVENTQLQNEKLYLYYLQNGRDMYVDQELDINRLSDYDVDHIVPQSFLKDDSIDNKVLTRSDKARGKSDNVPSEEVVKKMKNYWRQLLNAKLITQRKFDNLTKAERGGLSELDKAGFIKRQLVETRQITKHVAQILDSRMNTKYDENDKLIREVKVITLKSKLVSDFRKDFQFYKVREINNYHHAHDAYLNAVVGTALIKKYPKLESEFVYGDYKVYDVRKMIAKSEQEIGKATAKYFFYSNIMNFFKTEITLANGEIRKRPLIETNGETGEIVWDKGRDFATVRKVLSMPQVNIVKKTEVQTGGFSKESILPKRNSDKLIARKKDWDPKKYGGFDSPTVAYSVLVVAKVEKGKSKKLKSVKELLGITIMERSSFEKNPIDFLEAKGYKEVKKDLIIKLPKYSLFELENGRKRMLASAGELQKGNELALPSKYVNFLYLASHYEKLKGSPEDNEQKQLFVEQHKHYLDEIIEQISEFSKRVILADANLDKVLSAYNKHRDKPIREQAENIIHLFTLTNLGAPAAFKYFDTTIDRKRYTSTKEVLDATLIHQSITGLYETRIDLSQLGGDGGEAAAKGGSGGTLNIEDEHRLHETSKEPDVSLGSTWLSDFPQAWAETGGMGLAVRQAPLIIPLKATSTPVSIKQYPMSQEARLGIKPHIQRLLDQGILVPCQSPWNTPLLPVKKPGTNDYRPVQDLREVNKRVEDIHPTVPNPYNLLSGLPPSHQWYTVLDLKDAFFCLRLHPTSQPLFAFEWRDPEMGISGQLTWTRLPQGFKNSPTLFNEALHRDLADFRIQHPDLILLQYVDDLLLAATSELDCQQGTRALLQTLGNLGYRASAKKAQICQKQVKYLGYLLKEGQRWLTEARKETVMGQPTPKTPRQLREFLGTAGFCRLWIPGFAEMAAPLYPLTKPGTLFNWGPDQQKAYQEIKQALLTAPALGLPDLTKPFELFVDEKQGYAKGVLTQKLGPWRRPVAYLSKKLDPVAAGWPPCLRMVAAIAVLTKDAGKLTMGQPLVILAPHAVEALVKQPPDRWLSNARMTHYQALLLDTDRVQFGPVVALNPATLLPLPEEGLQHNCLDILAEAHGTRPDLTDQPLPDADHTWYTDGSSLLQEGQRKAGAAVTTETEVIWAKALPAGTSAQRAELIALTQALKMAEGKKLNVYTDSRYAFATAHIHGEIYRRRGWLTSEGKEIKNKDEILALLKALFLPKRLSIIHCPGHQKGHSAEARGNRMADQAARKAAITETPDTSTLLAGKRTADGSEFEKRTADGSEFESPKKKAKVE

SEQ ID NO: 2727 - protein, 2096 aa, synthetic construct
MPAAKRVKLDGGDKKYSIGLDIGTNSVGWAVITDEYKVPSKKFKVLGNTDRHSIKKNLIGALLFDSGETAEATRLKRTARRRYTRRKNRICYLQEIFSNEMAKVDDSFFHRLEESFLVEEDKKHERHPIFGNIVDEVAYHEKYPTIYHLRKKLVDSTDKADLRLIYLALAHMIKFRGHFLIEGDLNPDNSDVDKLFIQLVQTYNQLFEENPINASGVDAKAILSARLSKSRRLENLIAQLPGEKKNGLFGNLIALSLGLTPNFKSNFDLAEDAKLQLSKDTYDDDLDNLLAQIGDQYADLFLAAKNLSDAILLSDILRVNTEITKAPLSASMIKRYDEHHQDLTLLKALVRQQLPEKYKEIFFDQSKNGYAGYIDGGASQEEFYKFIKPILEKMDGTEELLVKLNREDLLRKQRTFDNGSIPHQIHLGELHAILRRQEDFYPFLKDNREKIEKILTFRIPYYVGPLARGNSRFAWMTRKSEETITPWNFEEVVDKGASAQSFIERMTNFDKNLPNEKVLPKHSLLYEYFTVYNELTKVKYVTEGMRKPAFLSGEQKKAIVDLLFKTNRKVTVKQLKEDYFKKIECFDSVEISGVEDRFNASLGTYHDLLKIIKDKDFLDNEENEDILEDIVLTLTLFEDREMIEERLKTYAHLFDDKVMKQLKRRRYTGWGRLSRKLINGIRDKQSGKTILDFLKSDGFANRNFMQLIHDDSLTFKEDIQKAQVSGQGDSLHEHIANLAGSPAIKKGILQTVKVVDELVKVMGRHKPENIVIEMARENQTTQKGQKNSRERMKRIEEGIKELGSQILKEHPVENTQLQNEKLYLYYLQNGRDMYVDQELDINRLSDYDVDHIVPQSFLKDDSIDNKVLTRSDKARGKSDNVPSEEVVKKMKNYWRQLLNAKLITQRKFDNLTKAERGGLSELDKAGFIKRQLVETRQITKHVAQILDSRMNTKYDENDKLIREVKVITLKSKLVSDFRKDFQFYKVREINNYHHAHDAYLNAVVGTALIKKYPKLESEFVYGDYKVYDVRKMIAKSEQEIGKATAKYFFYSNIMNFFKTEITLANGEIRKRPLIETNGETGEIVWDKGRDFATVRKVLSMPQVNIVKKTEVQTGGFSKESILPKRNSDKLIARKKDWDPKKYGGFDSPTVAYSVLVVAKVEKGKSKKLKSVKELLGITIMERSSFEKNPIDFLEAKGYKEVKKDLIIKLPKYSLFELENGRKRMLASAGELQKGNELALPSKYVNFLYLASHYEKLKGSPEDNEQKQLFVEQHKHYLDEIIEQISEFSKRVILADANLDKVLSAYNKHRDKPIREQAENIIHLFTLTNLGAPAAFKYFDTTIDRKRYTSTKEVLDATLIHQSITGLYETRIDLSQLGGDGGEAAAKGGSGSSGGTLNIEDEHRLHETSKEPDVSLGSTWLSDFPQAWAETGGMGLAVRQAPLIIPLKATSTPVSIKQYPMSQEARLGIKPHIQRLLDQGILVPCQSPWNTPLLPVKKPGTNDYRPVQDLREVNKRVEDIHPTVPNPYNLLSGLPPSHQWYTVLDLKDAFFCLRLHPTSQPLFAFEWRDPEMGISGQLTWTRLPQGFKNSPTLFNEALHRDLADFRIQHPDLILLQYVDDLLLAATSELDCQQGTRALLQTLGNLGYRASAKKAQICQKQVKYLGYLLKEGQRWLTEARKETVMGQPTPKTPRQLREFLGTAGFCRLWIPGFAEMAAPLYPLTKPGTLFNWGPDQQKAYQEIKQALLTAPALGLPDLTKPFELFVDEKQGYAKGVLTQKLGPWRRPVAYLSKKLDPVAAGWPPCLRMVAAIAVLTKDAGKLTMGQPLVILAPHAVEALVKQPPDRWLSNARMTHYQALLLDTDRVQFGPVVALNPATLLPLPEEGLQHNCLDILAEAHGTRPDLTDQPLPDADHTWYTDGSSLLQEGQRKAGAAVTTETEVIWAKALPAGTSAQRAELIALTQALKMAEGKKLNVYTDSRYAFATAHIHGEIYRRRGWLTSEGKEIKNKDEILALLKALFLPKRLSIIHCPGHQKGHSAEARGNRMADQAARKAAITETPDTSTLLAGKRTADGSEFEKRTADGSEFESPKKKAKVE

SEQ ID NO: 2728 - protein, 2097 aa, synthetic construct
MPAAKRVKLDGGDKKYSIGLDIGTNSVGWAVITDEYKVPSKKFKVLGNTDRHSIKKNLIGALLFDSGETAEATRLKRTARRRYTRRKNRICYLQEIFSNEMAKVDDSFFHRLEESFLVEEDKKHERHPIFGNIVDEVAYHEKYPTIYHLRKKLVDSTDKADLRLIYLALAHMIKFRGHFLIEGDLNPDNSDVDKLFIQLVQTYNQLFEENPINASGVDAKAILSARLSKSRRLENLIAQLPGEKKNGLFGNLIALSLGLTPNFKSNFDLAEDAKLQLSKDTYDDDLDNLLAQIGDQYADLFLAAKNLSDAILLSDILRVNTEITKAPLSASMIKRYDEHHQDLTLLKALVRQQLPEKYKEIFFDQSKNGYAGYIDGGASQEEFYKFIKPILEKMDGTEELLVKLNREDLLRKQRTFDNGSIPHQIHLGELHAILRRQEDFYPFLKDNREKIEKILTFRIPYYVGPLARGNSRFAWMTRKSEETITPWNFEEVVDKGASAQSFIERMTNFDKNLPNEKVLPKHSLLYEYFTVYNELTKVKYVTEGMRKPAFLSGEQKKAIVDLLFKTNRKVTVKQLKEDYFKKIECFDSVEISGVEDRFNASLGTYHDLLKIIKDKDFLDNEENEDILEDIVLTLTLFEDREMIEERLKTYAHLFDDKVMKQLKRRRYTGWGRLSRKLINGIRDKQSGKTILDFLKSDGFANRNFMQLIHDDSLTFKEDIQKAQVSGQGDSLHEHIANLAGSPAIKKGILQTVKVVDELVKVMGRHKPENIVIEMARENQTTQKGQKNSRERMKRIEEGIKELGSQILKEHPVENTQLQNEKLYLYYLQNGRDMYVDQELDINRLSDYDVDHIVPQSFLKDDSIDNKVLTRSDKARGKSDNVPSEEVVKKMKNYWRQLLNAKLITQRKFDNLTKAERGGLSELDKAGFIKRQLVETRQITKHVAQILDSRMNTKYDENDKLIREVKVITLKSKLVSDFRKDFQFYKVREINNYHHAHDAYLNAVVGTALIKKYPKLESEFVYGDYKVYDVRKMIAKSEQEIGKATAKYFFYSNIMNFFKTEITLANGEIRKRPLIETNGETGEIVWDKGRDFATVRKVLSMPQVNIVKKTEVQTGGFSKESILPKRNSDKLIARKKDWDPKKYGGFDSPTVAYSVLVVAKVEKGKSKKLKSVKELLGITIMERSSFEKNPIDFLEAKGYKEVKKDLIIKLPKYSLFELENGRKRMLASAGELQKGNELALPSKYVNFLYLASHYEKLKGSPEDNEQKQLFVEQHKHYLDEIIEQISEFSKRVILADANLDKVLSAYNKHRDKPIREQAENIIHLFTLTNLGAPAAFKYFDTTIDRKRYTSTKEVLDATLIHQSITGLYETRIDLSQLGGDGGGSSGSSGSSGSSGGTLNIEDEHRLHETSKEPDVSLGSTWLSDFPQAWAETGGMGLAVRQAPLIIPLKATSTPVSIKQYPMSQEARLGIKPHIQRLLDQGILVPCQSPWNTPLLPVKKPGTNDYRPVQDLREVNKRVEDIHPTVPNPYNLLSGLPPSHQWYTVLDLKDAFFCLRLHPTSQPLFAFEWRDPEMGISGQLTWTRLPQGFKNSPTLFNEALHRDLADFRIQHPDLILLQYVDDLLLAATSELDCQQGTRALLQTLGNLGYRASAKKAQICQKQVKYLGYLLKEGQRWLTEARKETVMGQPTPKTPRQLREFLGTAGFCRLWIPGFAEMAAPLYPLTKPGTLFNWGPDQQKAYQEIKQALLTAPALGLPDLTKPFELFVDEKQGYAKGVLTQKLGPWRRPVAYLSKKLDPVAAGWPPCLRMVAAIAVLTKDAGKLTMGQPLVILAPHAVEALVKQPPDRWLSNARMTHYQALLLDTDRVQFGPVVALNPATLLPLPEEGLQHNCLDILAEAHGTRPDLTDQPLPDADHTWYTDGSSLLQEGQRKAGAAVTTETEVIWAKALPAGTSAQRAELIALTQALKMAEGKKLNVYTDSRYAFATAHIHGEIYRRRGWLTSEGKEIKNKDEILALLKALFLPKRLSIIHCPGHQKGHSAEARGNRMADQAARKAAITETPDTSTLLAGKRTADGSEFEKRTADGSEFESPKKKAKVE

SEQ ID NO: 2729 - protein, 2095 aa, synthetic construct
MPAAKRVKLDGGDKKYSIGLDIGTNSVGWAVITDEYKVPSKKFKVLGNTDRHSIKKNLIGALLFDSGETAEATRLKRTARRRYTRRKNRICYLQEIFSNEMAKVDDSFFHRLEESFLVEEDKKHERHPIFGNIVDEVAYHEKYPTIYHLRKKLVDSTDKADLRLIYLALAHMIKFRGHFLIEGDLNPDNSDVDKLFIQLVQTYNQLFEENPINASGVDAKAILSARLSKSRRLENLIAQLPGEKKNGLFGNLIALSLGLTPNFKSNFDLAEDAKLQLSKDTYDDDLDNLLAQIGDQYADLFLAAKNLSDAILLSDILRVNTEITKAPLSASMIKRYDEHHQDLTLLKALVRQQLPEKYKEIFFDQSKNGYAGYIDGGASQEEFYKFIKPILEKMDGTEELLVKLNREDLLRKQRTFDNGSIPHQIHLGELHAILRRQEDFYPFLKDNREKIEKILTFRIPYYVGPLARGNSRFAWMTRKSEETITPWNFEEVVDKGASAQSFIERMTNFDKNLPNEKVLPKHSLLYEYFTVYNELTKVKYVTEGMRKPAFLSGEQKKAIVDLLFKTNRKVTVKQLKEDYFKKIECFDSVEISGVEDRFNASLGTYHDLLKIIKDKDFLDNEENEDILEDIVLTLTLFEDREMIEERLKTYAHLFDDKVMKQLKRRRYTGWGRLSRKLINGIRDKQSGKTILDFLKSDGFANRNFMQLIHDDSLTFKEDIQKAQVSGQGDSLHEHIANLAGSPAIKKGILQTVKVVDELVKVMGRHKPENIVIEMARENQTTQKGQKNSRERMKRIEEGIKELGSQILKEHPVENTQLQNEKLYLYYLQNGRDMYVDQELDINRLSDYDVDHIVPQSFLKDDSIDNKVLTRSDKARGKSDNVPSEEVVKKMKNYWRQLLNAKLITQRKFDNLTKAERGGLSELDKAGFIKRQLVETRQITKHVAQILDSRMNTKYDENDKLIREVKVITLKSKLVSDFRKDFQFYKVREINNYHHAHDAYLNAVVGTALIKKYPKLESEFVYGDYKVYDVRKMIAKSEQEIGKATAKYFFYSNIMNFFKTEITLANGEIRKRPLIETNGETGEIVWDKGRDFATVRKVLSMPQVNIVKKTEVQTGGFSKESILPKRNSDKLIARKKDWDPKKYGGFDSPTVAYSVLVVAKVEKGKSKKLKSVKELLGITIMERSSFEKNPIDFLEAKGYKEVKKDLIIKLPKYSLFELENGRKRMLASAGELQKGNELALPSKYVNFLYLASHYEKLKGSPEDNEQKQLFVEQHKHYLDEIIEQISEFSKRVILADANLDKVLSAYNKHRDKPIREQAENIIHLFTLTNLGAPAAFKYFDTTIDRKRYTSTKEVLDATLIHQSITGLYETRIDLSQLGGDGGEAAAKEAAAKGGTLNIEDEHRLHETSKEPDVSLGSTWLSDFPQAWAETGGMGLAVRQAPLIIPLKATSTPVSIKQYPMSQEARLGIKPHIQRLLDQGILVPCQSPWNTPLLPVKKPGTNDYRPVQDLREVNKRVEDIHPTVPNPYNLLSGLPPSHQWYTVLDLKDAFFCLRLHPTSQPLFAFEWRDPEMGISGQLTWTRLPQGFKNSPTLFNEALHRDLADFRIQHPDLILLQYVDDLLLAATSELDCQQGTRALLQTLGNLGYRASAKKAQICQKQVKYLGYLLKEGQRWLTEARKETVMGQPTPKTPRQLREFLGTAGFCRLWIPGFAEMAAPLYPLTKPGTLFNWGPDQQKAYQEIKQALLTAPALGLPDLTKPFELFVDEKQGYAKGVLTQKLGPWRRPVAYLSKKLDPVAAGWPPCLRMVAAIAVLTKDAGKLTMGQPLVILAPHAVEALVKQPPDRWLSNARMTHYQALLLDTDRVQFGPVVALNPATLLPLPEEGLQHNCLDILAEAHGTRPDLTDQPLPDADHTWYTDGSSLLQEGQRKAGAAVTTETEVIWAKALPAGTSAQRAELIALTQALKMAEGKKLNVYTDSRYAFATAHIHGEIYRRRGWLTSEGKEIKNKDEILALLKALFLPKRLSIIHCPGHQKGHSAEARGNRMADQAARKAAITETPDTSTLLAGKRTADGSEFEKRTADGSEFESPKKKAKVE

SEQ ID NO: 2730 - protein, 2090 aa, synthetic construct
MPAAKRVKLDGGDKKYSIGLDIGTNSVGWAVITDEYKVPSKKFKVLGNTDRHSIKKNLIGALLFDSGETAEATRLKRTARRRYTRRKNRICYLQEIFSNEMAKVDDSFFHRLEESFLVEEDKKHERHPIFGNIVDEVAYHEKYPTIYHLRKKLVDSTDKADLRLIYLALAHMIKFRGHFLIEGDLNPDNSDVDKLFIQLVQTYNQLFEENPINASGVDAKAILSARLSKSRRLENLIAQLPGEKKNGLFGNLIALSLGLTPNFKSNFDLAEDAKLQLSKDTYDDDLDNLLAQIGDQYADLFLAAKNLSDAILLSDILRVNTEITKAPLSASMIKRYDEHHQDLTLLKALVRQQLPEKYKEIFFDQSKNGYAGYIDGGASQEEFYKFIKPILEKMDGTEELLVKLNREDLLRKQRTFDNGSIPHQIHLGELHAILRRQEDFYPFLKDNREKIEKILTFRIPYYVGPLARGNSRFAWMTRKSEETITPWNFEEVVDKGASAQSFIERMTNFDKNLPNEKVLPKHSLLYEYFTVYNELTKVKYVTEGMRKPAFLSGEQKKAIVDLLFKTNRKVTVKQLKEDYFKKIECFDSVEISGVEDRFNASLGTYHDLLKIIKDKDFLDNEENEDILEDIVLTLTLFEDREMIEERLKTYAHLFDDKVMKQLKRRRYTGWGRLSRKLINGIRDKQSGKTILDFLKSDGFANRNFMQLIHDDSLTFKEDIQKAQVSGQGDSLHEHIANLAGSPAIKKGILQTVKVVDELVKVMGRHKPENIVIEMARENQTTQKGQKNSRERMKRIEEGIKELGSQILKEHPVENTQLQNEKLYLYYLQNGRDMYVDQELDINRLSDYDVDHIVPQSFLKDDSIDNKVLTRSDKARGKSDNVPSEEVVKKMKNYWRQLLNAKLITQRKFDNLTKAERGGLSELDKAGFIKRQLVETRQITKHVAQILDSRMNTKYDENDKLIREVKVITLKSKLVSDFRKDFQFYKVREINNYHHAHDAYLNAVVGTALIKKYPKLESEFVYGDYKVYDVRKMIAKSEQEIGKATAKYFFYSNIMNFFKTEITLANGEIRKRPLIETNGETGEIVWDKGRDFATVRKVLSMPQVNIVKKTEVQTGGFSKESILPKRNSDKLIARKKDWDPKKYGGFDSPTVAYSVLVVAKVEKGKSKKLKSVKELLGITIMERSSFEKNPIDFLEAKGYKEVKKDLIIKLPKYSLFELENGRKRMLASAGELQKGNELALPSKYVNFLYLASHYEKLKGSPEDNEQKQLFVEQHKHYLDEIIEQISEFSKRVILADANLDKVLSAYNKHRDKPIREQAENIIHLFTLTNLGAPAAFKYFDTTIDRKRYTSTKEVLDATLIHQSITGLYETRIDLSQLGGDGGEAAAKGGTLNIEDEHRLHETSKEPDVSLGSTWLSDFPQAWAETGGMGLAVRQAPLIIPLKATSTPVSIKQYPMSQEARLGIKPHIQRLLDQGILVPCQSPWNTPLLPVKKPGTNDYRPVQDLREVNKRVEDIHPTVPNPYNLLSGLPPSHQWYTVLDLKDAFFCLRLHPTSQPLFAFEWRDPEMGISGQLTWTRLPQGFKNSPTLFNEALHRDLADFRIQHPDLILLQYVDDLLLAATSELDCQQGTRALLQTLGNLGYRASAKKAQICQKQVKYLGYLLKEGQRWLTEARKETVMGQPTPKTPRQLREFLGTAGFCRLWIPGFAEMAAPLYPLTKPGTLFNWGPDQQKAYQEIKQALLTAPALGLPDLTKPFELFVDEKQGYAKGVLTQKLGPWRRPVAYLSKKLDPVAAGWPPCLRMVAAIAVLTKDAGKLTMGQPLVILAPHAVEALVKQPPDRWLSNARMTHYQALLLDTDRVQFGPVVALNPATLLPLPEEGLQHNCLDILAEAHGTRPDLTDQPLPDADHTWYTDGSSLLQEGQRKAGAAVTTETEVIWAKALPAGTSAQRAELIALTQALKMAEGKKLNVYTDSRYAFATAHIHGEIYRRRGWLTSEGKEIKNKDEILALLKALFLPKRLSIIHCPGHQKGHSAEARGNRMADQAARKAAITETPDTSTLLAGKRTADGSEFEKRTADGSEFESPKKKAKVE

SEQ ID NO: 2731 - protein, 2094 aa, synthetic construct
MPAAKRVKLDGGDKKYSIGLDIGTNSVGWAVITDEYKVPSKKFKVLGNTDRHSIKKNLIGALLFDSGETAEATRLKRTARRRYTRRKNRICYLQEIFSNEMAKVDDSFFHRLEESFLVEEDKKHERHPIFGNIVDEVAYHEKYPTIYHLRKKLVDSTDKADLRLIYLALAHMIKFRGHFLIEGDLNPDNSDVDKLFIQLVQTYNQLFEENPINASGVDAKAILSARLSKSRRLENLIAQLPGEKKNGLFGNLIALSLGLTPNFKSNFDLAEDAKLQLSKDTYDDDLDNLLAQIGDQYADLFLAAKNLSDAILLSDILRVNTEITKAPLSASMIKRYDEHHQDLTLLKALVRQQLPEKYKEIFFDQSKNGYAGYIDGGASQEEFYKFIKPILEKMDGTEELLVKLNREDLLRKQRTFDNGSIPHQIHLGELHAILRRQEDFYPFLKDNREKIEKILTFRIPYYVGPLARGNSRFAWMTRKSEETITPWNFEEVVDKGASAQSFIERMTNFDKNLPNEKVLPKHSLLYEYFTVYNELTKVKYVTEGMRKPAFLSGEQKKAIVDLLFKTNRKVTVKQLKEDYFKKIECFDSVEISGVEDRFNASLGTYHDLLKIIKDKDFLDNEENEDILEDIVLTLTLFEDREMIEERLKTYAHLFDDKVMKQLKRRRYTGWGRLSRKLINGIRDKQSGKTILDFLKSDGFANRNFMQLIHDDSLTFKEDIQKAQVSGQGDSLHEHIANLAGSPAIKKGILQTVKVVDELVKVMGRHKPENIVIEMARENQTTQKGQKNSRERMKRIEEGIKELGSQILKEHPVENTQLQNEKLYLYYLQNGRDMYVDQELDINRLSDYDVDHIVPQSFLKDDSIDNKVLTRSDKARGKSDNVPSEEVVKKMKNYWRQLLNAKLITQRKFDNLTKAERGGLSELDKAGFIKRQLVETRQITKHVAQILDSRMNTKYDENDKLIREVKVITLKSKLVSDFRKDFQFYKVREINNYHHAHDAYLNAVVGTALIKKYPKLESEFVYGDYKVYDVRKMIAKSEQEIGKATAKYFFYSNIMNFFKTEITLANGEIRKRPLIETNGETGEIVWDKGRDFATVRKVLSMPQVNIVKKTEVQTGGFSKESILPKRNSDKLIARKKDWDPKKYGGFDSPTVAYSVLVVAKVEKGKSKKLKSVKELLGITIMERSSFEKNPIDFLEAKGYKEVKKDLIIKLPKYSLFELENGRKRMLASAGELQKGNELALPSKYVNFLYLASHYEKLKGSPEDNEQKQLFVEQHKHYLDEIIEQISEFSKRVILADANLDKVLSAYNKHRDKPIREQAENIIHLFTLTNLGAPAAFKYFDTTIDRKRYTSTKEVLDATLIHQSITGLYETRIDLSQLGGDGGPAPAPAPAPGGTLNIEDEHRLHETSKEPDVSLGSTWLSDFPQAWAETGGMGLAVRQAPLIIPLKATSTPVSIKQYPMSQEARLGIKPHIQRLLDQGILVPCQSPWNTPLLPVKKPGTNDYRPVQDLREVNKRVEDIHPTVPNPYNLLSGLPPSHQWYTVLDLKDAFFCLRLHPTSQPLFAFEWRDPEMGISGQLTWTRLPQGFKNSPTLFNEALHRDLADFRIQHPDLILLQYVDDLLLAATSELDCQQGTRALLQTLGNLGYRASAKKAQICQKQVKYLGYLLKEGQRWLTEARKETVMGQPTPKTPRQLREFLGTAGFCRLWIPGFAEMAAPLYPLTKPGTLFNWGPDQQKAYQEIKQALLTAPALGLPDLTKPFELFVDEKQGYAKGVLTQKLGPWRRPVAYLSKKLDPVAAGWPPCLRMVAAIAVLTKDAGKLTMGQPLVILAPHAVEALVKQPPDRWLSNARMTHYQALLLDTDRVQFGPVVALNPATLLPLPEEGLQHNCLDILAEAHGTRPDLTDQPLPDADHTWYTDGSSLLQEGQRKAGAAVTTETEVIWAKALPAGTSAQRAELIALTQALKMAEGKKLNVYTDSRYAFATAHIHGEIYRRRGWLTSEGKEIKNKDEILALLKALFLPKRLSIIHCPGHQKGHSAEARGNRMADQAARKAAITETPDTSTLLAGKRTADGSEFEKRTADGSEFESPKKKAKVE

SEQ ID NO: 2732 - protein, 2096 aa, synthetic construct
MPAAKRVKLDGGDKKYSIGLDIGTNSVGWAVITDEYKVPSKKFKVLGNTDRHSIKKNLIGALLFDSGETAEATRLKRTARRRYTRRKNRICYLQEIFSNEMAKVDDSFFHRLEESFLVEEDKKHERHPIFGNIVDEVAYHEKYPTIYHLRKKLVDSTDKADLRLIYLALAHMIKFRGHFLIEGDLNPDNSDVDKLFIQLVQTYNQLFEENPINASGVDAKAILSARLSKSRRLENLIAQLPGEKKNGLFGNLIALSLGLTPNFKSNFDLAEDAKLQLSKDTYDDDLDNLLAQIGDQYADLFLAAKNLSDAILLSDILRVNTEITKAPLSASMIKRYDEHHQDLTLLKALVRQQLPEKYKEIFFDQSKNGYAGYIDGGASQEEFYKFIKPILEKMDGTEELLVKLNREDLLRKQRTFDNGSIPHQIHLGELHAILRRQEDFYPFLKDNREKIEKILTFRIPYYVGPLARGNSRFAWMTRKSEETITPWNFEEVVDKGASAQSFIERMTNFDKNLPNEKVLPKHSLLYEYFTVYNELTKVKYVTEGMRKPAFLSGEQKKAIVDLLFKTNRKVTVKQLKEDYFKKIECFDSVEISGVEDRFNASLGTYHDLLKIIKDKDFLDNEENEDILEDIVLTLTLFEDREMIEERLKTYAHLFDDKVMKQLKRRRYTGWGRLSRKLINGIRDKQSGKTILDFLKSDGFANRNFMQLIHDDSLTFKEDIQKAQVSGQGDSLHEHIANLAGSPAIKKGILQTVKVVDELVKVMGRHKPENIVIEMARENQTTQKGQKNSRERMKRIEEGIKELGSQILKEHPVENTQLQNEKLYLYYLQNGRDMYVDQELDINRLSDYDVDHIVPQSFLKDDSIDNKVLTRSDKARGKSDNVPSEEVVKKMKNYWRQLLNAKLITQRKFDNLTKAERGGLSELDKAGFIKRQLVETRQITKHVAQILDSRMNTKYDENDKLIREVKVITLKSKLVSDFRKDFQFYKVREINNYHHAHDAYLNAVVGTALIKKYPKLESEFVYGDYKVYDVRKMIAKSEQEIGKATAKYFFYSNIMNFFKTEITLANGEIRKRPLIETNGETGEIVWDKGRDFATVRKVLSMPQVNIVKKTEVQTGGFSKESILPKRNSDKLIARKKDWDPKKYGGFDSPTVAYSVLVVAKVEKGKSKKLKSVKELLGITIMERSSFEKNPIDFLEAKGYKEVKKDLIIKLPKYSLFELENGRKRMLASAGELQKGNELALPSKYVNFLYLASHYEKLKGSPEDNEQKQLFVEQHKHYLDEIIEQISEFSKRVILADANLDKVLSAYNKHRDKPIREQAENIIHLFTLTNLGAPAAFKYFDTTIDRKRYTSTKEVLDATLIHQSITGLYETRIDLSQLGGDGGGSSEAAAKGGGGGTLNIEDEHRLHETSKEPDVSLGSTWLSDFPQAWAETGGMGLAVRQAPLIIPLKATSTPVSIKQYPMSQEARLGIKPHIQRLLDQGILVPCQSPWNTPLLPVKKPGTNDYRPVQDLREVNKRVEDIHPTVPNPYNLLSGLPPSHQWYTVLDLKDAFFCLRLHPTSQPLFAFEWRDPEMGISGQLTWTRLPQGFKNSPTLFNEALHRDLADFRIQHPDLILLQYVDDLLLAATSELDCQQGTRALLQTLGNLGYRASAKKAQICQKQVKYLGYLLKEGQRWLTEARKETVMGQPTPKTPRQLREFLGTAGFCRLWIPGFAEMAAPLYPLTKPGTLFNWGPDQQKAYQEIKQALLTAPALGLPDLTKPFELFVDEKQGYAKGVLTQKLGPWRRPVAYLSKKLDPVAAGWPPCLRMVAAIAVLTKDAGKLTMGQPLVILAPHAVEALVKQPPDRWLSNARMTHYQALLLDTDRVQFGPVVALNPATLLPLPEEGLQHNCLDILAEAHGTRPDLTDQPLPDADHTWYTDGSSLLQEGQRKAGAAVTTETEVIWAKALPAGTSAQRAELIALTQALKMAEGKKLNVYTDSRYAFATAHIHGEIYRRRGWLTSEGKEIKNKDEILALLKALFLPKRLSIIHCPGHQKGHSAEARGNRMADQAARKAAITETPDTSTLLAGKRTADGSEFEKRTADGSEFESPKKKAKVE

SEQ ID NO: 2733 - protein, 2091 aa, synthetic construct
MPAAKRVKLDGGDKKYSIGLDIGTNSVGWAVITDEYKVPSKKFKVLGNTDRHSIKKNLIGALLFDSGETAEATRLKRTARRRYTRRKNRICYLQEIFSNEMAKVDDSFFHRLEESFLVEEDKKHERHPIFGNIVDEVAYHEKYPTIYHLRKKLVDSTDKADLRLIYLALAHMIKFRGHFLIEGDLNPDNSDVDKLFIQLVQTYNQLFEENPINASGVDAKAILSARLSKSRRLENLIAQLPGEKKNGLFGNLIALSLGLTPNFKSNFDLAEDAKLQLSKDTYDDDLDNLLAQIGDQYADLFLAAKNLSDAILLSDILRVNTEITKAPLSASMIKRYDEHHQDLTLLKALVRQQLPEKYKEIFFDQSKNGYAGYIDGGASQEEFYKFIKPILEKMDGTEELLVKLNREDLLRKQRTFDNGSIPHQIHLGELHAILRRQEDFYPFLKDNREKIEKILTFRIPYYVGPLARGNSRFAWMTRKSEETITPWNFEEVVDKGASAQSFIERMTNFDKNLPNEKVLPKHSLLYEYFTVYNELTKVKYVTEGMRKPAFLSGEQKKAIVDLLFKTNRKVTVKQLKEDYFKKIECFDSVEISGVEDRFNASLGTYHDLLKIIKDKDFLDNEENEDILEDIVLTLTLFEDREMIEERLKTYAHLFDDKVMKQLKRRRYTGWGRLSRKLINGIRDKQSGKTILDFLKSDGFANRNFMQLIHDDSLTFKEDIQKAQVSGQGDSLHEHIANLAGSPAIKKGILQTVKVVDELVKVMGRHKPENIVIEMARENQTTQKGQKNSRERMKRIEEGIKELGSQILKEHPVENTQLQNEKLYLYYLQNGRDMYVDQELDINRLSDYDVDHIVPQSFLKDDSIDNKVLTRSDKARGKSDNVPSEEVVKKMKNYWRQLLNAKLITQRKFDNLTKAERGGLSELDKAGFIKRQLVETRQITKHVAQILDSRMNTKYDENDKLIREVKVITLKSKLVSDFRKDFQFYKVREINNYHHAHDAYLNAVVGTALIKKYPKLESEFVYGDYKVYDVRKMIAKSEQEIGKATAKYFFYSNIMNFFKTEITLANGEIRKRPLIETNGETGEIVWDKGRDFATVRKVLSMPQVNIVKKTEVQTGGFSKESILPKRNSDKLIARKKDWDPKKYGGFDSPTVAYSVLVVAKVEKGKSKKLKSVKELLGITIMERSSFEKNPIDFLEAKGYKEVKKDLIIKLPKYSLFELENGRKRMLASAGELQKGNELALPSKYVNFLYLASHYEKLKGSPEDNEQKQLFVEQHKHYLDEIIEQISEFSKRVILADANLDKVLSAYNKHRDKPIREQAENIIHLFTLTNLGAPAAFKYFDTTIDRKRYTSTKEVLDATLIHQSITGLYETRIDLSQLGGDGGPAPGGSGGTLNIEDEHRLHETSKEPDVSLGSTWLSDFPQAWAETGGMGLAVRQAPLIIPLKATSTPVSIKQYPMSQEARLGIKPHIQRLLDQGILVPCQSPWNTPLLPVKKPGTNDYRPVQDLREVNKRVEDIHPTVPNPYNLLSGLPPSHQWYTVLDLKDAFFCLRLHPTSQPLFAFEWRDPEMGISGQLTWTRLPQGFKNSPTLFNEALHRDLADFRIQHPDLILLQYVDDLLLAATSELDCQQGTRALLQTLGNLGYRASAKKAQICQKQVKYLGYLLKEGQRWLTEARKETVMGQPTPKTPRQLREFLGTAGFCRLWIPGFAEMAAPLYPLTKPGTLFNWGPDQQKAYQEIKQALLTAPALGLPDLTKPFELFVDEKQGYAKGVLTQKLGPWRRPVAYLSKKLDPVAAGWPPCLRMVAAIAVLTKDAGKLTMGQPLVILAPHAVEALVKQPPDRWLSNARMTHYQALLLDTDRVQFGPVVALNPATLLPLPEEGLQHNCLDILAEAHGTRPDLTDQPLPDADHTWYTDGSSLLQEGQRKAGAAVTTETEVIWAKALPAGTSAQRAELIALTQALKMAEGKKLNVYTDSRYAFATAHIHGEIYRRRGWLTSEGKEIKNKDEILALLKALFLPKRLSIIHCPGHQKGHSAEARGNRMADQAARKAAITETPDTSTLLAGKRTADGSEFEKRTADGSEFESPKKKAKVE

SEQ ID NO: 2734 - protein, 2118 aa, synthetic construct
MPAAKRVKLDGGDKKYSIGLDIGTNSVGWAVITDEYKVPSKKFKVLGNTDRHSIKKNLIGALLFDSGETAEATRLKRTARRRYTRRKNRICYLQEIFSNEMAKVDDSFFHRLEESFLVEEDKKHERHPIFGNIVDEVAYHEKYPTIYHLRKKLVDSTDKADLRLIYLALAHMIKFRGHFLIEGDLNPDNSDVDKLFIQLVQTYNQLFEENPINASGVDAKAILSARLSKSRRLENLIAQLPGEKKNGLFGNLIALSLGLTPNFKSNFDLAEDAKLQLSKDTYDDDLDNLLAQIGDQYADLFLAAKNLSDAILLSDILRVNTEITKAPLSASMIKRYDEHHQDLTLLKALVRQQLPEKYKEIFFDQSKNGYAGYIDGGASQEEFYKFIKPILEKMDGTEELLVKLNREDLLRKQRTFDNGSIPHQIHLGELHAILRRQEDFYPFLKDNREKIEKILTFRIPYYVGPLARGNSRFAWMTRKSEETITPWNFEEVVDKGASAQSFIERMTNFDKNLPNEKVLPKHSLLYEYFTVYNELTKVKYVTEGMRKPAFLSGEQKKAIVDLLFKTNRKVTVKQLKEDYFKKIECFDSVEISGVEDRFNASLGTYHDLLKIIKDKDFLDNEENEDILEDIVLTLTLFEDREMIEERLKTYAHLFDDKVMKQLKRRRYTGWGRLSRKLINGIRDKQSGKTILDFLKSDGFANRNFMQLIHDDSLTFKEDIQKAQVSGQGDSLHEHIANLAGSPAIKKGILQTVKVVDELVKVMGRHKPENIVIEMARENQTTQKGQKNSRERMKRIEEGIKELGSQILKEHPVENTQLQNEKLYLYYLQNGRDMYVDQELDINRLSDYDVDHIVPQSFLKDDSIDNKVLTRSDKARGKSDNVPSEEVVKKMKNYWRQLLNAKLITQRKFDNLTKAERGGLSELDKAGFIKRQLVETRQITKHVAQILDSRMNTKYDENDKLIREVKVITLKSKLVSDFRKDFQFYKVREINNYHHAHDAYLNAVVGTALIKKYPKLESEFVYGDYKVYDVRKMIAKSEQEIGKATAKYFFYSNIMNFFKTEITLANGEIRKRPLIETNGETGEIVWDKGRDFATVRKVLSMPQVNIVKKTEVQTGGFSKESILPKRNSDKLIARKKDWDPKKYGGFDSPTVAYSVLVVAKVEKGKSKKLKSVKELLGITIMERSSFEKNPIDFLEAKGYKEVKKDLIIKLPKYSLFELENGRKRMLASAGELQKGNELALPSKYVNFLYLASHYEKLKGSPEDNEQKQLFVEQHKHYLDEIIEQISEFSKRVILADANLDKVLSAYNKHRDKPIREQAENIIHLFTLTNLGAPAAFKYFDTTIDRKRYTSTKEVLDATLIHQSITGLYETRIDLSQLGGDGGSGGSSGGSSGSETPGTSESATPESSGGSSGGSSGGTLNIEDEHRLHETSKEPDVSLGSTWLSDFPQAWAETGGMGLAVRQAPLIIPLKATSTPVSIKQYPMSQEARLGIKPHIQRLLDQGILVPCQSPWNTPLLPVKKPGTNDYRPVQDLREVNKRVEDIHPTVPNPYNLLSGLPPSHQWYTVLDLKDAFFCLRLHPTSQPLFAFEWRDPEMGISGQLTWTRLPQGFKNSPTLFNEALHRDLADFRIQHPDLILLQYVDDLLLAATSELDCQQGTRALLQTLGNLGYRASAKKAQICQKQVKYLGYLLKEGQRWLTEARKETVMGQPTPKTPRQLREFLGTAGFCRLWIPGFAEMAAPLYPLTKPGTLFNWGPDQQKAYQEIKQALLTAPALGLPDLTKPFELFVDEKQGYAKGVLTQKLGPWRRPVAYLSKKLDPVAAGWPPCLRMVAAIAVLTKDAGKLTMGQPLVILAPHAVEALVKQPPDRWLSNARMTHYQALLLDTDRVQFGPVVALNPATLLPLPEEGLQHNCLDILAEAHGTRPDLTDQPLPDADHTWYTDGSSLLQEGQRKAGAAVTTETEVIWAKALPAGTSAQRAELIALTQALKMAEGKKLNVYTDSRYAFATAHIHGEIYRRRGWLTSEGKEIKNKDEILALLKALFLPKRLSIIHCPGHQKGHSAEARGNRMADQAARKAAITETPDTSTLLAGKRTADGSEFEKRTADGSEFESPKKKAKVE

SEQ ID NO: 2735 - protein, 2091 aa, synthetic construct
MPAAKRVKLDGGDKKYSIGLDIGTNSVGWAVITDEYKVPSKKFKVLGNTDRHSIKKNLIGALLFDSGETAEATRLKRTARRRYTRRKNRICYLQEIFSNEMAKVDDSFFHRLEESFLVEEDKKHERHPIFGNIVDEVAYHEKYPTIYHLRKKLVDSTDKADLRLIYLALAHMIKFRGHFLIEGDLNPDNSDVDKLFIQLVQTYNQLFEENPINASGVDAKAILSARLSKSRRLENLIAQLPGEKKNGLFGNLIALSLGLTPNFKSNFDLAEDAKLQLSKDTYDDDLDNLLAQIGDQYADLFLAAKNLSDAILLSDILRVNTEITKAPLSASMIKRYDEHHQDLTLLKALVRQQLPEKYKEIFFDQSKNGYAGYIDGGASQEEFYKFIKPILEKMDGTEELLVKLNREDLLRKQRTFDNGSIPHQIHLGELHAILRRQEDFYPFLKDNREKIEKILTFRIPYYVGPLARGNSRFAWMTRKSEETITPWNFEEVVDKGASAQSFIERMTNFDKNLPNEKVLPKHSLLYEYFTVYNELTKVKYVTEGMRKPAFLSGEQKKAIVDLLFKTNRKVTVKQLKEDYFKKIECFDSVEISGVEDRFNASLGTYHDLLKIIKDKDFLDNEENEDILEDIVLTLTLFEDREMIEERLKTYAHLFDDKVMKQLKRRRYTGWGRLSRKLINGIRDKQSGKTILDFLKSDGFANRNFMQLIHDDSLTFKEDIQKAQVSGQGDSLHEHIANLAGSPAIKKGILQTVKVVDELVKVMGRHKPENIVIEMARENQTTQKGQKNSRERMKRIEEGIKELGSQILKEHPVENTQLQNEKLYLYYLQNGRDMYVDQELDINRLSDYDVDHIVPQSFLKDDSIDNKVLTRSDKARGKSDNVPSEEVVKKMKNYWRQLLNAKLITQRKFDNLTKAERGGLSELDKAGFIKRQLVETRQITKHVAQILDSRMNTKYDENDKLIREVKVITLKSKLVSDFRKDFQFYKVREINNYHHAHDAYLNAVVGTALIKKYPKLESEFVYGDYKVYDVRKMIAKSEQEIGKATAKYFFYSNIMNFFKTEITLANGEIRKRPLIETNGETGEIVWDKGRDFATVRKVLSMPQVNIVKKTEVQTGGFSKESILPKRNSDKLIARKKDWDPKKYGGFDSPTVAYSVLVVAKVEKGKSKKLKSVKELLGITIMERSSFEKNPIDFLEAKGYKEVKKDLIIKLPKYSLFELENGRKRMLASAGELQKGNELALPSKYVNFLYLASHYEKLKGSPEDNEQKQLFVEQHKHYLDEIIEQISEFSKRVILADANLDKVLSAYNKHRDKPIREQAENIIHLFTLTNLGAPAAFKYFDTTIDRKRYTSTKEVLDATLIHQSITGLYETRIDLSQLGGDGGGGSPAPGGTLNIEDEHRLHETSKEPDVSLGSTWLSDFPQAWAETGGMGLAVRQAPLIIPLKATSTPVSIKQYPMSQEARLGIKPHIQRLLDQGILVPCQSPWNTPLLPVKKPGTNDYRPVQDLREVNKRVEDIHPTVPNPYNLLSGLPPSHQWYTVLDLKDAFFCLRLHPTSQPLFAFEWRDPEMGISGQLTWTRLPQGFKNSPTLFNEALHRDLADFRIQHPDLILLQYVDDLLLAATSELDCQQGTRALLQTLGNLGYRASAKKAQICQKQVKYLGYLLKEGQRWLTEARKETVMGQPTPKTPRQLREFLGTAGFCRLWIPGFAEMAAPLYPLTKPGTLFNWGPDQQKAYQEIKQALLTAPALGLPDLTKPFELFVDEKQGYAKGVLTQKLGPWRRPVAYLSKKLDPVAAGWPPCLRMVAAIAVLTKDAGKLTMGQPLVILAPHAVEALVKQPPDRWLSNARMTHYQALLLDTDRVQFGPVVALNPATLLPLPEEGLQHNCLDILAEAHGTRPDLTDQPLPDADHTWYTDGSSLLQEGQRKAGAAVTTETEVIWAKALPAGTSAQRAELIALTQALKMAEGKKLNVYTDSRYAFATAHIHGEIYRRRGWLTSEGKEIKNKDEILALLKALFLPKRLSIIHCPGHQKGHSAEARGNRMADQAARKAAITETPDTSTLLAGKRTADGSEFEKRTADGSEFESPKKKAKVE

SEQ ID NO: 2736 - protein, 2100 aa, synthetic construct
MPAAKRVKLDGGDKKYSIGLDIGTNSVGWAVITDEYKVPSKKFKVLGNTDRHSIKKNLIGALLFDSGETAEATRLKRTARRRYTRRKNRICYLQEIFSNEMAKVDDSFFHRLEESFLVEEDKKHERHPIFGNIVDEVAYHEKYPTIYHLRKKLVDSTDKADLRLIYLALAHMIKFRGHFLIEGDLNPDNSDVDKLFIQLVQTYNQLFEENPINASGVDAKAILSARLSKSRRLENLIAQLPGEKKNGLFGNLIALSLGLTPNFKSNFDLAEDAKLQLSKDTYDDDLDNLLAQIGDQYADLFLAAKNLSDAILLSDILRVNTEITKAPLSASMIKRYDEHHQDLTLLKALVRQQLPEKYKEIFFDQSKNGYAGYIDGGASQEEFYKFIKPILEKMDGTEELLVKLNREDLLRKQRTFDNGSIPHQIHLGELHAILRRQEDFYPFLKDNREKIEKILTFRIPYYVGPLARGNSRFAWMTRKSEETITPWNFEEVVDKGASAQSFIERMTNFDKNLPNEKVLPKHSLLYEYFTVYNELTKVKYVTEGMRKPAFLSGEQKKAIVDLLFKTNRKVTVKQLKEDYFKKIECFDSVEISGVEDRFNASLGTYHDLLKIIKDKDFLDNEENEDILEDIVLTLTLFEDREMIEERLKTYAHLFDDKVMKQLKRRRYTGWGRLSRKLINGIRDKQSGKTILDFLKSDGFANRNFMQLIHDDSLTFKEDIQKAQVSGQGDSLHEHIANLAGSPAIKKGILQTVKVVDELVKVMGRHKPENIVIEMARENQTTQKGQKNSRERMKRIEEGIKELGSQILKEHPVENTQLQNEKLYLYYLQNGRDMYVDQELDINRLSDYDVDHIVPQSFLKDDSIDNKVLTRSDKARGKSDNVPSEEVVKKMKNYWRQLLNAKLITQRKFDNLTKAERGGLSELDKAGFIKRQLVETRQITKHVAQILDSRMNTKYDENDKLIREVKVITLKSKLVSDFRKDFQFYKVREINNYHHAHDAYLNAVVGTALIKKYPKLESEFVYGDYKVYDVRKMIAKSEQEIGKATAKYFFYSNIMNFFKTEITLANGEIRKRPLIETNGETGEIVWDKGRDFATVRKVLSMPQVNIVKKTEVQTGGFSKESILPKRNSDKLIARKKDWDPKKYGGFDSPTVAYSVLVVAKVEKGKSKKLKSVKELLGITIMERSSFEKNPIDFLEAKGYKEVKKDLIIKLPKYSLFELENGRKRMLASAGELQKGNELALPSKYVNFLYLASHYEKLKGSPEDNEQKQLFVEQHKHYLDEIIEQISEFSKRVILADANLDKVLSAYNKHRDKPIREQAENIIHLFTLTNLGAPAAFKYFDTTIDRKRYTSTKEVLDATLIHQSITGLYETRIDLSQLGGDGGGGGGSGGGGSGGGGSGGTLNIEDEHRLHETSKEPDVSLGSTWLSDFPQAWAETGGMGLAVRQAPLIIPLKATSTPVSIKQYPMSQEARLGIKPHIQRLLDQGILVPCQSPWNTPLLPVKKPGTNDYRPVQDLREVNKRVEDIHPTVPNPYNLLSGLPPSHQWYTVLDLKDAFFCLRLHPTSQPLFAFEWRDPEMGISGQLTWTRLPQGFKNSPTLFNEALHRDLADFRIQHPDLILLQYVDDLLLAATSELDCQQGTRALLQTLGNLGYRASAKKAQICQKQVKYLGYLLKEGQRWLTEARKETVMGQPTPKTPRQLREFLGTAGFCRLWIPGFAEMAAPLYPLTKPGTLFNWGPDQQKAYQEIKQALLTAPALGLPDLTKPFELFVDEKQGYAKGVLTQKLGPWRRPVAYLSKKLDPVAAGWPPCLRMVAAIAVLTKDAGKLTMGQPLVILAPHAVEALVKQPPDRWLSNARMTHYQALLLDTDRVQFGPVVALNPATLLPLPEEGLQHNCLDILAEAHGTRPDLTDQPLPDADHTWYTDGSSLLQEGQRKAGAAVTTETEVIWAKALPAGTSAQRAELIALTQALKMAEGKKLNVYTDSRYAFATAHIHGEIYRRRGWLTSEGKEIKNKDEILALLKALFLPKRLSIIHCPGHQKGHSAEARGNRMADQAARKAAITETPDTSTLLAGKRTADGSEFEKRTADGSEFESPKKKAKVE

SEQ ID NO: 2737 - protein, 2093 aa, synthetic construct
MPAAKRVKLDGGDKKYSIGLDIGTNSVGWAVITDEYKVPSKKFKVLGNTDRHSIKKNLIGALLFDSGETAEATRLKRTARRRYTRRKNRICYLQEIFSNEMAKVDDSFFHRLEESFLVEEDKKHERHPIFGNIVDEVAYHEKYPTIYHLRKKLVDSTDKADLRLIYLALAHMIKFRGHFLIEGDLNPDNSDVDKLFIQLVQTYNQLFEENPINASGVDAKAILSARLSKSRRLENLIAQLPGEKKNGLFGNLIALSLGLTPNFKSNFDLAEDAKLQLSKDTYDDDLDNLLAQIGDQYADLFLAAKNLSDAILLSDILRVNTEITKAPLSASMIKRYDEHHQDLTLLKALVRQQLPEKYKEIFFDQSKNGYAGYIDGGASQEEFYKFIKPILEKMDGTEELLVKLNREDLLRKQRTFDNGSIPHQIHLGELHAILRRQEDFYPFLKDNREKIEKILTFRIPYYVGPLARGNSRFAWMTRKSEETITPWNFEEVVDKGASAQSFIERMTNFDKNLPNEKVLPKHSLLYEYFTVYNELTKVKYVTEGMRKPAFLSGEQKKAIVDLLFKTNRKVTVKQLKEDYFKKIECFDSVEISGVEDRFNASLGTYHDLLKIIKDKDFLDNEENEDILEDIVLTLTLFEDREMIEERLKTYAHLFDDKVMKQLKRRRYTGWGRLSRKLINGIRDKQSGKTILDFLKSDGFANRNFMQLIHDDSLTFKEDIQKAQVSGQGDSLHEHIANLAGSPAIKKGILQTVKVVDELVKVMGRHKPENIVIEMARENQTTQKGQKNSRERMKRIEEGIKELGSQILKEHPVENTQLQNEKLYLYYLQNGRDMYVDQELDINRLSDYDVDHIVPQSFLKDDSIDNKVLTRSDKARGKSDNVPSEEVVKKMKNYWRQLLNAKLITQRKFDNLTKAERGGLSELDKAGFIKRQLVETRQITKHVAQILDSRMNTKYDENDKLIREVKVITLKSKLVSDFRKDFQFYKVREINNYHHAHDAYLNAVVGTALIKKYPKLESEFVYGDYKVYDVRKMIAKSEQEIGKATAKYFFYSNIMNFFKTEITLANGEIRKRPLIETNGETGEIVWDKGRDFATVRKVLSMPQVNIVKKTEVQTGGFSKESILPKRNSDKLIARKKDWDPKKYGGFDSPTVAYSVLVVAKVEKGKSKKLKSVKELLGITIMERSSFEKNPIDFLEAKGYKEVKKDLIIKLPKYSLFELENGRKRMLASAGELQKGNELALPSKYVNFLYLASHYEKLKGSPEDNEQKQLFVEQHKHYLDEIIEQISEFSKRVILADANLDKVLSAYNKHRDKPIREQAENIIHLFTLTNLGAPAAFKYFDTTIDRKRYTSTKEVLDATLIHQSITGLYETRIDLSQLGGDGGEAAAKGSSGGTLNIEDEHRLHETSKEPDVSLGSTWLSDFPQAWAETGGMGLAVRQAPLIIPLKATSTPVSIKQYPMSQEARLGIKPHIQRLLDQGILVPCQSPWNTPLLPVKKPGTNDYRPVQDLREVNKRVEDIHPTVPNPYNLLSGLPPSHQWYTVLDLKDAFFCLRLHPTSQPLFAFEWRDPEMGISGQLTWTRLPQGFKNSPTLFNEALHRDLADFRIQHPDLILLQYVDDLLLAATSELDCQQGTRALLQTLGNLGYRASAKKAQICQKQVKYLGYLLKEGQRWLTEARKETVMGQPTPKTPRQLREFLGTAGFCRLWIPGFAEMAAPLYPLTKPGTLFNWGPDQQKAYQEIKQALLTAPALGLPDLTKPFELFVDEKQGYAKGVLTQKLGPWRRPVAYLSKKLDPVAAGWPPCLRMVAAIAVLTKDAGKLTMGQPLVILAPHAVEALVKQPPDRWLSNARMTHYQALLLDTDRVQFGPVVALNPATLLPLPEEGLQHNCLDILAEAHGTRPDLTDQPLPDADHTWYTDGSSLLQEGQRKAGAAVTTETEVIWAKALPAGTSAQRAELIALTQALKMAEGKKLNVYTDSRYAFATAHIHGEIYRRRGWLTSEGKEIKNKDEILALLKALFLPKRLSIIHCPGHQKGHSAEARGNRMADQAARKAAITETPDTSTLLAGKRTADGSEFEKRTADGSEFESPKKKAKVE

SEQ ID NO: 2738 - protein, 2094 aa, synthetic construct
MPAAKRVKLDGGDKKYSIGLDIGTNSVGWAVITDEYKVPSKKFKVLGNTDRHSIKKNLIGALLFDSGETAEATRLKRTARRRYTRRKNRICYLQEIFSNEMAKVDDSFFHRLEESFLVEEDKKHERHPIFGNIVDEVAYHEKYPTIYHLRKKLVDSTDKADLRLIYLALAHMIKFRGHFLIEGDLNPDNSDVDKLFIQLVQTYNQLFEENPINASGVDAKAILSARLSKSRRLENLIAQLPGEKKNGLFGNLIALSLGLTPNFKSNFDLAEDAKLQLSKDTYDDDLDNLLAQIGDQYADLFLAAKNLSDAILLSDILRVNTEITKAPLSASMIKRYDEHHQDLTLLKALVRQQLPEKYKEIFFDQSKNGYAGYIDGGASQEEFYKFIKPILEKMDGTEELLVKLNREDLLRKQRTFDNGSIPHQIHLGELHAILRRQEDFYPFLKDNREKIEKILTFRIPYYVGPLARGNSRFAWMTRKSEETITPWNFEEVVDKGASAQSFIERMTNFDKNLPNEKVLPKHSLLYEYFTVYNELTKVKYVTEGMRKPAFLSGEQKKAIVDLLFKTNRKVTVKQLKEDYFKKIECFDSVEISGVEDRFNASLGTYHDLLKIIKDKDFLDNEENEDILEDIVLTLTLFEDREMIEERLKTYAHLFDDKVMKQLKRRRYTGWGRLSRKLINGIRDKQSGKTILDFLKSDGFANRNFMQLIHDDSLTFKEDIQKAQVSGQGDSLHEHIANLAGSPAIKKGILQTVKVVDELVKVMGRHKPENIVIEMARENQTTQKGQKNSRERMKRIEEGIKELGSQILKEHPVENTQLQNEKLYLYYLQNGRDMYVDQELDINRLSDYDVDHIVPQSFLKDDSIDNKVLTRSDKARGKSDNVPSEEVVKKMKNYWRQLLNAKLITQRKFDNLTKAERGGLSELDKAGFIKRQLVETRQITKHVAQILDSRMNTKYDENDKLIREVKVITLKSKLVSDFRKDFQFYKVREINNYHHAHDAYLNAVVGTALIKKYPKLESEFVYGDYKVYDVRKMIAKSEQEIGKATAKYFFYSNIMNFFKTEITLANGEIRKRPLIETNGETGEIVWDKGRDFATVRKVLSMPQVNIVKKTEVQTGGFSKESILPKRNSDKLIARKKDWDPKKYGGFDSPTVAYSVLVVAKVEKGKSKKLKSVKELLGITIMERSSFEKNPIDFLEAKGYKEVKKDLIIKLPKYSLFELENGRKRMLASAGELQKGNELALPSKYVNFLYLASHYEKLKGSPEDNEQKQLFVEQHKHYLDEIIEQISEFSKRVILADANLDKVLSAYNKHRDKPIREQAENIIHLFTLTNLGAPAAFKYFDTTIDRKRYTSTKEVLDATLIHQSITGLYETRIDLSQLGGDGGPAPGGGGGSGGTLNIEDEHRLHETSKEPDVSLGSTWLSDFPQAWAETGGMGLAVRQAPLIIPLKATSTPVSIKQYPMSQEARLGIKPHIQRLLDQGILVPCQSPWNTPLLPVKKPGTNDYRPVQDLREVNKRVEDIHPTVPNPYNLLSGLPPSHQWYTVLDLKDAFFCLRLHPTSQPLFAFEWRDPEMGISGQLTWTRLPQGFKNSPTLFNEALHRDLADFRIQHPDLILLQYVDDLLLAATSELDCQQGTRALLQTLGNLGYRASAKKAQICQKQVKYLGYLLKEGQRWLTEARKETVMGQPTPKTPRQLREFLGTAGFCRLWIPGFAEMAAPLYPLTKPGTLFNWGPDQQKAYQEIKQALLTAPALGLPDLTKPFELFVDEKQGYAKGVLTQKLGPWRRPVAYLSKKLDPVAAGWPPCLRMVAAIAVLTKDAGKLTMGQPLVILAPHAVEALVKQPPDRWLSNARMTHYQALLLDTDRVQFGPVVALNPATLLPLPEEGLQHNCLDILAEAHGTRPDLTDQPLPDADHTWYTDGSSLLQEGQRKAGAAVTTETEVIWAKALPAGTSAQRAELIALTQALKMAEGKKLNVYTDSRYAFATAHIHGEIYRRRGWLTSEGKEIKNKDEILALLKALFLPKRLSIIHCPGHQKGHSAEARGNRMADQAARKAAITETPDTSTLLAGKRTADGSEFEKRTADGSEFESPKKKAKVE

SEQ ID NO: 2739 - protein, 2093 aa, synthetic construct
MPAAKRVKLDGGDKKYSIGLDIGTNSVGWAVITDEYKVPSKKFKVLGNTDRHSIKKNLIGALLFDSGETAEATRLKRTARRRYTRRKNRICYLQEIFSNEMAKVDDSFFHRLEESFLVEEDKKHERHPIFGNIVDEVAYHEKYPTIYHLRKKLVDSTDKADLRLIYLALAHMIKFRGHFLIEGDLNPDNSDVDKLFIQLVQTYNQLFEENPINASGVDAKAILSARLSKSRRLENLIAQLPGEKKNGLFGNLIALSLGLTPNFKSNFDLAEDAKLQLSKDTYDDDLDNLLAQIGDQYADLFLAAKNLSDAILLSDILRVNTEITKAPLSASMIKRYDEHHQDLTLLKALVRQQLPEKYKEIFFDQSKNGYAGYIDGGASQEEFYKFIKPILEKMDGTEELLVKLNREDLLRKQRTFDNGSIPHQIHLGELHAILRRQEDFYPFLKDNREKIEKILTFRIPYYVGPLARGNSRFAWMTRKSEETITPWNFEEVVDKGASAQSFIERMTNFDKNLPNEKVLPKHSLLYEYFTVYNELTKVKYVTEGMRKPAFLSGEQKKAIVDLLFKTNRKVTVKQLKEDYFKKIECFDSVEISGVEDRFNASLGTYHDLLKIIKDKDFLDNEENEDILEDIVLTLTLFEDREMIEERLKTYAHLFDDKVMKQLKRRRYTGWGRLSRKLINGIRDKQSGKTILDFLKSDGFANRNFMQLIHDDSLTFKEDIQKAQVSGQGDSLHEHIANLAGSPAIKKGILQTVKVVDELVKVMGRHKPENIVIEMARENQTTQKGQKNSRERMKRIEEGIKELGSQILKEHPVENTQLQNEKLYLYYLQNGRDMYVDQELDINRLSDYDVDHIVPQSFLKDDSIDNKVLTRSDKARGKSDNVPSEEVVKKMKNYWRQLLNAKLITQRKFDNLTKAERGGLSELDKAGFIKRQLVETRQITKHVAQILDSRMNTKYDENDKLIREVKVITLKSKLVSDFRKDFQFYKVREINNYHHAHDAYLNAVVGTALIKKYPKLESEFVYGDYKVYDVRKMIAKSEQEIGKATAKYFFYSNIMNFFKTEITLANGEIRKRPLIETNGETGEIVWDKGRDFATVRKVLSMPQVNIVKKTEVQTGGFSKESILPKRNSDKLIARKKDWDPKKYGGFDSPTVAYSVLVVAKVEKGKSKKLKSVKELLGITIMERSSFEKNPIDFLEAKGYKEVKKDLIIKLPKYSLFELENGRKRMLASAGELQKGNELALPSKYVNFLYLASHYEKLKGSPEDNEQKQLFVEQHKHYLDEIIEQISEFSKRVILADANLDKVLSAYNKHRDKPIREQAENIIHLFTLTNLGAPAAFKYFDTTIDRKRYTSTKEVLDATLIHQSITGLYETRIDLSQLGGDGGGGGGGGGGGGTLNIEDEHRLHETSKEPDVSLGSTWLSDFPQAWAETGGMGLAVRQAPLIIPLKATSTPVSIKQYPMSQEARLGIKPHIQRLLDQGILVPCQSPWNTPLLPVKKPGTNDYRPVQDLREVNKRVEDIHPTVPNPYNLLSGLPPSHQWYTVLDLKDAFFCLRLHPTSQPLFAFEWRDPEMGISGQLTWTRLPQGFKNSPTLFNEALHRDLADFRIQHPDLILLQYVDDLLLAATSELDCQQGTRALLQTLGNLGYRASAKKAQICQKQVKYLGYLLKEGQRWLTEARKETVMGQPTPKTPRQLREFLGTAGFCRLWIPGFAEMAAPLYPLTKPGTLFNWGPDQQKAYQEIKQALLTAPALGLPDLTKPFELFVDEKQGYAKGVLTQKLGPWRRPVAYLSKKLDPVAAGWPPCLRMVAAIAVLTKDAGKLTMGQPLVILAPHAVEALVKQPPDRWLSNARMTHYQALLLDTDRVQFGPVVALNPATLLPLPEEGLQHNCLDILAEAHGTRPDLTDQPLPDADHTWYTDGSSLLQEGQRKAGAAVTTETEVIWAKALPAGTSAQRAELIALTQALKMAEGKKLNVYTDSRYAFATAHIHGEIYRRRGWLTSEGKEIKNKDEILALLKALFLPKRLSIIHCPGHQKGHSAEARGNRMADQAARKAAITETPDTSTLLAGKRTADGSEFEKRTADGSEFESPKKKAKVE

SEQ ID NO: 2740 - protein, 2093 aa, synthetic construct
MPAAKRVKLDGGDKKYSIGLDIGTNSVGWAVITDEYKVPSKKFKVLGNTDRHSIKKNLIGALLFDSGETAEATRLKRTARRRYTRRKNRICYLQEIFSNEMAKVDDSFFHRLEESFLVEEDKKHERHPIFGNIVDEVAYHEKYPTIYHLRKKLVDSTDKADLRLIYLALAHMIKFRGHFLIEGDLNPDNSDVDKLFIQLVQTYNQLFEENPINASGVDAKAILSARLSKSRRLENLIAQLPGEKKNGLFGNLIALSLGLTPNFKSNFDLAEDAKLQLSKDTYDDDLDNLLAQIGDQYADLFLAAKNLSDAILLSDILRVNTEITKAPLSASMIKRYDEHHQDLTLLKALVRQQLPEKYKEIFFDQSKNGYAGYIDGGASQEEFYKFIKPILEKMDGTEELLVKLNREDLLRKQRTFDNGSIPHQIHLGELHAILRRQEDFYPFLKDNREKIEKILTFRIPYYVGPLARGNSRFAWMTRKSEETITPWNFEEVVDKGASAQSFIERMTNFDKNLPNEKVLPKHSLLYEYFTVYNELTKVKYVTEGMRKPAFLSGEQKKAIVDLLFKTNRKVTVKQLKEDYFKKIECFDSVEISGVEDRFNASLGTYHDLLKIIKDKDFLDNEENEDILEDIVLTLTLFEDREMIEERLKTYAHLFDDKVMKQLKRRRYTGWGRLSRKLINGIRDKQSGKTILDFLKSDGFANRNFMQLIHDDSLTFKEDIQKAQVSGQGDSLHEHIANLAGSPAIKKGILQTVKVVDELVKVMGRHKPENIVIEMARENQTTQKGQKNSRERMKRIEEGIKELGSQILKEHPVENTQLQNEKLYLYYLQNGRDMYVDQELDINRLSDYDVDHIVPQSFLKDDSIDNKVLTRSDKARGKSDNVPSEEVVKKMKNYWRQLLNAKLITQRKFDNLTKAERGGLSELDKAGFIKRQLVETRQITKHVAQILDSRMNTKYDENDKLIREVKVITLKSKLVSDFRKDFQFYKVREINNYHHAHDAYLNAVVGTALIKKYPKLESEFVYGDYKVYDVRKMIAKSEQEIGKATAKYFFYSNIMNFFKTEITLANGEIRKRPLIETNGETGEIVWDKGRDFATVRKVLSMPQVNIVKKTEVQTGGFSKESILPKRNSDKLIARKKDWDPKKYGGFDSPTVAYSVLVVAKVEKGKSKKLKSVKELLGITIMERSSFEKNPIDFLEAKGYKEVKKDLIIKLPKYSLFELENGRKRMLASAGELQKGNELALPSKYVNFLYLASHYEKLKGSPEDNEQKQLFVEQHKHYLDEIIEQISEFSKRVILADANLDKVLSAYNKHRDKPIREQAENIIHLFTLTNLGAPAAFKYFDTTIDRKRYTSTKEVLDATLIHQSITGLYETRIDLSQLGGDGGPAPEAAAKGGTLNIEDEHRLHETSKEPDVSLGSTWLSDFPQAWAETGGMGLAVRQAPLIIPLKATSTPVSIKQYPMSQEARLGIKPHIQRLLDQGILVPCQSPWNTPLLPVKKPGTNDYRPVQDLREVNKRVEDIHPTVPNPYNLLSGLPPSHQWYTVLDLKDAFFCLRLHPTSQPLFAFEWRDPEMGISGQLTWTRLPQGFKNSPTLFNEALHRDLADFRIQHPDLILLQYVDDLLLAATSELDCQQGTRALLQTLGNLGYRASAKKAQICQKQVKYLGYLLKEGQRWLTEARKETVMGQPTPKTPRQLREFLGTAGFCRLWIPGFAEMAAPLYPLTKPGTLFNWGPDQQKAYQEIKQALLTAPALGLPDLTKPFELFVDEKQGYAKGVLTQKLGPWRRPVAYLSKKLDPVAAGWPPCLRMVAAIAVLTKDAGKLTMGQPLVILAPHAVEALVKQPPDRWLSNARMTHYQALLLDTDRVQFGPVVALNPATLLPLPEEGLQHNCLDILAEAHGTRPDLTDQPLPDADHTWYTDGSSLLQEGQRKAGAAVTTETEVIWAKALPAGTSAQRAELIALTQALKMAEGKKLNVYTDSRYAFATAHIHGEIYRRRGWLTSEGKEIKNKDEILALLKALFLPKRLSIIHCPGHQKGHSAEARGNRMADQAARKAAITETPDTSTLLAGKRTADGSEFEKRTADGSEFESPKKKAKVE

SEQ ID NO: 2741 - protein, 2115 aa, synthetic construct
MPAAKRVKLDGGDKKYSIGLDIGTNSVGWAVITDEYKVPSKKFKVLGNTDRHSIKKNLIGALLFDSGETAEATRLKRTARRRYTRRKNRICYLQEIFSNEMAKVDDSFFHRLEESFLVEEDKKHERHPIFGNIVDEVAYHEKYPTIYHLRKKLVDSTDKADLRLIYLALAHMIKFRGHFLIEGDLNPDNSDVDKLFIQLVQTYNQLFEENPINASGVDAKAILSARLSKSRRLENLIAQLPGEKKNGLFGNLIALSLGLTPNFKSNFDLAEDAKLQLSKDTYDDDLDNLLAQIGDQYADLFLAAKNLSDAILLSDILRVNTEITKAPLSASMIKRYDEHHQDLTLLKALVRQQLPEKYKEIFFDQSKNGYAGYIDGGASQEEFYKFIKPILEKMDGTEELLVKLNREDLLRKQRTFDNGSIPHQIHLGELHAILRRQEDFYPFLKDNREKIEKILTFRIPYYVGPLARGNSRFAWMTRKSEETITPWNFEEVVDKGASAQSFIERMTNFDKNLPNEKVLPKHSLLYEYFTVYNELTKVKYVTEGMRKPAFLSGEQKKAIVDLLFKTNRKVTVKQLKEDYFKKIECFDSVEISGVEDRFNASLGTYHDLLKIIKDKDFLDNEENEDILEDIVLTLTLFEDREMIEERLKTYAHLFDDKVMKQLKRRRYTGWGRLSRKLINGIRDKQSGKTILDFLKSDGFANRNFMQLIHDDSLTFKEDIQKAQVSGQGDSLHEHIANLAGSPAIKKGILQTVKVVDELVKVMGRHKPENIVIEMARENQTTQKGQKNSRERMKRIEEGIKELGSQILKEHPVENTQLQNEKLYLYYLQNGRDMYVDQELDINRLSDYDVDHIVPQSFLKDDSIDNKVLTRSDKARGKSDNVPSEEVVKKMKNYWRQLLNAKLITQRKFDNLTKAERGGLSELDKAGFIKRQLVETRQITKHVAQILDSRMNTKYDENDKLIREVKVITLKSKLVSDFRKDFQFYKVREINNYHHAHDAYLNAVVGTALIKKYPKLESEFVYGDYKVYDVRKMIAKSEQEIGKATAKYFFYSNIMNFFKTEITLANGEIRKRPLIETNGETGEIVWDKGRDFATVRKVLSMPQVNIVKKTEVQTGGFSKESILPKRNSDKLIARKKDWDPKKYGGFDSPTVAYSVLVVAKVEKGKSKKLKSVKELLGITIMERSSFEKNPIDFLEAKGYKEVKKDLIIKLPKYSLFELENGRKRMLASAGELQKGNELALPSKYVNFLYLASHYEKLKGSPEDNEQKQLFVEQHKHYLDEIIEQISEFSKRVILADANLDKVLSAYNKHRDKPIREQAENIIHLFTLTNLGAPAAFKYFDTTIDRKRYTSTKEVLDATLIHQSITGLYETRIDLSQLGGDGGGGGGSGGGGSGGGGSGGGGSGGGGSGGGGSGGTLNIEDEHRLHETSKEPDVSLGSTWLSDFPQAWAETGGMGLAVRQAPLIIPLKATSTPVSIKQYPMSQEARLGIKPHIQRLLDQGILVPCQSPWNTPLLPVKKPGTNDYRPVQDLREVNKRVEDIHPTVPNPYNLLSGLPPSHQWYTVLDLKDAFFCLRLHPTSQPLFAFEWRDPEMGISGQLTWTRLPQGFKNSPTLFNEALHRDLADFRIQHPDLILLQYVDDLLLAATSELDCQQGTRALLQTLGNLGYRASAKKAQICQKQVKYLGYLLKEGQRWLTEARKETVMGQPTPKTPRQLREFLGTAGFCRLWIPGFAEMAAPLYPLTKPGTLFNWGPDQQKAYQEIKQALLTAPALGLPDLTKPFELFVDEKQGYAKGVLTQKLGPWRRPVAYLSKKLDPVAAGWPPCLRMVAAIAVLTKDAGKLTMGQPLVILAPHAVEALVKQPPDRWLSNARMTHYQALLLDTDRVQFGPVVALNPATLLPLPEEGLQHNCLDILAEAHGTRPDLTDQPLPDADHTWYTDGSSLLQEGQRKAGAAVTTETEVIWAKALPAGTSAQRAELIALTQALKMAEGKKLNVYTDSRYAFATAHIHGEIYRRRGWLTSEGKEIKNKDEILALLKALFLPKRLSIIHCPGHQKGHSAEARGNRMADQAARKAAITETPDTSTLLAGKRTADGSEFEKRTADGSEFESPKKKAKVE

SEQ ID NO: 2742 - protein, 2094 aa, synthetic construct
MPAAKRVKLDGGDKKYSIGLDIGTNSVGWAVITDEYKVPSKKFKVLGNTDRHSIKKNLIGALLFDSGETAEATRLKRTARRRYTRRKNRICYLQEIFSNEMAKVDDSFFHRLEESFLVEEDKKHERHPIFGNIVDEVAYHEKYPTIYHLRKKLVDSTDKADLRLIYLALAHMIKFRGHFLIEGDLNPDNSDVDKLFIQLVQTYNQLFEENPINASGVDAKAILSARLSKSRRLENLIAQLPGEKKNGLFGNLIALSLGLTPNFKSNFDLAEDAKLQLSKDTYDDDLDNLLAQIGDQYADLFLAAKNLSDAILLSDILRVNTEITKAPLSASMIKRYDEHHQDLTLLKALVRQQLPEKYKEIFFDQSKNGYAGYIDGGASQEEFYKFIKPILEKMDGTEELLVKLNREDLLRKQRTFDNGSIPHQIHLGELHAILRRQEDFYPFLKDNREKIEKILTFRIPYYVGPLARGNSRFAWMTRKSEETITPWNFEEVVDKGASAQSFIERMTNFDKNLPNEKVLPKHSLLYEYFTVYNELTKVKYVTEGMRKPAFLSGEQKKAIVDLLFKTNRKVTVKQLKEDYFKKIECFDSVEISGVEDRFNASLGTYHDLLKIIKDKDFLDNEENEDILEDIVLTLTLFEDREMIEERLKTYAHLFDDKVMKQLKRRRYTGWGRLSRKLINGIRDKQSGKTILDFLKSDGFANRNFMQLIHDDSLTFKEDIQKAQVSGQGDSLHEHIANLAGSPAIKKGILQTVKVVDELVKVMGRHKPENIVIEMARENQTTQKGQKNSRERMKRIEEGIKELGSQILKEHPVENTQLQNEKLYLYYLQNGRDMYVDQELDINRLSDYDVDHIVPQSFLKDDSIDNKVLTRSDKARGKSDNVPSEEVVKKMKNYWRQLLNAKLITQRKFDNLTKAERGGLSELDKAGFIKRQLVETRQITKHVAQILDSRMNTKYDENDKLIREVKVITLKSKLVSDFRKDFQFYKVREINNYHHAHDAYLNAVVGTALIKKYPKLESEFVYGDYKVYDVRKMIAKSEQEIGKATAKYFFYSNIMNFFKTEITLANGEIRKRPLIETNGETGEIVWDKGRDFATVRKVLSMPQVNIVKKTEVQTGGFSKESILPKRNSDKLIARKKDWDPKKYGGFDSPTVAYSVLVVAKVEKGKSKKLKSVKELLGITIMERSSFEKNPIDFLEAKGYKEVKKDLIIKLPKYSLFELENGRKRMLASAGELQKGNELALPSKYVNFLYLASHYEKLKGSPEDNEQKQLFVEQHKHYLDEIIEQISEFSKRVILADANLDKVLSAYNKHRDKPIREQAENIIHLFTLTNLGAPAAFKYFDTTIDRKRYTSTKEVLDATLIHQSITGLYETRIDLSQLGGDGGGGGPAPGGSGGTLNIEDEHRLHETSKEPDVSLGSTWLSDFPQAWAETGGMGLAVRQAPLIIPLKATSTPVSIKQYPMSQEARLGIKPHIQRLLDQGILVPCQSPWNTPLLPVKKPGTNDYRPVQDLREVNKRVEDIHPTVPNPYNLLSGLPPSHQWYTVLDLKDAFFCLRLHPTSQPLFAFEWRDPEMGISGQLTWTRLPQGFKNSPTLFNEALHRDLADFRIQHPDLILLQYVDDLLLAATSELDCQQGTRALLQTLGNLGYRASAKKAQICQKQVKYLGYLLKEGQRWLTEARKETVMGQPTPKTPRQLREFLGTAGFCRLWIPGFAEMAAPLYPLTKPGTLFNWGPDQQKAYQEIKQALLTAPALGLPDLTKPFELFVDEKQGYAKGVLTQKLGPWRRPVAYLSKKLDPVAAGWPPCLRMVAAIAVLTKDAGKLTMGQPLVILAPHAVEALVKQPPDRWLSNARMTHYQALLLDTDRVQFGPVVALNPATLLPLPEEGLQHNCLDILAEAHGTRPDLTDQPLPDADHTWYTDGSSLLQEGQRKAGAAVTTETEVIWAKALPAGTSAQRAELIALTQALKMAEGKKLNVYTDSRYAFATAHIHGEIYRRRGWLTSEGKEIKNKDEILALLKALFLPKRLSIIHCPGHQKGHSAEARGNRMADQAARKAAITETPDTSTLLAGKRTADGSEFEKRTADGSEFESPKKKAKVE

SEQ ID NO: 2743 - protein, 2091 aa, synthetic construct
MPAAKRVKLDGGDKKYSIGLDIGTNSVGWAVITDEYKVPSKKFKVLGNTDRHSIKKNLIGALLFDSGETAEATRLKRTARRRYTRRKNRICYLQEIFSNEMAKVDDSFFHRLEESFLVEEDKKHERHPIFGNIVDEVAYHEKYPTIYHLRKKLVDSTDKADLRLIYLALAHMIKFRGHFLIEGDLNPDNSDVDKLFIQLVQTYNQLFEENPINASGVDAKAILSARLSKSRRLENLIAQLPGEKKNGLFGNLIALSLGLTPNFKSNFDLAEDAKLQLSKDTYDDDLDNLLAQIGDQYADLFLAAKNLSDAILLSDILRVNTEITKAPLSASMIKRYDEHHQDLTLLKALVRQQLPEKYKEIFFDQSKNGYAGYIDGGASQEEFYKFIKPILEKMDGTEELLVKLNREDLLRKQRTFDNGSIPHQIHLGELHAILRRQEDFYPFLKDNREKIEKILTFRIPYYVGPLARGNSRFAWMTRKSEETITPWNFEEVVDKGASAQSFIERMTNFDKNLPNEKVLPKHSLLYEYFTVYNELTKVKYVTEGMRKPAFLSGEQKKAIVDLLFKTNRKVTVKQLKEDYFKKIECFDSVEISGVEDRFNASLGTYHDLLKIIKDKDFLDNEENEDILEDIVLTLTLFEDREMIEERLKTYAHLFDDKVMKQLKRRRYTGWGRLSRKLINGIRDKQSGKTILDFLKSDGFANRNFMQLIHDDSLTFKEDIQKAQVSGQGDSLHEHIANLAGSPAIKKGILQTVKVVDELVKVMGRHKPENIVIEMARENQTTQKGQKNSRERMKRIEEGIKELGSQILKEHPVENTQLQNEKLYLYYLQNGRDMYVDQELDINRLSDYDVDHIVPQSFLKDDSIDNKVLTRSDKARGKSDNVPSEEVVKKMKNYWRQLLNAKLITQRKFDNLTKAERGGLSELDKAGFIKRQLVETRQITKHVAQILDSRMNTKYDENDKLIREVKVITLKSKLVSDFRKDFQFYKVREINNYHHAHDAYLNAVVGTALIKKYPKLESEFVYGDYKVYDVRKMIAKSEQEIGKATAKYFFYSNIMNFFKTEITLANGEIRKRPLIETNGETGEIVWDKGRDFATVRKVLSMPQVNIVKKTEVQTGGFSKESILPKRNSDKLIARKKDWDPKKYGGFDSPTVAYSVLVVAKVEKGKSKKLKSVKELLGITIMERSSFEKNPIDFLEAKGYKEVKKDLIIKLPKYSLFELENGRKRMLASAGELQKGNELALPSKYVNFLYLASHYEKLKGSPEDNEQKQLFVEQHKHYLDEIIEQISEFSKRVILADANLDKVLSAYNKHRDKPIREQAENIIHLFTLTNLGAPAAFKYFDTTIDRKRYTSTKEVLDATLIHQSITGLYETRIDLSQLGGDGGPAPGGGGGTLNIEDEHRLHETSKEPDVSLGSTWLSDFPQAWAETGGMGLAVRQAPLIIPLKATSTPVSIKQYPMSQEARLGIKPHIQRLLDQGILVPCQSPWNTPLLPVKKPGTNDYRPVQDLREVNKRVEDIHPTVPNPYNLLSGLPPSHQWYTVLDLKDAFFCLRLHPTSQPLFAFEWRDPEMGISGQLTWTRLPQGFKNSPTLFNEALHRDLADFRIQHPDLILLQYVDDLLLAATSELDCQQGTRALLQTLGNLGYRASAKKAQICQKQVKYLGYLLKEGQRWLTEARKETVMGQPTPKTPRQLREFLGTAGFCRLWIPGFAEMAAPLYPLTKPGTLFNWGPDQQKAYQEIKQALLTAPALGLPDLTKPFELFVDEKQGYAKGVLTQKLGPWRRPVAYLSKKLDPVAAGWPPCLRMVAAIAVLTKDAGKLTMGQPLVILAPHAVEALVKQPPDRWLSNARMTHYQALLLDTDRVQFGPVVALNPATLLPLPEEGLQHNCLDILAEAHGTRPDLTDQPLPDADHTWYTDGSSLLQEGQRKAGAAVTTETEVIWAKALPAGTSAQRAELIALTQALKMAEGKKLNVYTDSRYAFATAHIHGEIYRRRGWLTSEGKEIKNKDEILALLKALFLPKRLSIIHCPGHQKGHSAEARGNRMADQAARKAAITETPDTSTLLAGKRTADGSEFEKRTADGSEFESPKKKAKVE

SEQ ID NO: 2744 - protein, 2096 aa, synthetic construct
MPAAKRVKLDGGDKKYSIGLDIGTNSVGWAVITDEYKVPSKKFKVLGNTDRHSIKKNLIGALLFDSGETAEATRLKRTARRRYTRRKNRICYLQEIFSNEMAKVDDSFFHRLEESFLVEEDKKHERHPIFGNIVDEVAYHEKYPTIYHLRKKLVDSTDKADLRLIYLALAHMIKFRGHFLIEGDLNPDNSDVDKLFIQLVQTYNQLFEENPINASGVDAKAILSARLSKSRRLENLIAQLPGEKKNGLFGNLIALSLGLTPNFKSNFDLAEDAKLQLSKDTYDDDLDNLLAQIGDQYADLFLAAKNLSDAILLSDILRVNTEITKAPLSASMIKRYDEHHQDLTLLKALVRQQLPEKYKEIFFDQSKNGYAGYIDGGASQEEFYKFIKPILEKMDGTEELLVKLNREDLLRKQRTFDNGSIPHQIHLGELHAILRRQEDFYPFLKDNREKIEKILTFRIPYYVGPLARGNSRFAWMTRKSEETITPWNFEEVVDKGASAQSFIERMTNFDKNLPNEKVLPKHSLLYEYFTVYNELTKVKYVTEGMRKPAFLSGEQKKAIVDLLFKTNRKVTVKQLKEDYFKKIECFDSVEISGVEDRFNASLGTYHDLLKIIKDKDFLDNEENEDILEDIVLTLTLFEDREMIEERLKTYAHLFDDKVMKQLKRRRYTGWGRLSRKLINGIRDKQSGKTILDFLKSDGFANRNFMQLIHDDSLTFKEDIQKAQVSGQGDSLHEHIANLAGSPAIKKGILQTVKVVDELVKVMGRHKPENIVIEMARENQTTQKGQKNSRERMKRIEEGIKELGSQILKEHPVENTQLQNEKLYLYYLQNGRDMYVDQELDINRLSDYDVDHIVPQSFLKDDSIDNKVLTRSDKARGKSDNVPSEEVVKKMKNYWRQLLNAKLITQRKFDNLTKAERGGLSELDKAGFIKRQLVETRQITKHVAQILDSRMNTKYDENDKLIREVKVITLKSKLVSDFRKDFQFYKVREINNYHHAHDAYLNAVVGTALIKKYPKLESEFVYGDYKVYDVRKMIAKSEQEIGKATAKYFFYSNIMNFFKTEITLANGEIRKRPLIETNGETGEIVWDKGRDFATVRKVLSMPQVNIVKKTEVQTGGFSKESILPKRNSDKLIARKKDWDPKKYGGFDSPTVAYSVLVVAKVEKGKSKKLKSVKELLGITIMERSSFEKNPIDFLEAKGYKEVKKDLIIKLPKYSLFELENGRKRMLASAGELQKGNELALPSKYVNFLYLASHYEKLKGSPEDNEQKQLFVEQHKHYLDEIIEQISEFSKRVILADANLDKVLSAYNKHRDKPIREQAENIIHLFTLTNLGAPAAFKYFDTTIDRKRYTSTKEVLDATLIHQSITGLYETRIDLSQLGGDGGGGSEAAAKPAPGGTLNIEDEHRLHETSKEPDVSLGSTWLSDFPQAWAETGGMGLAVRQAPLIIPLKATSTPVSIKQYPMSQEARLGIKPHIQRLLDQGILVPCQSPWNTPLLPVKKPGTNDYRPVQDLREVNKRVEDIHPTVPNPYNLLSGLPPSHQWYTVLDLKDAFFCLRLHPTSQPLFAFEWRDPEMGISGQLTWTRLPQGFKNSPTLFNEALHRDLADFRIQHPDLILLQYVDDLLLAATSELDCQQGTRALLQTLGNLGYRASAKKAQICQKQVKYLGYLLKEGQRWLTEARKETVMGQPTPKTPRQLREFLGTAGFCRLWIPGFAEMAAPLYPLTKPGTLFNWGPDQQKAYQEIKQALLTAPALGLPDLTKPFELFVDEKQGYAKGVLTQKLGPWRRPVAYLSKKLDPVAAGWPPCLRMVAAIAVLTKDAGKLTMGQPLVILAPHAVEALVKQPPDRWLSNARMTHYQALLLDTDRVQFGPVVALNPATLLPLPEEGLQHNCLDILAEAHGTRPDLTDQPLPDADHTWYTDGSSLLQEGQRKAGAAVTTETEVIWAKALPAGTSAQRAELIALTQALKMAEGKKLNVYTDSRYAFATAHIHGEIYRRRGWLTSEGKEIKNKDEILALLKALFLPKRLSIIHCPGHQKGHSAEARGNRMADQAARKAAITETPDTSTLLAGKRTADGSEFEKRTADGSEFESPKKKAKVE

SEQ ID NO: 2745 - protein, 2096 aa, synthetic construct
MPAAKRVKLDGGDKKYSIGLDIGTNSVGWAVITDEYKVPSKKFKVLGNTDRHSIKKNLIGALLFDSGETAEATRLKRTARRRYTRRKNRICYLQEIFSNEMAKVDDSFFHRLEESFLVEEDKKHERHPIFGNIVDEVAYHEKYPTIYHLRKKLVDSTDKADLRLIYLALAHMIKFRGHFLIEGDLNPDNSDVDKLFIQLVQTYNQLFEENPINASGVDAKAILSARLSKSRRLENLIAQLPGEKKNGLFGNLIALSLGLTPNFKSNFDLAEDAKLQLSKDTYDDDLDNLLAQIGDQYADLFLAAKNLSDAILLSDILRVNTEITKAPLSASMIKRYDEHHQDLTLLKALVRQQLPEKYKEIFFDQSKNGYAGYIDGGASQEEFYKFIKPILEKMDGTEELLVKLNREDLLRKQRTFDNGSIPHQIHLGELHAILRRQEDFYPFLKDNREKIEKILTFRIPYYVGPLARGNSRFAWMTRKSEETITPWNFEEVVDKGASAQSFIERMTNFDKNLPNEKVLPKHSLLYEYFTVYNELTKVKYVTEGMRKPAFLSGEQKKAIVDLLFKTNRKVTVKQLKEDYFKKIECFDSVEISGVEDRFNASLGTYHDLLKIIKDKDFLDNEENEDILEDIVLTLTLFEDREMIEERLKTYAHLFDDKVMKQLKRRRYTGWGRLSRKLINGIRDKQSGKTILDFLKSDGFANRNFMQLIHDDSLTFKEDIQKAQVSGQGDSLHEHIANLAGSPAIKKGILQTVKVVDELVKVMGRHKPENIVIEMARENQTTQKGQKNSRERMKRIEEGIKELGSQILKEHPVENTQLQNEKLYLYYLQNGRDMYVDQELDINRLSDYDVDHIVPQSFLKDDSIDNKVLTRSDKARGKSDNVPSEEVVKKMKNYWRQLLNAKLITQRKFDNLTKAERGGLSELDKAGFIKRQLVETRQITKHVAQILDSRMNTKYDENDKLIREVKVITLKSKLVSDFRKDFQFYKVREINNYHHAHDAYLNAVVGTALIKKYPKLESEFVYGDYKVYDVRKMIAKSEQEIGKATAKYFFYSNIMNFFKTEITLANGEIRKRPLIETNGETGEIVWDKGRDFATVRKVLSMPQVNIVKKTEVQTGGFSKESILPKRNSDKLIARKKDWDPKKYGGFDSPTVAYSVLVVAKVEKGKSKKLKSVKELLGITIMERSSFEKNPIDFLEAKGYKEVKKDLIIKLPKYSLFELENGRKRMLASAGELQKGNELALPSKYVNFLYLASHYEKLKGSPEDNEQKQLFVEQHKHYLDEIIEQISEFSKRVILADANLDKVLSAYNKHRDKPIREQAENIIHLFTLTNLGAPAAFKYFDTTIDRKRYTSTKEVLDATLIHQSITGLYETRIDLSQLGGDGGEAAAKGGGGGSGGTLNIEDEHRLHETSKEPDVSLGSTWLSDFPQAWAETGGMGLAVRQAPLIIPLKATSTPVSIKQYPMSQEARLGIKPHIQRLLDQGILVPCQSPWNTPLLPVKKPGTNDYRPVQDLREVNKRVEDIHPTVPNPYNLLSGLPPSHQWYTVLDLKDAFFCLRLHPTSQPLFAFEWRDPEMGISGQLTWTRLPQGFKNSPTLFNEALHRDLADFRIQHPDLILLQYVDDLLLAATSELDCQQGTRALLQTLGNLGYRASAKKAQICQKQVKYLGYLLKEGQRWLTEARKETVMGQPTPKTPRQLREFLGTAGFCRLWIPGFAEMAAPLYPLTKPGTLFNWGPDQQKAYQEIKQALLTAPALGLPDLTKPFELFVDEKQGYAKGVLTQKLGPWRRPVAYLSKKLDPVAAGWPPCLRMVAAIAVLTKDAGKLTMGQPLVILAPHAVEALVKQPPDRWLSNARMTHYQALLLDTDRVQFGPVVALNPATLLPLPEEGLQHNCLDILAEAHGTRPDLTDQPLPDADHTWYTDGSSLLQEGQRKAGAAVTTETEVIWAKALPAGTSAQRAELIALTQALKMAEGKKLNVYTDSRYAFATAHIHGEIYRRRGWLTSEGKEIKNKDEILALLKALFLPKRLSIIHCPGHQKGHSAEARGNRMADQAARKAAITETPDTSTLLAGKRTADGSEFEKRTADGSEFESPKKKAKVE

SEQ ID NO: 2746 - protein, 2093 aa, synthetic construct
MPAAKRVKLDGGDKKYSIGLDIGTNSVGWAVITDEYKVPSKKFKVLGNTDRHSIKKNLIGALLFDSGETAEATRLKRTARRRYTRRKNRICYLQEIFSNEMAKVDDSFFHRLEESFLVEEDKKHERHPIFGNIVDEVAYHEKYPTIYHLRKKLVDSTDKADLRLIYLALAHMIKFRGHFLIEGDLNPDNSDVDKLFIQLVQTYNQLFEENPINASGVDAKAILSARLSKSRRLENLIAQLPGEKKNGLFGNLIALSLGLTPNFKSNFDLAEDAKLQLSKDTYDDDLDNLLAQIGDQYADLFLAAKNLSDAILLSDILRVNTEITKAPLSASMIKRYDEHHQDLTLLKALVRQQLPEKYKEIFFDQSKNGYAGYIDGGASQEEFYKFIKPILEKMDGTEELLVKLNREDLLRKQRTFDNGSIPHQIHLGELHAILRRQEDFYPFLKDNREKIEKILTFRIPYYVGPLARGNSRFAWMTRKSEETITPWNFEEVVDKGASAQSFIERMTNFDKNLPNEKVLPKHSLLYEYFTVYNELTKVKYVTEGMRKPAFLSGEQKKAIVDLLFKTNRKVTVKQLKEDYFKKIECFDSVEISGVEDRFNASLGTYHDLLKIIKDKDFLDNEENEDILEDIVLTLTLFEDREMIEERLKTYAHLFDDKVMKQLKRRRYTGWGRLSRKLINGIRDKQSGKTILDFLKSDGFANRNFMQLIHDDSLTFKEDIQKAQVSGQGDSLHEHIANLAGSPAIKKGILQTVKVVDELVKVMGRHKPENIVIEMARENQTTQKGQKNSRERMKRIEEGIKELGSQILKEHPVENTQLQNEKLYLYYLQNGRDMYVDQELDINRLSDYDVDHIVPQSFLKDDSIDNKVLTRSDKARGKSDNVPSEEVVKKMKNYWRQLLNAKLITQRKFDNLTKAERGGLSELDKAGFIKRQLVETRQITKHVAQILDSRMNTKYDENDKLIREVKVITLKSKLVSDFRKDFQFYKVREINNYHHAHDAYLNAVVGTALIKKYPKLESEFVYGDYKVYDVRKMIAKSEQEIGKATAKYFFYSNIMNFFKTEITLANGEIRKRPLIETNGETGEIVWDKGRDFATVRKVLSMPQVNIVKKTEVQTGGFSKESILPKRNSDKLIARKKDWDPKKYGGFDSPTVAYSVLVVAKVEKGKSKKLKSVKELLGITIMERSSFEKNPIDFLEAKGYKEVKKDLIIKLPKYSLFELENGRKRMLASAGELQKGNELALPSKYVNFLYLASHYEKLKGSPEDNEQKQLFVEQHKHYLDEIIEQISEFSKRVILADANLDKVLSAYNKHRDKPIREQAENIIHLFTLTNLGAPAAFKYFDTTIDRKRYTSTKEVLDATLIHQSITGLYETRIDLSQLGGDGGGGGEAAAKGGTLNIEDEHRLHETSKEPDVSLGSTWLSDFPQAWAETGGMGLAVRQAPLIIPLKATSTPVSIKQYPMSQEARLGIKPHIQRLLDQGILVPCQSPWNTPLLPVKKPGTNDYRPVQDLREVNKRVEDIHPTVPNPYNLLSGLPPSHQWYTVLDLKDAFFCLRLHPTSQPLFAFEWRDPEMGISGQLTWTRLPQGFKNSPTLFNEALHRDLADFRIQHPDLILLQYVDDLLLAATSELDCQQGTRALLQTLGNLGYRASAKKAQICQKQVKYLGYLLKEGQRWLTEARKETVMGQPTPKTPRQLREFLGTAGFCRLWIPGFAEMAAPLYPLTKPGTLFNWGPDQQKAYQEIKQALLTAPALGLPDLTKPFELFVDEKQGYAKGVLTQKLGPWRRPVAYLSKKLDPVAAGWPPCLRMVAAIAVLTKDAGKLTMGQPLVILAPHAVEALVKQPPDRWLSNARMTHYQALLLDTDRVQFGPVVALNPATLLPLPEEGLQHNCLDILAEAHGTRPDLTDQPLPDADHTWYTDGSSLLQEGQRKAGAAVTTETEVIWAKALPAGTSAQRAELIALTQALKMAEGKKLNVYTDSRYAFATAHIHGEIYRRRGWLTSEGKEIKNKDEILALLKALFLPKRLSIIHCPGHQKGHSAEARGNRMADQAARKAAITETPDTSTLLAGKRTADGSEFEKRTADGSEFESPKKKAKVE

SEQ ID NO: 2747 - protein, 2096 aa, synthetic construct
MPAAKRVKLDGGDKKYSIGLDIGTNSVGWAVITDEYKVPSKKFKVLGNTDRHSIKKNLIGALLFDSGETAEATRLKRTARRRYTRRKNRICYLQEIFSNEMAKVDDSFFHRLEESFLVEEDKKHERHPIFGNIVDEVAYHEKYPTIYHLRKKLVDSTDKADLRLIYLALAHMIKFRGHFLIEGDLNPDNSDVDKLFIQLVQTYNQLFEENPINASGVDAKAILSARLSKSRRLENLIAQLPGEKKNGLFGNLIALSLGLTPNFKSNFDLAEDAKLQLSKDTYDDDLDNLLAQIGDQYADLFLAAKNLSDAILLSDILRVNTEITKAPLSASMIKRYDEHHQDLTLLKALVRQQLPEKYKEIFFDQSKNGYAGYIDGGASQEEFYKFIKPILEKMDGTEELLVKLNREDLLRKQRTFDNGSIPHQIHLGELHAILRRQEDFYPFLKDNREKIEKILTFRIPYYVGPLARGNSRFAWMTRKSEETITPWNFEEVVDKGASAQSFIERMTNFDKNLPNEKVLPKHSLLYEYFTVYNELTKVKYVTEGMRKPAFLSGEQKKAIVDLLFKTNRKVTVKQLKEDYFKKIECFDSVEISGVEDRFNASLGTYHDLLKIIKDKDFLDNEENEDILEDIVLTLTLFEDREMIEERLKTYAHLFDDKVMKQLKRRRYTGWGRLSRKLINGIRDKQSGKTILDFLKSDGFANRNFMQLIHDDSLTFKEDIQKAQVSGQGDSLHEHIANLAGSPAIKKGILQTVKVVDELVKVMGRHKPENIVIEMARENQTTQKGQKNSRERMKRIEEGIKELGSQILKEHPVENTQLQNEKLYLYYLQNGRDMYVDQELDINRLSDYDVDHIVPQSFLKDDSIDNKVLTRSDKARGKSDNVPSEEVVKKMKNYWRQLLNAKLITQRKFDNLTKAERGGLSELDKAGFIKRQLVETRQITKHVAQILDSRMNTKYDENDKLIREVKVITLKSKLVSDFRKDFQFYKVREINNYHHAHDAYLNAVVGTALIKKYPKLESEFVYGDYKVYDVRKMIAKSEQEIGKATAKYFFYSNIMNFFKTEITLANGEIRKRPLIETNGETGEIVWDKGRDFATVRKVLSMPQVNIVKKTEVQTGGFSKESILPKRNSDKLIARKKDWDPKKYGGFDSPTVAYSVLVVAKVEKGKSKKLKSVKELLGITIMERSSFEKNPIDFLEAKGYKEVKKDLIIKLPKYSLFELENGRKRMLASAGELQKGNELALPSKYVNFLYLASHYEKLKGSPEDNEQKQLFVEQHKHYLDEIIEQISEFSKRVILADANLDKVLSAYNKHRDKPIREQAENIIHLFTLTNLGAPAAFKYFDTTIDRKRYTSTKEVLDATLIHQSITGLYETRIDLSQLGGDGGGGSGSSEAAAKGGTLNIEDEHRLHETSKEPDVSLGSTWLSDFPQAWAETGGMGLAVRQAPLIIPLKATSTPVSIKQYPMSQEARLGIKPHIQRLLDQGILVPCQSPWNTPLLPVKKPGTNDYRPVQDLREVNKRVEDIHPTVPNPYNLLSGLPPSHQWYTVLDLKDAFFCLRLHPTSQPLFAFEWRDPEMGISGQLTWTRLPQGFKNSPTLFNEALHRDLADFRIQHPDLILLQYVDDLLLAATSELDCQQGTRALLQTLGNLGYRASAKKAQICQKQVKYLGYLLKEGQRWLTEARKETVMGQPTPKTPRQLREFLGTAGFCRLWIPGFAEMAAPLYPLTKPGTLFNWGPDQQKAYQEIKQALLTAPALGLPDLTKPFELFVDEKQGYAKGVLTQKLGPWRRPVAYLSKKLDPVAAGWPPCLRMVAAIAVLTKDAGKLTMGQPLVILAPHAVEALVKQPPDRWLSNARMTHYQALLLDTDRVQFGPVVALNPATLLPLPEEGLQHNCLDILAEAHGTRPDLTDQPLPDADHTWYTDGSSLLQEGQRKAGAAVTTETEVIWAKALPAGTSAQRAELIALTQALKMAEGKKLNVYTDSRYAFATAHIHGEIYRRRGWLTSEGKEIKNKDEILALLKALFLPKRLSIIHCPGHQKGHSAEARGNRMADQAARKAAITETPDTSTLLAGKRTADGSEFEKRTADGSEFESPKKKAKVE

SEQ ID NO: 2748 - protein, 2096 aa, synthetic construct
MPAAKRVKLDGGDKKYSIGLDIGTNSVGWAVITDEYKVPSKKFKVLGNTDRHSIKKNLIGALLFDSGETAEATRLKRTARRRYTRRKNRICYLQEIFSNEMAKVDDSFFHRLEESFLVEEDKKHERHPIFGNIVDEVAYHEKYPTIYHLRKKLVDSTDKADLRLIYLALAHMIKFRGHFLIEGDLNPDNSDVDKLFIQLVQTYNQLFEENPINASGVDAKAILSARLSKSRRLENLIAQLPGEKKNGLFGNLIALSLGLTPNFKSNFDLAEDAKLQLSKDTYDDDLDNLLAQIGDQYADLFLAAKNLSDAILLSDILRVNTEITKAPLSASMIKRYDEHHQDLTLLKALVRQQLPEKYKEIFFDQSKNGYAGYIDGGASQEEFYKFIKPILEKMDGTEELLVKLNREDLLRKQRTFDNGSIPHQIHLGELHAILRRQEDFYPFLKDNREKIEKILTFRIPYYVGPLARGNSRFAWMTRKSEETITPWNFEEVVDKGASAQSFIERMTNFDKNLPNEKVLPKHSLLYEYFTVYNELTKVKYVTEGMRKPAFLSGEQKKAIVDLLFKTNRKVTVKQLKEDYFKKIECFDSVEISGVEDRFNASLGTYHDLLKIIKDKDFLDNEENEDILEDIVLTLTLFEDREMIEERLKTYAHLFDDKVMKQLKRRRYTGWGRLSRKLINGIRDKQSGKTILDFLKSDGFANRNFMQLIHDDSLTFKEDIQKAQVSGQGDSLHEHIANLAGSPAIKKGILQTVKVVDELVKVMGRHKPENIVIEMARENQTTQKGQKNSRERMKRIEEGIKELGSQILKEHPVENTQLQNEKLYLYYLQNGRDMYVDQELDINRLSDYDVDHIVPQSFLKDDSIDNKVLTRSDKARGKSDNVPSEEVVKKMKNYWRQLLNAKLITQRKFDNLTKAERGGLSELDKAGFIKRQLVETRQITKHVAQILDSRMNTKYDENDKLIREVKVITLKSKLVSDFRKDFQFYKVREINNYHHAHDAYLNAVVGTALIKKYPKLESEFVYGDYKVYDVRKMIAKSEQEIGKATAKYFFYSNIMNFFKTEITLANGEIRKRPLIETNGETGEIVWDKGRDFATVRKVLSMPQVNIVKKTEVQTGGFSKESILPKRNSDKLIARKKDWDPKKYGGFDSPTVAYSVLVVAKVEKGKSKKLKSVKELLGITIMERSSFEKNPIDFLEAKGYKEVKKDLIIKLPKYSLFELENGRKRMLASAGELQKGNELALPSKYVNFLYLASHYEKLKGSPEDNEQKQLFVEQHKHYLDEIIEQISEFSKRVILADANLDKVLSAYNKHRDKPIREQAENIIHLFTLTNLGAPAAFKYFDTTIDRKRYTSTKEVLDATLIHQSITGLYETRIDLSQLGGDGGPAPGSSEAAAKGGTLNIEDEHRLHETSKEPDVSLGSTWLSDFPQAWAETGGMGLAVRQAPLIIPLKATSTPVSIKQYPMSQEARLGIKPHIQRLLDQGILVPCQSPWNTPLLPVKKPGTNDYRPVQDLREVNKRVEDIHPTVPNPYNLLSGLPPSHQWYTVLDLKDAFFCLRLHPTSQPLFAFEWRDPEMGISGQLTWTRLPQGFKNSPTLFNEALHRDLADFRIQHPDLILLQYVDDLLLAATSELDCQQGTRALLQTLGNLGYRASAKKAQICQKQVKYLGYLLKEGQRWLTEARKETVMGQPTPKTPRQLREFLGTAGFCRLWIPGFAEMAAPLYPLTKPGTLFNWGPDQQKAYQEIKQALLTAPALGLPDLTKPFELFVDEKQGYAKGVLTQKLGPWRRPVAYLSKKLDPVAAGWPPCLRMVAAIAVLTKDAGKLTMGQPLVILAPHAVEALVKQPPDRWLSNARMTHYQALLLDTDRVQFGPVVALNPATLLPLPEEGLQHNCLDILAEAHGTRPDLTDQPLPDADHTWYTDGSSLLQEGQRKAGAAVTTETEVIWAKALPAGTSAQRAELIALTQALKMAEGKKLNVYTDSRYAFATAHIHGEIYRRRGWLTSEGKEIKNKDEILALLKALFLPKRLSIIHCPGHQKGHSAEARGNRMADQAARKAAITETPDTSTLLAGKRTADGSEFEKRTADGSEFESPKKKAKVE

SEQ ID NO: 2749 - protein, 2095 aa, synthetic construct
MPAAKRVKLDGGDKKYSIGLDIGTNSVGWAVITDEYKVPSKKFKVLGNTDRHSIKKNLIGALLFDSGETAEATRLKRTARRRYTRRKNRICYLQEIFSNEMAKVDDSFFHRLEESFLVEEDKKHERHPIFGNIVDEVAYHEKYPTIYHLRKKLVDSTDKADLRLIYLALAHMIKFRGHFLIEGDLNPDNSDVDKLFIQLVQTYNQLFEENPINASGVDAKAILSARLSKSRRLENLIAQLPGEKKNGLFGNLIALSLGLTPNFKSNFDLAEDAKLQLSKDTYDDDLDNLLAQIGDQYADLFLAAKNLSDAILLSDILRVNTEITKAPLSASMIKRYDEHHQDLTLLKALVRQQLPEKYKEIFFDQSKNGYAGYIDGGASQEEFYKFIKPILEKMDGTEELLVKLNREDLLRKQRTFDNGSIPHQIHLGELHAILRRQEDFYPFLKDNREKIEKILTFRIPYYVGPLARGNSRFAWMTRKSEETITPWNFEEVVDKGASAQSFIERMTNFDKNLPNEKVLPKHSLLYEYFTVYNELTKVKYVTEGMRKPAFLSGEQKKAIVDLLFKTNRKVTVKQLKEDYFKKIECFDSVEISGVEDRFNASLGTYHDLLKIIKDKDFLDNEENEDILEDIVLTLTLFEDREMIEERLKTYAHLFDDKVMKQLKRRRYTGWGRLSRKLINGIRDKQSGKTILDFLKSDGFANRNFMQLIHDDSLTFKEDIQKAQVSGQGDSLHEHIANLAGSPAIKKGILQTVKVVDELVKVMGRHKPENIVIEMARENQTTQKGQKNSRERMKRIEEGIKELGSQILKEHPVENTQLQNEKLYLYYLQNGRDMYVDQELDINRLSDYDVDHIVPQSFLKDDSIDNKVLTRSDKARGKSDNVPSEEVVKKMKNYWRQLLNAKLITQRKFDNLTKAERGGLSELDKAGFIKRQLVETRQITKHVAQILDSRMNTKYDENDKLIREVKVITLKSKLVSDFRKDFQFYKVREINNYHHAHDAYLNAVVGTALIKKYPKLESEFVYGDYKVYDVRKMIAKSEQEIGKATAKYFFYSNIMNFFKTEITLANGEIRKRPLIETNGETGEIVWDKGRDFATVRKVLSMPQVNIVKKTEVQTGGFSKESILPKRNSDKLIARKKDWDPKKYGGFDSPTVAYSVLVVAKVEKGKSKKLKSVKELLGITIMERSSFEKNPIDFLEAKGYKEVKKDLIIKLPKYSLFELENGRKRMLASAGELQKGNELALPSKYVNFLYLASHYEKLKGSPEDNEQKQLFVEQHKHYLDEIIEQISEFSKRVILADANLDKVLSAYNKHRDKPIREQAENIIHLFTLTNLGAPAAFKYFDTTIDRKRYTSTKEVLDATLIHQSITGLYETRIDLSQLGGDGGGGGGSGGGGSGGTLNIEDEHRLHETSKEPDVSLGSTWLSDFPQAWAETGGMGLAVRQAPLIIPLKATSTPVSIKQYPMSQEARLGIKPHIQRLLDQGILVPCQSPWNTPLLPVKKPGTNDYRPVQDLREVNKRVEDIHPTVPNPYNLLSGLPPSHQWYTVLDLKDAFFCLRLHPTSQPLFAFEWRDPEMGISGQLTWTRLPQGFKNSPTLFNEALHRDLADFRIQHPDLILLQYVDDLLLAATSELDCQQGTRALLQTLGNLGYRASAKKAQICQKQVKYLGYLLKEGQRWLTEARKETVMGQPTPKTPRQLREFLGTAGFCRLWIPGFAEMAAPLYPLTKPGTLFNWGPDQQKAYQEIKQALLTAPALGLPDLTKPFELFVDEKQGYAKGVLTQKLGPWRRPVAYLSKKLDPVAAGWPPCLRMVAAIAVLTKDAGKLTMGQPLVILAPHAVEALVKQPPDRWLSNARMTHYQALLLDTDRVQFGPVVALNPATLLPLPEEGLQHNCLDILAEAHGTRPDLTDQPLPDADHTWYTDGSSLLQEGQRKAGAAVTTETEVIWAKALPAGTSAQRAELIALTQALKMAEGKKLNVYTDSRYAFATAHIHGEIYRRRGWLTSEGKEIKNKDEILALLKALFLPKRLSIIHCPGHQKGHSAEARGNRMADQAARKAAITETPDTSTLLAGKRTADGSEFEKRTADGSEFESPKKKAKVE

SEQ ID NO: 2750 - protein, 2091 aa, synthetic construct
MPAAKRVKLDGGDKKYSIGLDIGTNSVGWAVITDEYKVPSKKFKVLGNTDRHSIKKNLIGALLFDSGETAEATRLKRTARRRYTRRKNRICYLQEIFSNEMAKVDDSFFHRLEESFLVEEDKKHERHPIFGNIVDEVAYHEKYPTIYHLRKKLVDSTDKADLRLIYLALAHMIKFRGHFLIEGDLNPDNSDVDKLFIQLVQTYNQLFEENPINASGVDAKAILSARLSKSRRLENLIAQLPGEKKNGLFGNLIALSLGLTPNFKSNFDLAEDAKLQLSKDTYDDDLDNLLAQIGDQYADLFLAAKNLSDAILLSDILRVNTEITKAPLSASMIKRYDEHHQDLTLLKALVRQQLPEKYKEIFFDQSKNGYAGYIDGGASQEEFYKFIKPILEKMDGTEELLVKLNREDLLRKQRTFDNGSIPHQIHLGELHAILRRQEDFYPFLKDNREKIEKILTFRIPYYVGPLARGNSRFAWMTRKSEETITPWNFEEVVDKGASAQSFIERMTNFDKNLPNEKVLPKHSLLYEYFTVYNELTKVKYVTEGMRKPAFLSGEQKKAIVDLLFKTNRKVTVKQLKEDYFKKIECFDSVEISGVEDRFNASLGTYHDLLKIIKDKDFLDNEENEDILEDIVLTLTLFEDREMIEERLKTYAHLFDDKVMKQLKRRRYTGWGRLSRKLINGIRDKQSGKTILDFLKSDGFANRNFMQLIHDDSLTFKEDIQKAQVSGQGDSLHEHIANLAGSPAIKKGILQTVKVVDELVKVMGRHKPENIVIEMARENQTTQKGQKNSRERMKRIEEGIKELGSQILKEHPVENTQLQNEKLYLYYLQNGRDMYVDQELDINRLSDYDVDHIVPQSFLKDDSIDNKVLTRSDKARGKSDNVPSEEVVKKMKNYWRQLLNAKLITQRKFDNLTKAERGGLSELDKAGFIKRQLVETRQITKHVAQILDSRMNTKYDENDKLIREVKVITLKSKLVSDFRKDFQFYKVREINNYHHAHDAYLNAVVGTALIKKYPKLESEFVYGDYKVYDVRKMIAKSEQEIGKATAKYFFYSNIMNFFKTEITLANGEIRKRPLIETNGETGEIVWDKGRDFATVRKVLSMPQVNIVKKTEVQTGGFSKESILPKRNSDKLIARKKDWDPKKYGGFDSPTVAYSVLVVAKVEKGKSKKLKSVKELLGITIMERSSFEKNPIDFLEAKGYKEVKKDLIIKLPKYSLFELENGRKRMLASAGELQKGNELALPSKYVNFLYLASHYEKLKGSPEDNEQKQLFVEQHKHYLDEIIEQISEFSKRVILADANLDKVLSAYNKHRDKPIREQAENIIHLFTLTNLGAPAAFKYFDTTIDRKRYTSTKEVLDATLIHQSITGLYETRIDLSQLGGDGGGSSPAPGGTLNIEDEHRLHETSKEPDVSLGSTWLSDFPQAWAETGGMGLAVRQAPLIIPLKATSTPVSIKQYPMSQEARLGIKPHIQRLLDQGILVPCQSPWNTPLLPVKKPGTNDYRPVQDLREVNKRVEDIHPTVPNPYNLLSGLPPSHQWYTVLDLKDAFFCLRLHPTSQPLFAFEWRDPEMGISGQLTWTRLPQGFKNSPTLFNEALHRDLADFRIQHPDLILLQYVDDLLLAATSELDCQQGTRALLQTLGNLGYRASAKKAQICQKQVKYLGYLLKEGQRWLTEARKETVMGQPTPKTPRQLREFLGTAGFCRLWIPGFAEMAAPLYPLTKPGTLFNWGPDQQKAYQEIKQALLTAPALGLPDLTKPFELFVDEKQGYAKGVLTQKLGPWRRPVAYLSKKLDPVAAGWPPCLRMVAAIAVLTKDAGKLTMGQPLVILAPHAVEALVKQPPDRWLSNARMTHYQALLLDTDRVQFGPVVALNPATLLPLPEEGLQHNCLDILAEAHGTRPDLTDQPLPDADHTWYTDGSSLLQEGQRKAGAAVTTETEVIWAKALPAGTSAQRAELIALTQALKMAEGKKLNVYTDSRYAFATAHIHGEIYRRRGWLTSEGKEIKNKDEILALLKALFLPKRLSIIHCPGHQKGHSAEARGNRMADQAARKAAITETPDTSTLLAGKRTADGSEFEKRTADGSEFESPKKKAKVE

SEQ ID NO: 2751 - protein, 2096 aa, synthetic construct
MPAAKRVKLDGGDKKYSIGLDIGTNSVGWAVITDEYKVPSKKFKVLGNTDRHSIKKNLIGALLFDSGETAEATRLKRTARRRYTRRKNRICYLQEIFSNEMAKVDDSFFHRLEESFLVEEDKKHERHPIFGNIVDEVAYHEKYPTIYHLRKKLVDSTDKADLRLIYLALAHMIKFRGHFLIEGDLNPDNSDVDKLFIQLVQTYNQLFEENPINASGVDAKAILSARLSKSRRLENLIAQLPGEKKNGLFGNLIALSLGLTPNFKSNFDLAEDAKLQLSKDTYDDDLDNLLAQIGDQYADLFLAAKNLSDAILLSDILRVNTEITKAPLSASMIKRYDEHHQDLTLLKALVRQQLPEKYKEIFFDQSKNGYAGYIDGGASQEEFYKFIKPILEKMDGTEELLVKLNREDLLRKQRTFDNGSIPHQIHLGELHAILRRQEDFYPFLKDNREKIEKILTFRIPYYVGPLARGNSRFAWMTRKSEETITPWNFEEVVDKGASAQSFIERMTNFDKNLPNEKVLPKHSLLYEYFTVYNELTKVKYVTEGMRKPAFLSGEQKKAIVDLLFKTNRKVTVKQLKEDYFKKIECFDSVEISGVEDRFNASLGTYHDLLKIIKDKDFLDNEENEDILEDIVLTLTLFEDREMIEERLKTYAHLFDDKVMKQLKRRRYTGWGRLSRKLINGIRDKQSGKTILDFLKSDGFANRNFMQLIHDDSLTFKEDIQKAQVSGQGDSLHEHIANLAGSPAIKKGILQTVKVVDELVKVMGRHKPENIVIEMARENQTTQKGQKNSRERMKRIEEGIKELGSQILKEHPVENTQLQNEKLYLYYLQNGRDMYVDQELDINRLSDYDVDHIVPQSFLKDDSIDNKVLTRSDKARGKSDNVPSEEVVKKMKNYWRQLLNAKLITQRKFDNLTKAERGGLSELDKAGFIKRQLVETRQITKHVAQILDSRMNTKYDENDKLIREVKVITLKSKLVSDFRKDFQFYKVREINNYHHAHDAYLNAVVGTALIKKYPKLESEFVYGDYKVYDVRKMIAKSEQEIGKATAKYFFYSNIMNFFKTEITLANGEIRKRPLIETNGETGEIVWDKGRDFATVRKVLSMPQVNIVKKTEVQTGGFSKESILPKRNSDKLIARKKDWDPKKYGGFDSPTVAYSVLVVAKVEKGKSKKLKSVKELLGITIMERSSFEKNPIDFLEAKGYKEVKKDLIIKLPKYSLFELENGRKRMLASAGELQKGNELALPSKYVNFLYLASHYEKLKGSPEDNEQKQLFVEQHKHYLDEIIEQISEFSKRVILADANLDKVLSAYNKHRDKPIREQAENIIHLFTLTNLGAPAAFKYFDTTIDRKRYTSTKEVLDATLIHQSITGLYETRIDLSQLGGDGGGGSGGGEAAAKGGTLNIEDEHRLHETSKEPDVSLGSTWLSDFPQAWAETGGMGLAVRQAPLIIPLKATSTPVSIKQYPMSQEARLGIKPHIQRLLDQGILVPCQSPWNTPLLPVKKPGTNDYRPVQDLREVNKRVEDIHPTVPNPYNLLSGLPPSHQWYTVLDLKDAFFCLRLHPTSQPLFAFEWRDPEMGISGQLTWTRLPQGFKNSPTLFNEALHRDLADFRIQHPDLILLQYVDDLLLAATSELDCQQGTRALLQTLGNLGYRASAKKAQICQKQVKYLGYLLKEGQRWLTEARKETVMGQPTPKTPRQLREFLGTAGFCRLWIPGFAEMAAPLYPLTKPGTLFNWGPDQQKAYQEIKQALLTAPALGLPDLTKPFELFVDEKQGYAKGVLTQKLGPWRRPVAYLSKKLDPVAAGWPPCLRMVAAIAVLTKDAGKLTMGQPLVILAPHAVEALVKQPPDRWLSNARMTHYQALLLDTDRVQFGPVVALNPATLLPLPEEGLQHNCLDILAEAHGTRPDLTDQPLPDADHTWYTDGSSLLQEGQRKAGAAVTTETEVIWAKALPAGTSAQRAELIALTQALKMAEGKKLNVYTDSRYAFATAHIHGEIYRRRGWLTSEGKEIKNKDEILALLKALFLPKRLSIIHCPGHQKGHSAEARGNRMADQAARKAAITETPDTSTLLAGKRTADGSEFEKRTADGSEFESPKKKAKVE

SEQ ID NO: 2752 - protein, 2094 aa, synthetic construct
MPAAKRVKLDGGDKKYSIGLDIGTNSVGWAVITDEYKVPSKKFKVLGNTDRHSIKKNLIGALLFDSGETAEATRLKRTARRRYTRRKNRICYLQEIFSNEMAKVDDSFFHRLEESFLVEEDKKHERHPIFGNIVDEVAYHEKYPTIYHLRKKLVDSTDKADLRLIYLALAHMIKFRGHFLIEGDLNPDNSDVDKLFIQLVQTYNQLFEENPINASGVDAKAILSARLSKSRRLENLIAQLPGEKKNGLFGNLIALSLGLTPNFKSNFDLAEDAKLQLSKDTYDDDLDNLLAQIGDQYADLFLAAKNLSDAILLSDILRVNTEITKAPLSASMIKRYDEHHQDLTLLKALVRQQLPEKYKEIFFDQSKNGYAGYIDGGASQEEFYKFIKPILEKMDGTEELLVKLNREDLLRKQRTFDNGSIPHQIHLGELHAILRRQEDFYPFLKDNREKIEKILTFRIPYYVGPLARGNSRFAWMTRKSEETITPWNFEEVVDKGASAQSFIERMTNFDKNLPNEKVLPKHSLLYEYFTVYNELTKVKYVTEGMRKPAFLSGEQKKAIVDLLFKTNRKVTVKQLKEDYFKKIECFDSVEISGVEDRFNASLGTYHDLLKIIKDKDFLDNEENEDILEDIVLTLTLFEDREMIEERLKTYAHLFDDKVMKQLKRRRYTGWGRLSRKLINGIRDKQSGKTILDFLKSDGFANRNFMQLIHDDSLTFKEDIQKAQVSGQGDSLHEHIANLAGSPAIKKGILQTVKVVDELVKVMGRHKPENIVIEMARENQTTQKGQKNSRERMKRIEEGIKELGSQILKEHPVENTQLQNEKLYLYYLQNGRDMYVDQELDINRLSDYDVDHIVPQSFLKDDSIDNKVLTRSDKARGKSDNVPSEEVVKKMKNYWRQLLNAKLITQRKFDNLTKAERGGLSELDKAGFIKRQLVETRQITKHVAQILDSRMNTKYDENDKLIREVKVITLKSKLVSDFRKDFQFYKVREINNYHHAHDAYLNAVVGTALIKKYPKLESEFVYGDYKVYDVRKMIAKSEQEIGKATAKYFFYSNIMNFFKTEITLANGEIRKRPLIETNGETGEIVWDKGRDFATVRKVLSMPQVNIVKKTEVQTGGFSKESILPKRNSDKLIARKKDWDPKKYGGFDSPTVAYSVLVVAKVEKGKSKKLKSVKELLGITIMERSSFEKNPIDFLEAKGYKEVKKDLIIKLPKYSLFELENGRKRMLASAGELQKGNELALPSKYVNFLYLASHYEKLKGSPEDNEQKQLFVEQHKHYLDEIIEQISEFSKRVILADANLDKVLSAYNKHRDKPIREQAENIIHLFTLTNLGAPAAFKYFDTTIDRKRYTSTKEVLDATLIHQSITGLYETRIDLSQLGGDGGGGSPAPGSSGGTLNIEDEHRLHETSKEPDVSLGSTWLSDFPQAWAETGGMGLAVRQAPLIIPLKATSTPVSIKQYPMSQEARLGIKPHIQRLLDQGILVPCQSPWNTPLLPVKKPGTNDYRPVQDLREVNKRVEDIHPTVPNPYNLLSGLPPSHQWYTVLDLKDAFFCLRLHPTSQPLFAFEWRDPEMGISGQLTWTRLPQGFKNSPTLFNEALHRDLADFRIQHPDLILLQYVDDLLLAATSELDCQQGTRALLQTLGNLGYRASAKKAQICQKQVKYLGYLLKEGQRWLTEARKETVMGQPTPKTPRQLREFLGTAGFCRLWIPGFAEMAAPLYPLTKPGTLFNWGPDQQKAYQEIKQALLTAPALGLPDLTKPFELFVDEKQGYAKGVLTQKLGPWRRPVAYLSKKLDPVAAGWPPCLRMVAAIAVLTKDAGKLTMGQPLVILAPHAVEALVKQPPDRWLSNARMTHYQALLLDTDRVQFGPVVALNPATLLPLPEEGLQHNCLDILAEAHGTRPDLTDQPLPDADHTWYTDGSSLLQEGQRKAGAAVTTETEVIWAKALPAGTSAQRAELIALTQALKMAEGKKLNVYTDSRYAFATAHIHGEIYRRRGWLTSEGKEIKNKDEILALLKALFLPKRLSIIHCPGHQKGHSAEARGNRMADQAARKAAITETPDTSTLLAGKRTADGSEFEKRTADGSEFESPKKKAKVE

SEQ ID NO: 2753 - protein, 2096 aa, synthetic construct
MPAAKRVKLDGGDKKYSIGLDIGTNSVGWAVITDEYKVPSKKFKVLGNTDRHSIKKNLIGALLFDSGETAEATRLKRTARRRYTRRKNRICYLQEIFSNEMAKVDDSFFHRLEESFLVEEDKKHERHPIFGNIVDEVAYHEKYPTIYHLRKKLVDSTDKADLRLIYLALAHMIKFRGHFLIEGDLNPDNSDVDKLFIQLVQTYNQLFEENPINASGVDAKAILSARLSKSRRLENLIAQLPGEKKNGLFGNLIALSLGLTPNFKSNFDLAEDAKLQLSKDTYDDDLDNLLAQIGDQYADLFLAAKNLSDAILLSDILRVNTEITKAPLSASMIKRYDEHHQDLTLLKALVRQQLPEKYKEIFFDQSKNGYAGYIDGGASQEEFYKFIKPILEKMDGTEELLVKLNREDLLRKQRTFDNGSIPHQIHLGELHAILRRQEDFYPFLKDNREKIEKILTFRIPYYVGPLARGNSRFAWMTRKSEETITPWNFEEVVDKGASAQSFIERMTNFDKNLPNEKVLPKHSLLYEYFTVYNELTKVKYVTEGMRKPAFLSGEQKKAIVDLLFKTNRKVTVKQLKEDYFKKIECFDSVEISGVEDRFNASLGTYHDLLKIIKDKDFLDNEENEDILEDIVLTLTLFEDREMIEERLKTYAHLFDDKVMKQLKRRRYTGWGRLSRKLINGIRDKQSGKTILDFLKSDGFANRNFMQLIHDDSLTFKEDIQKAQVSGQGDSLHEHIANLAGSPAIKKGILQTVKVVDELVKVMGRHKPENIVIEMARENQTTQKGQKNSRERMKRIEEGIKELGSQILKEHPVENTQLQNEKLYLYYLQNGRDMYVDQELDINRLSDYDVDHIVPQSFLKDDSIDNKVLTRSDKARGKSDNVPSEEVVKKMKNYWRQLLNAKLITQRKFDNLTKAERGGLSELDKAGFIKRQLVETRQITKHVAQILDSRMNTKYDENDKLIREVKVITLKSKLVSDFRKDFQFYKVREINNYHHAHDAYLNAVVGTALIKKYPKLESEFVYGDYKVYDVRKMIAKSEQEIGKATAKYFFYSNIMNFFKTEITLANGEIRKRPLIETNGETGEIVWDKGRDFATVRKVLSMPQVNIVKKTEVQTGGFSKESILPKRNSDKLIARKKDWDPKKYGGFDSPTVAYSVLVVAKVEKGKSKKLKSVKELLGITIMERSSFEKNPIDFLEAKGYKEVKKDLIIKLPKYSLFELENGRKRMLASAGELQKGNELALPSKYVNFLYLASHYEKLKGSPEDNEQKQLFVEQHKHYLDEIIEQISEFSKRVILADANLDKVLSAYNKHRDKPIREQAENIIHLFTLTNLGAPAAFKYFDTTIDRKRYTSTKEVLDATLIHQSITGLYETRIDLSQLGGDGGPAPGGSEAAAKGGTLNIEDEHRLHETSKEPDVSLGSTWLSDFPQAWAETGGMGLAVRQAPLIIPLKATSTPVSIKQYPMSQEARLGIKPHIQRLLDQGILVPCQSPWNTPLLPVKKPGTNDYRPVQDLREVNKRVEDIHPTVPNPYNLLSGLPPSHQWYTVLDLKDAFFCLRLHPTSQPLFAFEWRDPEMGISGQLTWTRLPQGFKNSPTLFNEALHRDLADFRIQHPDLILLQYVDDLLLAATSELDCQQGTRALLQTLGNLGYRASAKKAQICQKQVKYLGYLLKEGQRWLTEARKETVMGQPTPKTPRQLREFLGTAGFCRLWIPGFAEMAAPLYPLTKPGTLFNWGPDQQKAYQEIKQALLTAPALGLPDLTKPFELFVDEKQGYAKGVLTQKLGPWRRPVAYLSKKLDPVAAGWPPCLRMVAAIAVLTKDAGKLTMGQPLVILAPHAVEALVKQPPDRWLSNARMTHYQALLLDTDRVQFGPVVALNPATLLPLPEEGLQHNCLDILAEAHGTRPDLTDQPLPDADHTWYTDGSSLLQEGQRKAGAAVTTETEVIWAKALPAGTSAQRAELIALTQALKMAEGKKLNVYTDSRYAFATAHIHGEIYRRRGWLTSEGKEIKNKDEILALLKALFLPKRLSIIHCPGHQKGHSAEARGNRMADQAARKAAITETPDTSTLLAGKRTADGSEFEKRTADGSEFESPKKKAKVE

SEQ ID NO: 2754 - protein, 2090 aa, synthetic construct
MPAAKRVKLDGGDKKYSIGLDIGTNSVGWAVITDEYKVPSKKFKVLGNTDRHSIKKNLIGALLFDSGETAEATRLKRTARRRYTRRKNRICYLQEIFSNEMAKVDDSFFHRLEESFLVEEDKKHERHPIFGNIVDEVAYHEKYPTIYHLRKKLVDSTDKADLRLIYLALAHMIKFRGHFLIEGDLNPDNSDVDKLFIQLVQTYNQLFEENPINASGVDAKAILSARLSKSRRLENLIAQLPGEKKNGLFGNLIALSLGLTPNFKSNFDLAEDAKLQLSKDTYDDDLDNLLAQIGDQYADLFLAAKNLSDAILLSDILRVNTEITKAPLSASMIKRYDEHHQDLTLLKALVRQQLPEKYKEIFFDQSKNGYAGYIDGGASQEEFYKFIKPILEKMDGTEELLVKLNREDLLRKQRTFDNGSIPHQIHLGELHAILRRQEDFYPFLKDNREKIEKILTFRIPYYVGPLARGNSRFAWMTRKSEETITPWNFEEVVDKGASAQSFIERMTNFDKNLPNEKVLPKHSLLYEYFTVYNELTKVKYVTEGMRKPAFLSGEQKKAIVDLLFKTNRKVTVKQLKEDYFKKIECFDSVEISGVEDRFNASLGTYHDLLKIIKDKDFLDNEENEDILEDIVLTLTLFEDREMIEERLKTYAHLFDDKVMKQLKRRRYTGWGRLSRKLINGIRDKQSGKTILDFLKSDGFANRNFMQLIHDDSLTFKEDIQKAQVSGQGDSLHEHIANLAGSPAIKKGILQTVKVVDELVKVMGRHKPENIVIEMARENQTTQKGQKNSRERMKRIEEGIKELGSQILKEHPVENTQLQNEKLYLYYLQNGRDMYVDQELDINRLSDYDVDHIVPQSFLKDDSIDNKVLTRSDKARGKSDNVPSEEVVKKMKNYWRQLLNAKLITQRKFDNLTKAERGGLSELDKAGFIKRQLVETRQITKHVAQILDSRMNTKYDENDKLIREVKVITLKSKLVSDFRKDFQFYKVREINNYHHAHDAYLNAVVGTALIKKYPKLESEFVYGDYKVYDVRKMIAKSEQEIGKATAKYFFYSNIMNFFKTEITLANGEIRKRPLIETNGETGEIVWDKGRDFATVRKVLSMPQVNIVKKTEVQTGGFSKESILPKRNSDKLIARKKDWDPKKYGGFDSPTVAYSVLVVAKVEKGKSKKLKSVKELLGITIMERSSFEKNPIDFLEAKGYKEVKKDLIIKLPKYSLFELENGRKRMLASAGELQKGNELALPSKYVNFLYLASHYEKLKGSPEDNEQKQLFVEQHKHYLDEIIEQISEFSKRVILADANLDKVLSAYNKHRDKPIREQAENIIHLFTLTNLGAPAAFKYFDTTIDRKRYTSTKEVLDATLIHQSITGLYETRIDLSQLGGDGGGGGGSGGTLNIEDEHRLHETSKEPDVSLGSTWLSDFPQAWAETGGMGLAVRQAPLIIPLKATSTPVSIKQYPMSQEARLGIKPHIQRLLDQGILVPCQSPWNTPLLPVKKPGTNDYRPVQDLREVNKRVEDIHPTVPNPYNLLSGLPPSHQWYTVLDLKDAFFCLRLHPTSQPLFAFEWRDPEMGISGQLTWTRLPQGFKNSPTLFNEALHRDLADFRIQHPDLILLQYVDDLLLAATSELDCQQGTRALLQTLGNLGYRASAKKAQICQKQVKYLGYLLKEGQRWLTEARKETVMGQPTPKTPRQLREFLGTAGFCRLWIPGFAEMAAPLYPLTKPGTLFNWGPDQQKAYQEIKQALLTAPALGLPDLTKPFELFVDEKQGYAKGVLTQKLGPWRRPVAYLSKKLDPVAAGWPPCLRMVAAIAVLTKDAGKLTMGQPLVILAPHAVEALVKQPPDRWLSNARMTHYQALLLDTDRVQFGPVVALNPATLLPLPEEGLQHNCLDILAEAHGTRPDLTDQPLPDADHTWYTDGSSLLQEGQRKAGAAVTTETEVIWAKALPAGTSAQRAELIALTQALKMAEGKKLNVYTDSRYAFATAHIHGEIYRRRGWLTSEGKEIKNKDEILALLKALFLPKRLSIIHCPGHQKGHSAEARGNRMADQAARKAAITETPDTSTLLAGKRTADGSEFEKRTADGSEFESPKKKAKVE

SEQ ID NO: 2755 - protein, 2096 aa, synthetic construct
MPAAKRVKLDGGDKKYSIGLDIGTNSVGWAVITDEYKVPSKKFKVLGNTDRHSIKKNLIGALLFDSGETAEATRLKRTARRRYTRRKNRICYLQEIFSNEMAKVDDSFFHRLEESFLVEEDKKHERHPIFGNIVDEVAYHEKYPTIYHLRKKLVDSTDKADLRLIYLALAHMIKFRGHFLIEGDLNPDNSDVDKLFIQLVQTYNQLFEENPINASGVDAKAILSARLSKSRRLENLIAQLPGEKKNGLFGNLIALSLGLTPNFKSNFDLAEDAKLQLSKDTYDDDLDNLLAQIGDQYADLFLAAKNLSDAILLSDILRVNTEITKAPLSASMIKRYDEHHQDLTLLKALVRQQLPEKYKEIFFDQSKNGYAGYIDGGASQEEFYKFIKPILEKMDGTEELLVKLNREDLLRKQRTFDNGSIPHQIHLGELHAILRRQEDFYPFLKDNREKIEKILTFRIPYYVGPLARGNSRFAWMTRKSEETITPWNFEEVVDKGASAQSFIERMTNFDKNLPNEKVLPKHSLLYEYFTVYNELTKVKYVTEGMRKPAFLSGEQKKAIVDLLFKTNRKVTVKQLKEDYFKKIECFDSVEISGVEDRFNASLGTYHDLLKIIKDKDFLDNEENEDILEDIVLTLTLFEDREMIEERLKTYAHLFDDKVMKQLKRRRYTGWGRLSRKLINGIRDKQSGKTILDFLKSDGFANRNFMQLIHDDSLTFKEDIQKAQVSGQGDSLHEHIANLAGSPAIKKGILQTVKVVDELVKVMGRHKPENIVIEMARENQTTQKGQKNSRERMKRIEEGIKELGSQILKEHPVENTQLQNEKLYLYYLQNGRDMYVDQELDINRLSDYDVDHIVPQSFLKDDSIDNKVLTRSDKARGKSDNVPSEEVVKKMKNYWRQLLNAKLITQRKFDNLTKAERGGLSELDKAGFIKRQLVETRQITKHVAQILDSRMNTKYDENDKLIREVKVITLKSKLVSDFRKDFQFYKVREINNYHHAHDAYLNAVVGTALIKKYPKLESEFVYGDYKVYDVRKMIAKSEQEIGKATAKYFFYSNIMNFFKTEITLANGEIRKRPLIETNGETGEIVWDKGRDFATVRKVLSMPQVNIVKKTEVQTGGFSKESILPKRNSDKLIARKKDWDPKKYGGFDSPTVAYSVLVVAKVEKGKSKKLKSVKELLGITIMERSSFEKNPIDFLEAKGYKEVKKDLIIKLPKYSLFELENGRKRMLASAGELQKGNELALPSKYVNFLYLASHYEKLKGSPEDNEQKQLFVEQHKHYLDEIIEQISEFSKRVILADANLDKVLSAYNKHRDKPIREQAENIIHLFTLTNLGAPAAFKYFDTTIDRKRYTSTKEVLDATLIHQSITGLYETRIDLSQLGGDGGEAAAKGGSPAPGGTLNIEDEHRLHETSKEPDVSLGSTWLSDFPQAWAETGGMGLAVRQAPLIIPLKATSTPVSIKQYPMSQEARLGIKPHIQRLLDQGILVPCQSPWNTPLLPVKKPGTNDYRPVQDLREVNKRVEDIHPTVPNPYNLLSGLPPSHQWYTVLDLKDAFFCLRLHPTSQPLFAFEWRDPEMGISGQLTWTRLPQGFKNSPTLFNEALHRDLADFRIQHPDLILLQYVDDLLLAATSELDCQQGTRALLQTLGNLGYRASAKKAQICQKQVKYLGYLLKEGQRWLTEARKETVMGQPTPKTPRQLREFLGTAGFCRLWIPGFAEMAAPLYPLTKPGTLFNWGPDQQKAYQEIKQALLTAPALGLPDLTKPFELFVDEKQGYAKGVLTQKLGPWRRPVAYLSKKLDPVAAGWPPCLRMVAAIAVLTKDAGKLTMGQPLVILAPHAVEALVKQPPDRWLSNARMTHYQALLLDTDRVQFGPVVALNPATLLPLPEEGLQHNCLDILAEAHGTRPDLTDQPLPDADHTWYTDGSSLLQEGQRKAGAAVTTETEVIWAKALPAGTSAQRAELIALTQALKMAEGKKLNVYTDSRYAFATAHIHGEIYRRRGWLTSEGKEIKNKDEILALLKALFLPKRLSIIHCPGHQKGHSAEARGNRMADQAARKAAITETPDTSTLLAGKRTADGSEFEKRTADGSEFESPKKKAKVE

SEQ ID NO: 2756 - protein, 2096 aa, synthetic construct
MPAAKRVKLDGGDKKYSIGLDIGTNSVGWAVITDEYKVPSKKFKVLGNTDRHSIKKNLIGALLFDSGETAEATRLKRTARRRYTRRKNRICYLQEIFSNEMAKVDDSFFHRLEESFLVEEDKKHERHPIFGNIVDEVAYHEKYPTIYHLRKKLVDSTDKADLRLIYLALAHMIKFRGHFLIEGDLNPDNSDVDKLFIQLVQTYNQLFEENPINASGVDAKAILSARLSKSRRLENLIAQLPGEKKNGLFGNLIALSLGLTPNFKSNFDLAEDAKLQLSKDTYDDDLDNLLAQIGDQYADLFLAAKNLSDAILLSDILRVNTEITKAPLSASMIKRYDEHHQDLTLLKALVRQQLPEKYKEIFFDQSKNGYAGYIDGGASQEEFYKFIKPILEKMDGTEELLVKLNREDLLRKQRTFDNGSIPHQIHLGELHAILRRQEDFYPFLKDNREKIEKILTFRIPYYVGPLARGNSRFAWMTRKSEETITPWNFEEVVDKGASAQSFIERMTNFDKNLPNEKVLPKHSLLYEYFTVYNELTKVKYVTEGMRKPAFLSGEQKKAIVDLLFKTNRKVTVKQLKEDYFKKIECFDSVEISGVEDRFNASLGTYHDLLKIIKDKDFLDNEENEDILEDIVLTLTLFEDREMIEERLKTYAHLFDDKVMKQLKRRRYTGWGRLSRKLINGIRDKQSGKTILDFLKSDGFANRNFMQLIHDDSLTFKEDIQKAQVSGQGDSLHEHIANLAGSPAIKKGILQTVKVVDELVKVMGRHKPENIVIEMARENQTTQKGQKNSRERMKRIEEGIKELGSQILKEHPVENTQLQNEKLYLYYLQNGRDMYVDQELDINRLSDYDVDHIVPQSFLKDDSIDNKVLTRSDKARGKSDNVPSEEVVKKMKNYWRQLLNAKLITQRKFDNLTKAERGGLSELDKAGFIKRQLVETRQITKHVAQILDSRMNTKYDENDKLIREVKVITLKSKLVSDFRKDFQFYKVREINNYHHAHDAYLNAVVGTALIKKYPKLESEFVYGDYKVYDVRKMIAKSEQEIGKATAKYFFYSNIMNFFKTEITLANGEIRKRPLIETNGETGEIVWDKGRDFATVRKVLSMPQVNIVKKTEVQTGGFSKESILPKRNSDKLIARKKDWDPKKYGGFDSPTVAYSVLVVAKVEKGKSKKLKSVKELLGITIMERSSFEKNPIDFLEAKGYKEVKKDLIIKLPKYSLFELENGRKRMLASAGELQKGNELALPSKYVNFLYLASHYEKLKGSPEDNEQKQLFVEQHKHYLDEIIEQISEFSKRVILADANLDKVLSAYNKHRDKPIREQAENIIHLFTLTNLGAPAAFKYFDTTIDRKRYTSTKEVLDATLIHQSITGLYETRIDLSQLGGDGGPAPEAAAKGGSGGTLNIEDEHRLHETSKEPDVSLGSTWLSDFPQAWAETGGMGLAVRQAPLIIPLKATSTPVSIKQYPMSQEARLGIKPHIQRLLDQGILVPCQSPWNTPLLPVKKPGTNDYRPVQDLREVNKRVEDIHPTVPNPYNLLSGLPPSHQWYTVLDLKDAFFCLRLHPTSQPLFAFEWRDPEMGISGQLTWTRLPQGFKNSPTLFNEALHRDLADFRIQHPDLILLQYVDDLLLAATSELDCQQGTRALLQTLGNLGYRASAKKAQICQKQVKYLGYLLKEGQRWLTEARKETVMGQPTPKTPRQLREFLGTAGFCRLWIPGFAEMAAPLYPLTKPGTLFNWGPDQQKAYQEIKQALLTAPALGLPDLTKPFELFVDEKQGYAKGVLTQKLGPWRRPVAYLSKKLDPVAAGWPPCLRMVAAIAVLTKDAGKLTMGQPLVILAPHAVEALVKQPPDRWLSNARMTHYQALLLDTDRVQFGPVVALNPATLLPLPEEGLQHNCLDILAEAHGTRPDLTDQPLPDADHTWYTDGSSLLQEGQRKAGAAVTTETEVIWAKALPAGTSAQRAELIALTQALKMAEGKKLNVYTDSRYAFATAHIHGEIYRRRGWLTSEGKEIKNKDEILALLKALFLPKRLSIIHCPGHQKGHSAEARGNRMADQAARKAAITETPDTSTLLAGKRTADGSEFEKRTADGSEFESPKKKAKVE

SEQ ID NO: 2757 - protein, 2094 aa, synthetic construct
MPAAKRVKLDGGDKKYSIGLDIGTNSVGWAVITDEYKVPSKKFKVLGNTDRHSIKKNLIGALLFDSGETAEATRLKRTARRRYTRRKNRICYLQEIFSNEMAKVDDSFFHRLEESFLVEEDKKHERHPIFGNIVDEVAYHEKYPTIYHLRKKLVDSTDKADLRLIYLALAHMIKFRGHFLIEGDLNPDNSDVDKLFIQLVQTYNQLFEENPINASGVDAKAILSARLSKSRRLENLIAQLPGEKKNGLFGNLIALSLGLTPNFKSNFDLAEDAKLQLSKDTYDDDLDNLLAQIGDQYADLFLAAKNLSDAILLSDILRVNTEITKAPLSASMIKRYDEHHQDLTLLKALVRQQLPEKYKEIFFDQSKNGYAGYIDGGASQEEFYKFIKPILEKMDGTEELLVKLNREDLLRKQRTFDNGSIPHQIHLGELHAILRRQEDFYPFLKDNREKIEKILTFRIPYYVGPLARGNSRFAWMTRKSEETITPWNFEEVVDKGASAQSFIERMTNFDKNLPNEKVLPKHSLLYEYFTVYNELTKVKYVTEGMRKPAFLSGEQKKAIVDLLFKTNRKVTVKQLKEDYFKKIECFDSVEISGVEDRFNASLGTYHDLLKIIKDKDFLDNEENEDILEDIVLTLTLFEDREMIEERLKTYAHLFDDKVMKQLKRRRYTGWGRLSRKLINGIRDKQSGKTILDFLKSDGFANRNFMQLIHDDSLTFKEDIQKAQVSGQGDSLHEHIANLAGSPAIKKGILQTVKVVDELVKVMGRHKPENIVIEMARENQTTQKGQKNSRERMKRIEEGIKELGSQILKEHPVENTQLQNEKLYLYYLQNGRDMYVDQELDINRLSDYDVDHIVPQSFLKDDSIDNKVLTRSDKARGKSDNVPSEEVVKKMKNYWRQLLNAKLITQRKFDNLTKAERGGLSELDKAGFIKRQLVETRQITKHVAQILDSRMNTKYDENDKLIREVKVITLKSKLVSDFRKDFQFYKVREINNYHHAHDAYLNAVVGTALIKKYPKLESEFVYGDYKVYDVRKMIAKSEQEIGKATAKYFFYSNIMNFFKTEITLANGEIRKRPLIETNGETGEIVWDKGRDFATVRKVLSMPQVNIVKKTEVQTGGFSKESILPKRNSDKLIARKKDWDPKKYGGFDSPTVAYSVLVVAKVEKGKSKKLKSVKELLGITIMERSSFEKNPIDFLEAKGYKEVKKDLIIKLPKYSLFELENGRKRMLASAGELQKGNELALPSKYVNFLYLASHYEKLKGSPEDNEQKQLFVEQHKHYLDEIIEQISEFSKRVILADANLDKVLSAYNKHRDKPIREQAENIIHLFTLTNLGAPAAFKYFDTTIDRKRYTSTKEVLDATLIHQSITGLYETRIDLSQLGGDGGPAPGSSGGSGGTLNIEDEHRLHETSKEPDVSLGSTWLSDFPQAWAETGGMGLAVRQAPLIIPLKATSTPVSIKQYPMSQEARLGIKPHIQRLLDQGILVPCQSPWNTPLLPVKKPGTNDYRPVQDLREVNKRVEDIHPTVPNPYNLLSGLPPSHQWYTVLDLKDAFFCLRLHPTSQPLFAFEWRDPEMGISGQLTWTRLPQGFKNSPTLFNEALHRDLADFRIQHPDLILLQYVDDLLLAATSELDCQQGTRALLQTLGNLGYRASAKKAQICQKQVKYLGYLLKEGQRWLTEARKETVMGQPTPKTPRQLREFLGTAGFCRLWIPGFAEMAAPLYPLTKPGTLFNWGPDQQKAYQEIKQALLTAPALGLPDLTKPFELFVDEKQGYAKGVLTQKLGPWRRPVAYLSKKLDPVAAGWPPCLRMVAAIAVLTKDAGKLTMGQPLVILAPHAVEALVKQPPDRWLSNARMTHYQALLLDTDRVQFGPVVALNPATLLPLPEEGLQHNCLDILAEAHGTRPDLTDQPLPDADHTWYTDGSSLLQEGQRKAGAAVTTETEVIWAKALPAGTSAQRAELIALTQALKMAEGKKLNVYTDSRYAFATAHIHGEIYRRRGWLTSEGKEIKNKDEILALLKALFLPKRLSIIHCPGHQKGHSAEARGNRMADQAARKAAITETPDTSTLLAGKRTADGSEFEKRTADGSEFESPKKKAKVE

SEQ ID NO: 2758 - protein, 2096 aa, synthetic construct
MPAAKRVKLDGGDKKYSIGLDIGTNSVGWAVITDEYKVPSKKFKVLGNTDRHSIKKNLIGALLFDSGETAEATRLKRTARRRYTRRKNRICYLQEIFSNEMAKVDDSFFHRLEESFLVEEDKKHERHPIFGNIVDEVAYHEKYPTIYHLRKKLVDSTDKADLRLIYLALAHMIKFRGHFLIEGDLNPDNSDVDKLFIQLVQTYNQLFEENPINASGVDAKAILSARLSKSRRLENLIAQLPGEKKNGLFGNLIALSLGLTPNFKSNFDLAEDAKLQLSKDTYDDDLDNLLAQIGDQYADLFLAAKNLSDAILLSDILRVNTEITKAPLSASMIKRYDEHHQDLTLLKALVRQQLPEKYKEIFFDQSKNGYAGYIDGGASQEEFYKFIKPILEKMDGTEELLVKLNREDLLRKQRTFDNGSIPHQIHLGELHAILRRQEDFYPFLKDNREKIEKILTFRIPYYVGPLARGNSRFAWMTRKSEETITPWNFEEVVDKGASAQSFIERMTNFDKNLPNEKVLPKHSLLYEYFTVYNELTKVKYVTEGMRKPAFLSGEQKKAIVDLLFKTNRKVTVKQLKEDYFKKIECFDSVEISGVEDRFNASLGTYHDLLKIIKDKDFLDNEENEDILEDIVLTLTLFEDREMIEERLKTYAHLFDDKVMKQLKRRRYTGWGRLSRKLINGIRDKQSGKTILDFLKSDGFANRNFMQLIHDDSLTFKEDIQKAQVSGQGDSLHEHIANLAGSPAIKKGILQTVKVVDELVKVMGRHKPENIVIEMARENQTTQKGQKNSRERMKRIEEGIKELGSQILKEHPVENTQLQNEKLYLYYLQNGRDMYVDQELDINRLSDYDVDHIVPQSFLKDDSIDNKVLTRSDKARGKSDNVPSEEVVKKMKNYWRQLLNAKLITQRKFDNLTKAERGGLSELDKAGFIKRQLVETRQITKHVAQILDSRMNTKYDENDKLIREVKVITLKSKLVSDFRKDFQFYKVREINNYHHAHDAYLNAVVGTALIKKYPKLESEFVYGDYKVYDVRKMIAKSEQEIGKATAKYFFYSNIMNFFKTEITLANGEIRKRPLIETNGETGEIVWDKGRDFATVRKVLSMPQVNIVKKTEVQTGGFSKESILPKRNSDKLIARKKDWDPKKYGGFDSPTVAYSVLVVAKVEKGKSKKLKSVKELLGITIMERSSFEKNPIDFLEAKGYKEVKKDLIIKLPKYSLFELENGRKRMLASAGELQKGNELALPSKYVNFLYLASHYEKLKGSPEDNEQKQLFVEQHKHYLDEIIEQISEFSKRVILADANLDKVLSAYNKHRDKPIREQAENIIHLFTLTNLGAPAAFKYFDTTIDRKRYTSTKEVLDATLIHQSITGLYETRIDLSQLGGDGGGSSPAPEAAAKGGTLNIEDEHRLHETSKEPDVSLGSTWLSDFPQAWAETGGMGLAVRQAPLIIPLKATSTPVSIKQYPMSQEARLGIKPHIQRLLDQGILVPCQSPWNTPLLPVKKPGTNDYRPVQDLREVNKRVEDIHPTVPNPYNLLSGLPPSHQWYTVLDLKDAFFCLRLHPTSQPLFAFEWRDPEMGISGQLTWTRLPQGFKNSPTLFNEALHRDLADFRIQHPDLILLQYVDDLLLAATSELDCQQGTRALLQTLGNLGYRASAKKAQICQKQVKYLGYLLKEGQRWLTEARKETVMGQPTPKTPRQLREFLGTAGFCRLWIPGFAEMAAPLYPLTKPGTLFNWGPDQQKAYQEIKQALLTAPALGLPDLTKPFELFVDEKQGYAKGVLTQKLGPWRRPVAYLSKKLDPVAAGWPPCLRMVAAIAVLTKDAGKLTMGQPLVILAPHAVEALVKQPPDRWLSNARMTHYQALLLDTDRVQFGPVVALNPATLLPLPEEGLQHNCLDILAEAHGTRPDLTDQPLPDADHTWYTDGSSLLQEGQRKAGAAVTTETEVIWAKALPAGTSAQRAELIALTQALKMAEGKKLNVYTDSRYAFATAHIHGEIYRRRGWLTSEGKEIKNKDEILALLKALFLPKRLSIIHCPGHQKGHSAEARGNRMADQAARKAAITETPDTSTLLAGKRTADGSEFEKRTADGSEFESPKKKAKVE

SEQ ID NO: 2759 - protein, 2096 aa, synthetic construct
MPAAKRVKLDGGDKKYSIGLDIGTNSVGWAVITDEYKVPSKKFKVLGNTDRHSIKKNLIGALLFDSGETAEATRLKRTARRRYTRRKNRICYLQEIFSNEMAKVDDSFFHRLEESFLVEEDKKHERHPIFGNIVDEVAYHEKYPTIYHLRKKLVDSTDKADLRLIYLALAHMIKFRGHFLIEGDLNPDNSDVDKLFIQLVQTYNQLFEENPINASGVDAKAILSARLSKSRRLENLIAQLPGEKKNGLFGNLIALSLGLTPNFKSNFDLAEDAKLQLSKDTYDDDLDNLLAQIGDQYADLFLAAKNLSDAILLSDILRVNTEITKAPLSASMIKRYDEHHQDLTLLKALVRQQLPEKYKEIFFDQSKNGYAGYIDGGASQEEFYKFIKPILEKMDGTEELLVKLNREDLLRKQRTFDNGSIPHQIHLGELHAILRRQEDFYPFLKDNREKIEKILTFRIPYYVGPLARGNSRFAWMTRKSEETITPWNFEEVVDKGASAQSFIERMTNFDKNLPNEKVLPKHSLLYEYFTVYNELTKVKYVTEGMRKPAFLSGEQKKAIVDLLFKTNRKVTVKQLKEDYFKKIECFDSVEISGVEDRFNASLGTYHDLLKIIKDKDFLDNEENEDILEDIVLTLTLFEDREMIEERLKTYAHLFDDKVMKQLKRRRYTGWGRLSRKLINGIRDKQSGKTILDFLKSDGFANRNFMQLIHDDSLTFKEDIQKAQVSGQGDSLHEHIANLAGSPAIKKGILQTVKVVDELVKVMGRHKPENIVIEMARENQTTQKGQKNSRERMKRIEEGIKELGSQILKEHPVENTQLQNEKLYLYYLQNGRDMYVDQELDINRLSDYDVDHIVPQSFLKDDSIDNKVLTRSDKARGKSDNVPSEEVVKKMKNYWRQLLNAKLITQRKFDNLTKAERGGLSELDKAGFIKRQLVETRQITKHVAQILDSRMNTKYDENDKLIREVKVITLKSKLVSDFRKDFQFYKVREINNYHHAHDAYLNAVVGTALIKKYPKLESEFVYGDYKVYDVRKMIAKSEQEIGKATAKYFFYSNIMNFFKTEITLANGEIRKRPLIETNGETGEIVWDKGRDFATVRKVLSMPQVNIVKKTEVQTGGFSKESILPKRNSDKLIARKKDWDPKKYGGFDSPTVAYSVLVVAKVEKGKSKKLKSVKELLGITIMERSSFEKNPIDFLEAKGYKEVKKDLIIKLPKYSLFELENGRKRMLASAGELQKGNELALPSKYVNFLYLASHYEKLKGSPEDNEQKQLFVEQHKHYLDEIIEQISEFSKRVILADANLDKVLSAYNKHRDKPIREQAENIIHLFTLTNLGAPAAFKYFDTTIDRKRYTSTKEVLDATLIHQSITGLYETRIDLSQLGGDGGPAPEAAAKGSSGGTLNIEDEHRLHETSKEPDVSLGSTWLSDFPQAWAETGGMGLAVRQAPLIIPLKATSTPVSIKQYPMSQEARLGIKPHIQRLLDQGILVPCQSPWNTPLLPVKKPGTNDYRPVQDLREVNKRVEDIHPTVPNPYNLLSGLPPSHQWYTVLDLKDAFFCLRLHPTSQPLFAFEWRDPEMGISGQLTWTRLPQGFKNSPTLFNEALHRDLADFRIQHPDLILLQYVDDLLLAATSELDCQQGTRALLQTLGNLGYRASAKKAQICQKQVKYLGYLLKEGQRWLTEARKETVMGQPTPKTPRQLREFLGTAGFCRLWIPGFAEMAAPLYPLTKPGTLFNWGPDQQKAYQEIKQALLTAPALGLPDLTKPFELFVDEKQGYAKGVLTQKLGPWRRPVAYLSKKLDPVAAGWPPCLRMVAAIAVLTKDAGKLTMGQPLVILAPHAVEALVKQPPDRWLSNARMTHYQALLLDTDRVQFGPVVALNPATLLPLPEEGLQHNCLDILAEAHGTRPDLTDQPLPDADHTWYTDGSSLLQEGQRKAGAAVTTETEVIWAKALPAGTSAQRAELIALTQALKMAEGKKLNVYTDSRYAFATAHIHGEIYRRRGWLTSEGKEIKNKDEILALLKALFLPKRLSIIHCPGHQKGHSAEARGNRMADQAARKAAITETPDTSTLLAGKRTADGSEFEKRTADGSEFESPKKKAKVE

SEQ ID NO: 2760 - protein, 2096 aa, synthetic construct
MPAAKRVKLDGGDKKYSIGLDIGTNSVGWAVITDEYKVPSKKFKVLGNTDRHSIKKNLIGALLFDSGETAEATRLKRTARRRYTRRKNRICYLQEIFSNEMAKVDDSFFHRLEESFLVEEDKKHERHPIFGNIVDEVAYHEKYPTIYHLRKKLVDSTDKADLRLIYLALAHMIKFRGHFLIEGDLNPDNSDVDKLFIQLVQTYNQLFEENPINASGVDAKAILSARLSKSRRLENLIAQLPGEKKNGLFGNLIALSLGLTPNFKSNFDLAEDAKLQLSKDTYDDDLDNLLAQIGDQYADLFLAAKNLSDAILLSDILRVNTEITKAPLSASMIKRYDEHHQDLTLLKALVRQQLPEKYKEIFFDQSKNGYAGYIDGGASQEEFYKFIKPILEKMDGTEELLVKLNREDLLRKQRTFDNGSIPHQIHLGELHAILRRQEDFYPFLKDNREKIEKILTFRIPYYVGPLARGNSRFAWMTRKSEETITPWNFEEVVDKGASAQSFIERMTNFDKNLPNEKVLPKHSLLYEYFTVYNELTKVKYVTEGMRKPAFLSGEQKKAIVDLLFKTNRKVTVKQLKEDYFKKIECFDSVEISGVEDRFNASLGTYHDLLKIIKDKDFLDNEENEDILEDIVLTLTLFEDREMIEERLKTYAHLFDDKVMKQLKRRRYTGWGRLSRKLINGIRDKQSGKTILDFLKSDGFANRNFMQLIHDDSLTFKEDIQKAQVSGQGDSLHEHIANLAGSPAIKKGILQTVKVVDELVKVMGRHKPENIVIEMARENQTTQKGQKNSRERMKRIEEGIKELGSQILKEHPVENTQLQNEKLYLYYLQNGRDMYVDQELDINRLSDYDVDHIVPQSFLKDDSIDNKVLTRSDKARGKSDNVPSEEVVKKMKNYWRQLLNAKLITQRKFDNLTKAERGGLSELDKAGFIKRQLVETRQITKHVAQILDSRMNTKYDENDKLIREVKVITLKSKLVSDFRKDFQFYKVREINNYHHAHDAYLNAVVGTALIKKYPKLESEFVYGDYKVYDVRKMIAKSEQEIGKATAKYFFYSNIMNFFKTEITLANGEIRKRPLIETNGETGEIVWDKGRDFATVRKVLSMPQVNIVKKTEVQTGGFSKESILPKRNSDKLIARKKDWDPKKYGGFDSPTVAYSVLVVAKVEKGKSKKLKSVKELLGITIMERSSFEKNPIDFLEAKGYKEVKKDLIIKLPKYSLFELENGRKRMLASAGELQKGNELALPSKYVNFLYLASHYEKLKGSPEDNEQKQLFVEQHKHYLDEIIEQISEFSKRVILADANLDKVLSAYNKHRDKPIREQAENIIHLFTLTNLGAPAAFKYFDTTIDRKRYTSTKEVLDATLIHQSITGLYETRIDLSQLGGDGGGSSGGSEAAAKGGTLNIEDEHRLHETSKEPDVSLGSTWLSDFPQAWAETGGMGLAVRQAPLIIPLKATSTPVSIKQYPMSQEARLGIKPHIQRLLDQGILVPCQSPWNTPLLPVKKPGTNDYRPVQDLREVNKRVEDIHPTVPNPYNLLSGLPPSHQWYTVLDLKDAFFCLRLHPTSQPLFAFEWRDPEMGISGQLTWTRLPQGFKNSPTLFNEALHRDLADFRIQHPDLILLQYVDDLLLAATSELDCQQGTRALLQTLGNLGYRASAKKAQICQKQVKYLGYLLKEGQRWLTEARKETVMGQPTPKTPRQLREFLGTAGFCRLWIPGFAEMAAPLYPLTKPGTLFNWGPDQQKAYQEIKQALLTAPALGLPDLTKPFELFVDEKQGYAKGVLTQKLGPWRRPVAYLSKKLDPVAAGWPPCLRMVAAIAVLTKDAGKLTMGQPLVILAPHAVEALVKQPPDRWLSNARMTHYQALLLDTDRVQFGPVVALNPATLLPLPEEGLQHNCLDILAEAHGTRPDLTDQPLPDADHTWYTDGSSLLQEGQRKAGAAVTTETEVIWAKALPAGTSAQRAELIALTQALKMAEGKKLNVYTDSRYAFATAHIHGEIYRRRGWLTSEGKEIKNKDEILALLKALFLPKRLSIIHCPGHQKGHSAEARGNRMADQAARKAAITETPDTSTLLAGKRTADGSEFEKRTADGSEFESPKKKAKVE

SEQ ID NO: 2761 - protein, 2096 aa, synthetic construct
MPAAKRVKLDGGDKKYSIGLDIGTNSVGWAVITDEYKVPSKKFKVLGNTDRHSIKKNLIGALLFDSGETAEATRLKRTARRRYTRRKNRICYLQEIFSNEMAKVDDSFFHRLEESFLVEEDKKHERHPIFGNIVDEVAYHEKYPTIYHLRKKLVDSTDKADLRLIYLALAHMIKFRGHFLIEGDLNPDNSDVDKLFIQLVQTYNQLFEENPINASGVDAKAILSARLSKSRRLENLIAQLPGEKKNGLFGNLIALSLGLTPNFKSNFDLAEDAKLQLSKDTYDDDLDNLLAQIGDQYADLFLAAKNLSDAILLSDILRVNTEITKAPLSASMIKRYDEHHQDLTLLKALVRQQLPEKYKEIFFDQSKNGYAGYIDGGASQEEFYKFIKPILEKMDGTEELLVKLNREDLLRKQRTFDNGSIPHQIHLGELHAILRRQEDFYPFLKDNREKIEKILTFRIPYYVGPLARGNSRFAWMTRKSEETITPWNFEEVVDKGASAQSFIERMTNFDKNLPNEKVLPKHSLLYEYFTVYNELTKVKYVTEGMRKPAFLSGEQKKAIVDLLFKTNRKVTVKQLKEDYFKKIECFDSVEISGVEDRFNASLGTYHDLLKIIKDKDFLDNEENEDILEDIVLTLTLFEDREMIEERLKTYAHLFDDKVMKQLKRRRYTGWGRLSRKLINGIRDKQSGKTILDFLKSDGFANRNFMQLIHDDSLTFKEDIQKAQVSGQGDSLHEHIANLAGSPAIKKGILQTVKVVDELVKVMGRHKPENIVIEMARENQTTQKGQKNSRERMKRIEEGIKELGSQILKEHPVENTQLQNEKLYLYYLQNGRDMYVDQELDINRLSDYDVDHIVPQSFLKDDSIDNKVLTRSDKARGKSDNVPSEEVVKKMKNYWRQLLNAKLITQRKFDNLTKAERGGLSELDKAGFIKRQLVETRQITKHVAQILDSRMNTKYDENDKLIREVKVITLKSKLVSDFRKDFQFYKVREINNYHHAHDAYLNAVVGTALIKKYPKLESEFVYGDYKVYDVRKMIAKSEQEIGKATAKYFFYSNIMNFFKTEITLANGEIRKRPLIETNGETGEIVWDKGRDFATVRKVLSMPQVNIVKKTEVQTGGFSKESILPKRNSDKLIARKKDWDPKKYGGFDSPTVAYSVLVVAKVEKGKSKKLKSVKELLGITIMERSSFEKNPIDFLEAKGYKEVKKDLIIKLPKYSLFELENGRKRMLASAGELQKGNELALPSKYVNFLYLASHYEKLKGSPEDNEQKQLFVEQHKHYLDEIIEQISEFSKRVILADANLDKVLSAYNKHRDKPIREQAENIIHLFTLTNLGAPAAFKYFDTTIDRKRYTSTKEVLDATLIHQSITGLYETRIDLSQLGGDGGGGSEAAAKGSSGGTLNIEDEHRLHETSKEPDVSLGSTWLSDFPQAWAETGGMGLAVRQAPLIIPLKATSTPVSIKQYPMSQEARLGIKPHIQRLLDQGILVPCQSPWNTPLLPVKKPGTNDYRPVQDLREVNKRVEDIHPTVPNPYNLLSGLPPSHQWYTVLDLKDAFFCLRLHPTSQPLFAFEWRDPEMGISGQLTWTRLPQGFKNSPTLFNEALHRDLADFRIQHPDLILLQYVDDLLLAATSELDCQQGTRALLQTLGNLGYRASAKKAQICQKQVKYLGYLLKEGQRWLTEARKETVMGQPTPKTPRQLREFLGTAGFCRLWIPGFAEMAAPLYPLTKPGTLFNWGPDQQKAYQEIKQALLTAPALGLPDLTKPFELFVDEKQGYAKGVLTQKLGPWRRPVAYLSKKLDPVAAGWPPCLRMVAAIAVLTKDAGKLTMGQPLVILAPHAVEALVKQPPDRWLSNARMTHYQALLLDTDRVQFGPVVALNPATLLPLPEEGLQHNCLDILAEAHGTRPDLTDQPLPDADHTWYTDGSSLLQEGQRKAGAAVTTETEVIWAKALPAGTSAQRAELIALTQALKMAEGKKLNVYTDSRYAFATAHIHGEIYRRRGWLTSEGKEIKNKDEILALLKALFLPKRLSIIHCPGHQKGHSAEARGNRMADQAARKAAITETPDTSTLLAGKRTADGSEFEKRTADGSEFESPKKKAKVE

SEQ ID NO: 2762 - protein, 2094 aa, synthetic construct
MPAAKRVKLDGGDKKYSIGLDIGTNSVGWAVITDEYKVPSKKFKVLGNTDRHSIKKNLIGALLFDSGETAEATRLKRTARRRYTRRKNRICYLQEIFSNEMAKVDDSFFHRLEESFLVEEDKKHERHPIFGNIVDEVAYHEKYPTIYHLRKKLVDSTDKADLRLIYLALAHMIKFRGHFLIEGDLNPDNSDVDKLFIQLVQTYNQLFEENPINASGVDAKAILSARLSKSRRLENLIAQLPGEKKNGLFGNLIALSLGLTPNFKSNFDLAEDAKLQLSKDTYDDDLDNLLAQIGDQYADLFLAAKNLSDAILLSDILRVNTEITKAPLSASMIKRYDEHHQDLTLLKALVRQQLPEKYKEIFFDQSKNGYAGYIDGGASQEEFYKFIKPILEKMDGTEELLVKLNREDLLRKQRTFDNGSIPHQIHLGELHAILRRQEDFYPFLKDNREKIEKILTFRIPYYVGPLARGNSRFAWMTRKSEETITPWNFEEVVDKGASAQSFIERMTNFDKNLPNEKVLPKHSLLYEYFTVYNELTKVKYVTEGMRKPAFLSGEQKKAIVDLLFKTNRKVTVKQLKEDYFKKIECFDSVEISGVEDRFNASLGTYHDLLKIIKDKDFLDNEENEDILEDIVLTLTLFEDREMIEERLKTYAHLFDDKVMKQLKRRRYTGWGRLSRKLINGIRDKQSGKTILDFLKSDGFANRNFMQLIHDDSLTFKEDIQKAQVSGQGDSLHEHIANLAGSPAIKKGILQTVKVVDELVKVMGRHKPENIVIEMARENQTTQKGQKNSRERMKRIEEGIKELGSQILKEHPVENTQLQNEKLYLYYLQNGRDMYVDQELDINRLSDYDVDHIVPQSFLKDDSIDNKVLTRSDKARGKSDNVPSEEVVKKMKNYWRQLLNAKLITQRKFDNLTKAERGGLSELDKAGFIKRQLVETRQITKHVAQILDSRMNTKYDENDKLIREVKVITLKSKLVSDFRKDFQFYKVREINNYHHAHDAYLNAVVGTALIKKYPKLESEFVYGDYKVYDVRKMIAKSEQEIGKATAKYFFYSNIMNFFKTEITLANGEIRKRPLIETNGETGEIVWDKGRDFATVRKVLSMPQVNIVKKTEVQTGGFSKESILPKRNSDKLIARKKDWDPKKYGGFDSPTVAYSVLVVAKVEKGKSKKLKSVKELLGITIMERSSFEKNPIDFLEAKGYKEVKKDLIIKLPKYSLFELENGRKRMLASAGELQKGNELALPSKYVNFLYLASHYEKLKGSPEDNEQKQLFVEQHKHYLDEIIEQISEFSKRVILADANLDKVLSAYNKHRDKPIREQAENIIHLFTLTNLGAPAAFKYFDTTIDRKRYTSTKEVLDATLIHQSITGLYETRIDLSQLGGDGGGGSPAPGGGGGTLNIEDEHRLHETSKEPDVSLGSTWLSDFPQAWAETGGMGLAVRQAPLIIPLKATSTPVSIKQYPMSQEARLGIKPHIQRLLDQGILVPCQSPWNTPLLPVKKPGTNDYRPVQDLREVNKRVEDIHPTVPNPYNLLSGLPPSHQWYTVLDLKDAFFCLRLHPTSQPLFAFEWRDPEMGISGQLTWTRLPQGFKNSPTLFNEALHRDLADFRIQHPDLILLQYVDDLLLAATSELDCQQGTRALLQTLGNLGYRASAKKAQICQKQVKYLGYLLKEGQRWLTEARKETVMGQPTPKTPRQLREFLGTAGFCRLWIPGFAEMAAPLYPLTKPGTLFNWGPDQQKAYQEIKQALLTAPALGLPDLTKPFELFVDEKQGYAKGVLTQKLGPWRRPVAYLSKKLDPVAAGWPPCLRMVAAIAVLTKDAGKLTMGQPLVILAPHAVEALVKQPPDRWLSNARMTHYQALLLDTDRVQFGPVVALNPATLLPLPEEGLQHNCLDILAEAHGTRPDLTDQPLPDADHTWYTDGSSLLQEGQRKAGAAVTTETEVIWAKALPAGTSAQRAELIALTQALKMAEGKKLNVYTDSRYAFATAHIHGEIYRRRGWLTSEGKEIKNKDEILALLKALFLPKRLSIIHCPGHQKGHSAEARGNRMADQAARKAAITETPDTSTLLAGKRTADGSEFEKRTADGSEFESPKKKAKVE

SEQ ID NO: 2763 - protein, 2097 aa, synthetic construct
MPAAKRVKLDGGDKKYSIGLDIGTNSVGWAVITDEYKVPSKKFKVLGNTDRHSIKKNLIGALLFDSGETAEATRLKRTARRRYTRRKNRICYLQEIFSNEMAKVDDSFFHRLEESFLVEEDKKHERHPIFGNIVDEVAYHEKYPTIYHLRKKLVDSTDKADLRLIYLALAHMIKFRGHFLIEGDLNPDNSDVDKLFIQLVQTYNQLFEENPINASGVDAKAILSARLSKSRRLENLIAQLPGEKKNGLFGNLIALSLGLTPNFKSNFDLAEDAKLQLSKDTYDDDLDNLLAQIGDQYADLFLAAKNLSDAILLSDILRVNTEITKAPLSASMIKRYDEHHQDLTLLKALVRQQLPEKYKEIFFDQSKNGYAGYIDGGASQEEFYKFIKPILEKMDGTEELLVKLNREDLLRKQRTFDNGSIPHQIHLGELHAILRRQEDFYPFLKDNREKIEKILTFRIPYYVGPLARGNSRFAWMTRKSEETITPWNFEEVVDKGASAQSFIERMTNFDKNLPNEKVLPKHSLLYEYFTVYNELTKVKYVTEGMRKPAFLSGEQKKAIVDLLFKTNRKVTVKQLKEDYFKKIECFDSVEISGVEDRFNASLGTYHDLLKIIKDKDFLDNEENEDILEDIVLTLTLFEDREMIEERLKTYAHLFDDKVMKQLKRRRYTGWGRLSRKLINGIRDKQSGKTILDFLKSDGFANRNFMQLIHDDSLTFKEDIQKAQVSGQGDSLHEHIANLAGSPAIKKGILQTVKVVDELVKVMGRHKPENIVIEMARENQTTQKGQKNSRERMKRIEEGIKELGSQILKEHPVENTQLQNEKLYLYYLQNGRDMYVDQELDINRLSDYDVDHIVPQSFLKDDSIDNKVLTRSDKARGKSDNVPSEEVVKKMKNYWRQLLNAKLITQRKFDNLTKAERGGLSELDKAGFIKRQLVETRQITKHVAQILDSRMNTKYDENDKLIREVKVITLKSKLVSDFRKDFQFYKVREINNYHHAHDAYLNAVVGTALIKKYPKLESEFVYGDYKVYDVRKMIAKSEQEIGKATAKYFFYSNIMNFFKTEITLANGEIRKRPLIETNGETGEIVWDKGRDFATVRKVLSMPQVNIVKKTEVQTGGFSKESILPKRNSDKLIARKKDWDPKKYGGFDSPTVAYSVLVVAKVEKGKSKKLKSVKELLGITIMERSSFEKNPIDFLEAKGYKEVKKDLIIKLPKYSLFELENGRKRMLASAGELQKGNELALPSKYVNFLYLASHYEKLKGSPEDNEQKQLFVEQHKHYLDEIIEQISEFSKRVILADANLDKVLSAYNKHRDKPIREQAENIIHLFTLTNLGAPAAFKYFDTTIDRKRYTSTKEVLDATLIHQSITGLYETRIDLSQLGGDGGGGSGGSGGSGGSGGTLNIEDEHRLHETSKEPDVSLGSTWLSDFPQAWAETGGMGLAVRQAPLIIPLKATSTPVSIKQYPMSQEARLGIKPHIQRLLDQGILVPCQSPWNTPLLPVKKPGTNDYRPVQDLREVNKRVEDIHPTVPNPYNLLSGLPPSHQWYTVLDLKDAFFCLRLHPTSQPLFAFEWRDPEMGISGQLTWTRLPQGFKNSPTLFNEALHRDLADFRIQHPDLILLQYVDDLLLAATSELDCQQGTRALLQTLGNLGYRASAKKAQICQKQVKYLGYLLKEGQRWLTEARKETVMGQPTPKTPRQLREFLGTAGFCRLWIPGFAEMAAPLYPLTKPGTLFNWGPDQQKAYQEIKQALLTAPALGLPDLTKPFELFVDEKQGYAKGVLTQKLGPWRRPVAYLSKKLDPVAAGWPPCLRMVAAIAVLTKDAGKLTMGQPLVILAPHAVEALVKQPPDRWLSNARMTHYQALLLDTDRVQFGPVVALNPATLLPLPEEGLQHNCLDILAEAHGTRPDLTDQPLPDADHTWYTDGSSLLQEGQRKAGAAVTTETEVIWAKALPAGTSAQRAELIALTQALKMAEGKKLNVYTDSRYAFATAHIHGEIYRRRGWLTSEGKEIKNKDEILALLKALFLPKRLSIIHCPGHQKGHSAEARGNRMADQAARKAAITETPDTSTLLAGKRTADGSEFEKRTADGSEFESPKKKAKVE

SEQ ID NO: 2764 - protein, 2096 aa, synthetic construct
MPAAKRVKLDGGDKKYSIGLDIGTNSVGWAVITDEYKVPSKKFKVLGNTDRHSIKKNLIGALLFDSGETAEATRLKRTARRRYTRRKNRICYLQEIFSNEMAKVDDSFFHRLEESFLVEEDKKHERHPIFGNIVDEVAYHEKYPTIYHLRKKLVDSTDKADLRLIYLALAHMIKFRGHFLIEGDLNPDNSDVDKLFIQLVQTYNQLFEENPINASGVDAKAILSARLSKSRRLENLIAQLPGEKKNGLFGNLIALSLGLTPNFKSNFDLAEDAKLQLSKDTYDDDLDNLLAQIGDQYADLFLAAKNLSDAILLSDILRVNTEITKAPLSASMIKRYDEHHQDLTLLKALVRQQLPEKYKEIFFDQSKNGYAGYIDGGASQEEFYKFIKPILEKMDGTEELLVKLNREDLLRKQRTFDNGSIPHQIHLGELHAILRRQEDFYPFLKDNREKIEKILTFRIPYYVGPLARGNSRFAWMTRKSEETITPWNFEEVVDKGASAQSFIERMTNFDKNLPNEKVLPKHSLLYEYFTVYNELTKVKYVTEGMRKPAFLSGEQKKAIVDLLFKTNRKVTVKQLKEDYFKKIECFDSVEISGVEDRFNASLGTYHDLLKIIKDKDFLDNEENEDILEDIVLTLTLFEDREMIEERLKTYAHLFDDKVMKQLKRRRYTGWGRLSRKLINGIRDKQSGKTILDFLKSDGFANRNFMQLIHDDSLTFKEDIQKAQVSGQGDSLHEHIANLAGSPAIKKGILQTVKVVDELVKVMGRHKPENIVIEMARENQTTQKGQKNSRERMKRIEEGIKELGSQILKEHPVENTQLQNEKLYLYYLQNGRDMYVDQELDINRLSDYDVDHIVPQSFLKDDSIDNKVLTRSDKARGKSDNVPSEEVVKKMKNYWRQLLNAKLITQRKFDNLTKAERGGLSELDKAGFIKRQLVETRQITKHVAQILDSRMNTKYDENDKLIREVKVITLKSKLVSDFRKDFQFYKVREINNYHHAHDAYLNAVVGTALIKKYPKLESEFVYGDYKVYDVRKMIAKSEQEIGKATAKYFFYSNIMNFFKTEITLANGEIRKRPLIETNGETGEIVWDKGRDFATVRKVLSMPQVNIVKKTEVQTGGFSKESILPKRNSDKLIARKKDWDPKKYGGFDSPTVAYSVLVVAKVEKGKSKKLKSVKELLGITIMERSSFEKNPIDFLEAKGYKEVKKDLIIKLPKYSLFELENGRKRMLASAGELQKGNELALPSKYVNFLYLASHYEKLKGSPEDNEQKQLFVEQHKHYLDEIIEQISEFSKRVILADANLDKVLSAYNKHRDKPIREQAENIIHLFTLTNLGAPAAFKYFDTTIDRKRYTSTKEVLDATLIHQSITGLYETRIDLSQLGGDGGGGGGSSEAAAKGGTLNIEDEHRLHETSKEPDVSLGSTWLSDFPQAWAETGGMGLAVRQAPLIIPLKATSTPVSIKQYPMSQEARLGIKPHIQRLLDQGILVPCQSPWNTPLLPVKKPGTNDYRPVQDLREVNKRVEDIHPTVPNPYNLLSGLPPSHQWYTVLDLKDAFFCLRLHPTSQPLFAFEWRDPEMGISGQLTWTRLPQGFKNSPTLFNEALHRDLADFRIQHPDLILLQYVDDLLLAATSELDCQQGTRALLQTLGNLGYRASAKKAQICQKQVKYLGYLLKEGQRWLTEARKETVMGQPTPKTPRQLREFLGTAGFCRLWIPGFAEMAAPLYPLTKPGTLFNWGPDQQKAYQEIKQALLTAPALGLPDLTKPFELFVDEKQGYAKGVLTQKLGPWRRPVAYLSKKLDPVAAGWPPCLRMVAAIAVLTKDAGKLTMGQPLVILAPHAVEALVKQPPDRWLSNARMTHYQALLLDTDRVQFGPVVALNPATLLPLPEEGLQHNCLDILAEAHGTRPDLTDQPLPDADHTWYTDGSSLLQEGQRKAGAAVTTETEVIWAKALPAGTSAQRAELIALTQALKMAEGKKLNVYTDSRYAFATAHIHGEIYRRRGWLTSEGKEIKNKDEILALLKALFLPKRLSIIHCPGHQKGHSAEARGNRMADQAARKAAITETPDTSTLLAGKRTADGSEFEKRTADGSEFESPKKKAKVE

SEQ ID NO: 2765 - protein, 2096 aa, synthetic construct
MPAAKRVKLDGGDKKYSIGLDIGTNSVGWAVITDEYKVPSKKFKVLGNTDRHSIKKNLIGALLFDSGETAEATRLKRTARRRYTRRKNRICYLQEIFSNEMAKVDDSFFHRLEESFLVEEDKKHERHPIFGNIVDEVAYHEKYPTIYHLRKKLVDSTDKADLRLIYLALAHMIKFRGHFLIEGDLNPDNSDVDKLFIQLVQTYNQLFEENPINASGVDAKAILSARLSKSRRLENLIAQLPGEKKNGLFGNLIALSLGLTPNFKSNFDLAEDAKLQLSKDTYDDDLDNLLAQIGDQYADLFLAAKNLSDAILLSDILRVNTEITKAPLSASMIKRYDEHHQDLTLLKALVRQQLPEKYKEIFFDQSKNGYAGYIDGGASQEEFYKFIKPILEKMDGTEELLVKLNREDLLRKQRTFDNGSIPHQIHLGELHAILRRQEDFYPFLKDNREKIEKILTFRIPYYVGPLARGNSRFAWMTRKSEETITPWNFEEVVDKGASAQSFIERMTNFDKNLPNEKVLPKHSLLYEYFTVYNELTKVKYVTEGMRKPAFLSGEQKKAIVDLLFKTNRKVTVKQLKEDYFKKIECFDSVEISGVEDRFNASLGTYHDLLKIIKDKDFLDNEENEDILEDIVLTLTLFEDREMIEERLKTYAHLFDDKVMKQLKRRRYTGWGRLSRKLINGIRDKQSGKTILDFLKSDGFANRNFMQLIHDDSLTFKEDIQKAQVSGQGDSLHEHIANLAGSPAIKKGILQTVKVVDELVKVMGRHKPENIVIEMARENQTTQKGQKNSRERMKRIEEGIKELGSQILKEHPVENTQLQNEKLYLYYLQNGRDMYVDQELDINRLSDYDVDHIVPQSFLKDDSIDNKVLTRSDKARGKSDNVPSEEVVKKMKNYWRQLLNAKLITQRKFDNLTKAERGGLSELDKAGFIKRQLVETRQITKHVAQILDSRMNTKYDENDKLIREVKVITLKSKLVSDFRKDFQFYKVREINNYHHAHDAYLNAVVGTALIKKYPKLESEFVYGDYKVYDVRKMIAKSEQEIGKATAKYFFYSNIMNFFKTEITLANGEIRKRPLIETNGETGEIVWDKGRDFATVRKVLSMPQVNIVKKTEVQTGGFSKESILPKRNSDKLIARKKDWDPKKYGGFDSPTVAYSVLVVAKVEKGKSKKLKSVKELLGITIMERSSFEKNPIDFLEAKGYKEVKKDLIIKLPKYSLFELENGRKRMLASAGELQKGNELALPSKYVNFLYLASHYEKLKGSPEDNEQKQLFVEQHKHYLDEIIEQISEFSKRVILADANLDKVLSAYNKHRDKPIREQAENIIHLFTLTNLGAPAAFKYFDTTIDRKRYTSTKEVLDATLIHQSITGLYETRIDLSQLGGDGGEAAAKPAPGGGGGTLNIEDEHRLHETSKEPDVSLGSTWLSDFPQAWAETGGMGLAVRQAPLIIPLKATSTPVSIKQYPMSQEARLGIKPHIQRLLDQGILVPCQSPWNTPLLPVKKPGTNDYRPVQDLREVNKRVEDIHPTVPNPYNLLSGLPPSHQWYTVLDLKDAFFCLRLHPTSQPLFAFEWRDPEMGISGQLTWTRLPQGFKNSPTLFNEALHRDLADFRIQHPDLILLQYVDDLLLAATSELDCQQGTRALLQTLGNLGYRASAKKAQICQKQVKYLGYLLKEGQRWLTEARKETVMGQPTPKTPRQLREFLGTAGFCRLWIPGFAEMAAPLYPLTKPGTLFNWGPDQQKAYQEIKQALLTAPALGLPDLTKPFELFVDEKQGYAKGVLTQKLGPWRRPVAYLSKKLDPVAAGWPPCLRMVAAIAVLTKDAGKLTMGQPLVILAPHAVEALVKQPPDRWLSNARMTHYQALLLDTDRVQFGPVVALNPATLLPLPEEGLQHNCLDILAEAHGTRPDLTDQPLPDADHTWYTDGSSLLQEGQRKAGAAVTTETEVIWAKALPAGTSAQRAELIALTQALKMAEGKKLNVYTDSRYAFATAHIHGEIYRRRGWLTSEGKEIKNKDEILALLKALFLPKRLSIIHCPGHQKGHSAEARGNRMADQAARKAAITETPDTSTLLAGKRTADGSEFEKRTADGSEFESPKKKAKVE

SEQ ID NO: 2766 - protein, 2094 aa, synthetic construct
MPAAKRVKLDGGDKKYSIGLDIGTNSVGWAVITDEYKVPSKKFKVLGNTDRHSIKKNLIGALLFDSGETAEATRLKRTARRRYTRRKNRICYLQEIFSNEMAKVDDSFFHRLEESFLVEEDKKHERHPIFGNIVDEVAYHEKYPTIYHLRKKLVDSTDKADLRLIYLALAHMIKFRGHFLIEGDLNPDNSDVDKLFIQLVQTYNQLFEENPINASGVDAKAILSARLSKSRRLENLIAQLPGEKKNGLFGNLIALSLGLTPNFKSNFDLAEDAKLQLSKDTYDDDLDNLLAQIGDQYADLFLAAKNLSDAILLSDILRVNTEITKAPLSASMIKRYDEHHQDLTLLKALVRQQLPEKYKEIFFDQSKNGYAGYIDGGASQEEFYKFIKPILEKMDGTEELLVKLNREDLLRKQRTFDNGSIPHQIHLGELHAILRRQEDFYPFLKDNREKIEKILTFRIPYYVGPLARGNSRFAWMTRKSEETITPWNFEEVVDKGASAQSFIERMTNFDKNLPNEKVLPKHSLLYEYFTVYNELTKVKYVTEGMRKPAFLSGEQKKAIVDLLFKTNRKVTVKQLKEDYFKKIECFDSVEISGVEDRFNASLGTYHDLLKIIKDKDFLDNEENEDILEDIVLTLTLFEDREMIEERLKTYAHLFDDKVMKQLKRRRYTGWGRLSRKLINGIRDKQSGKTILDFLKSDGFANRNFMQLIHDDSLTFKEDIQKAQVSGQGDSLHEHIANLAGSPAIKKGILQTVKVVDELVKVMGRHKPENIVIEMARENQTTQKGQKNSRERMKRIEEGIKELGSQILKEHPVENTQLQNEKLYLYYLQNGRDMYVDQELDINRLSDYDVDHIVPQSFLKDDSIDNKVLTRSDKARGKSDNVPSEEVVKKMKNYWRQLLNAKLITQRKFDNLTKAERGGLSELDKAGFIKRQLVETRQITKHVAQILDSRMNTKYDENDKLIREVKVITLKSKLVSDFRKDFQFYKVREINNYHHAHDAYLNAVVGTALIKKYPKLESEFVYGDYKVYDVRKMIAKSEQEIGKATAKYFFYSNIMNFFKTEITLANGEIRKRPLIETNGETGEIVWDKGRDFATVRKVLSMPQVNIVKKTEVQTGGFSKESILPKRNSDKLIARKKDWDPKKYGGFDSPTVAYSVLVVAKVEKGKSKKLKSVKELLGITIMERSSFEKNPIDFLEAKGYKEVKKDLIIKLPKYSLFELENGRKRMLASAGELQKGNELALPSKYVNFLYLASHYEKLKGSPEDNEQKQLFVEQHKHYLDEIIEQISEFSKRVILADANLDKVLSAYNKHRDKPIREQAENIIHLFTLTNLGAPAAFKYFDTTIDRKRYTSTKEVLDATLIHQSITGLYETRIDLSQLGGDGGGGSGGGPAPGGTLNIEDEHRLHETSKEPDVSLGSTWLSDFPQAWAETGGMGLAVRQAPLIIPLKATSTPVSIKQYPMSQEARLGIKPHIQRLLDQGILVPCQSPWNTPLLPVKKPGTNDYRPVQDLREVNKRVEDIHPTVPNPYNLLSGLPPSHQWYTVLDLKDAFFCLRLHPTSQPLFAFEWRDPEMGISGQLTWTRLPQGFKNSPTLFNEALHRDLADFRIQHPDLILLQYVDDLLLAATSELDCQQGTRALLQTLGNLGYRASAKKAQICQKQVKYLGYLLKEGQRWLTEARKETVMGQPTPKTPRQLREFLGTAGFCRLWIPGFAEMAAPLYPLTKPGTLFNWGPDQQKAYQEIKQALLTAPALGLPDLTKPFELFVDEKQGYAKGVLTQKLGPWRRPVAYLSKKLDPVAAGWPPCLRMVAAIAVLTKDAGKLTMGQPLVILAPHAVEALVKQPPDRWLSNARMTHYQALLLDTDRVQFGPVVALNPATLLPLPEEGLQHNCLDILAEAHGTRPDLTDQPLPDADHTWYTDGSSLLQEGQRKAGAAVTTETEVIWAKALPAGTSAQRAELIALTQALKMAEGKKLNVYTDSRYAFATAHIHGEIYRRRGWLTSEGKEIKNKDEILALLKALFLPKRLSIIHCPGHQKGHSAEARGNRMADQAARKAAITETPDTSTLLAGKRTADGSEFEKRTADGSEFESPKKKAKVE

SEQ ID NO: 2767 - protein, 2096 aa, synthetic construct
MPAAKRVKLDGGDKKYSIGLDIGTNSVGWAVITDEYKVPSKKFKVLGNTDRHSIKKNLIGALLFDSGETAEATRLKRTARRRYTRRKNRICYLQEIFSNEMAKVDDSFFHRLEESFLVEEDKKHERHPIFGNIVDEVAYHEKYPTIYHLRKKLVDSTDKADLRLIYLALAHMIKFRGHFLIEGDLNPDNSDVDKLFIQLVQTYNQLFEENPINASGVDAKAILSARLSKSRRLENLIAQLPGEKKNGLFGNLIALSLGLTPNFKSNFDLAEDAKLQLSKDTYDDDLDNLLAQIGDQYADLFLAAKNLSDAILLSDILRVNTEITKAPLSASMIKRYDEHHQDLTLLKALVRQQLPEKYKEIFFDQSKNGYAGYIDGGASQEEFYKFIKPILEKMDGTEELLVKLNREDLLRKQRTFDNGSIPHQIHLGELHAILRRQEDFYPFLKDNREKIEKILTFRIPYYVGPLARGNSRFAWMTRKSEETITPWNFEEVVDKGASAQSFIERMTNFDKNLPNEKVLPKHSLLYEYFTVYNELTKVKYVTEGMRKPAFLSGEQKKAIVDLLFKTNRKVTVKQLKEDYFKKIECFDSVEISGVEDRFNASLGTYHDLLKIIKDKDFLDNEENEDILEDIVLTLTLFEDREMIEERLKTYAHLFDDKVMKQLKRRRYTGWGRLSRKLINGIRDKQSGKTILDFLKSDGFANRNFMQLIHDDSLTFKEDIQKAQVSGQGDSLHEHIANLAGSPAIKKGILQTVKVVDELVKVMGRHKPENIVIEMARENQTTQKGQKNSRERMKRIEEGIKELGSQILKEHPVENTQLQNEKLYLYYLQNGRDMYVDQELDINRLSDYDVDHIVPQSFLKDDSIDNKVLTRSDKARGKSDNVPSEEVVKKMKNYWRQLLNAKLITQRKFDNLTKAERGGLSELDKAGFIKRQLVETRQITKHVAQILDSRMNTKYDENDKLIREVKVITLKSKLVSDFRKDFQFYKVREINNYHHAHDAYLNAVVGTALIKKYPKLESEFVYGDYKVYDVRKMIAKSEQEIGKATAKYFFYSNIMNFFKTEITLANGEIRKRPLIETNGETGEIVWDKGRDFATVRKVLSMPQVNIVKKTEVQTGGFSKESILPKRNSDKLIARKKDWDPKKYGGFDSPTVAYSVLVVAKVEKGKSKKLKSVKELLGITIMERSSFEKNPIDFLEAKGYKEVKKDLIIKLPKYSLFELENGRKRMLASAGELQKGNELALPSKYVNFLYLASHYEKLKGSPEDNEQKQLFVEQHKHYLDEIIEQISEFSKRVILADANLDKVLSAYNKHRDKPIREQAENIIHLFTLTNLGAPAAFKYFDTTIDRKRYTSTKEVLDATLIHQSITGLYETRIDLSQLGGDGGEAAAKGGSGGGGGTLNIEDEHRLHETSKEPDVSLGSTWLSDFPQAWAETGGMGLAVRQAPLIIPLKATSTPVSIKQYPMSQEARLGIKPHIQRLLDQGILVPCQSPWNTPLLPVKKPGTNDYRPVQDLREVNKRVEDIHPTVPNPYNLLSGLPPSHQWYTVLDLKDAFFCLRLHPTSQPLFAFEWRDPEMGISGQLTWTRLPQGFKNSPTLFNEALHRDLADFRIQHPDLILLQYVDDLLLAATSELDCQQGTRALLQTLGNLGYRASAKKAQICQKQVKYLGYLLKEGQRWLTEARKETVMGQPTPKTPRQLREFLGTAGFCRLWIPGFAEMAAPLYPLTKPGTLFNWGPDQQKAYQEIKQALLTAPALGLPDLTKPFELFVDEKQGYAKGVLTQKLGPWRRPVAYLSKKLDPVAAGWPPCLRMVAAIAVLTKDAGKLTMGQPLVILAPHAVEALVKQPPDRWLSNARMTHYQALLLDTDRVQFGPVVALNPATLLPLPEEGLQHNCLDILAEAHGTRPDLTDQPLPDADHTWYTDGSSLLQEGQRKAGAAVTTETEVIWAKALPAGTSAQRAELIALTQALKMAEGKKLNVYTDSRYAFATAHIHGEIYRRRGWLTSEGKEIKNKDEILALLKALFLPKRLSIIHCPGHQKGHSAEARGNRMADQAARKAAITETPDTSTLLAGKRTADGSEFEKRTADGSEFESPKKKAKVE

SEQ ID NO: 2768 - protein, 2094 aa, synthetic construct
MPAAKRVKLDGGDKKYSIGLDIGTNSVGWAVITDEYKVPSKKFKVLGNTDRHSIKKNLIGALLFDSGETAEATRLKRTARRRYTRRKNRICYLQEIFSNEMAKVDDSFFHRLEESFLVEEDKKHERHPIFGNIVDEVAYHEKYPTIYHLRKKLVDSTDKADLRLIYLALAHMIKFRGHFLIEGDLNPDNSDVDKLFIQLVQTYNQLFEENPINASGVDAKAILSARLSKSRRLENLIAQLPGEKKNGLFGNLIALSLGLTPNFKSNFDLAEDAKLQLSKDTYDDDLDNLLAQIGDQYADLFLAAKNLSDAILLSDILRVNTEITKAPLSASMIKRYDEHHQDLTLLKALVRQQLPEKYKEIFFDQSKNGYAGYIDGGASQEEFYKFIKPILEKMDGTEELLVKLNREDLLRKQRTFDNGSIPHQIHLGELHAILRRQEDFYPFLKDNREKIEKILTFRIPYYVGPLARGNSRFAWMTRKSEETITPWNFEEVVDKGASAQSFIERMTNFDKNLPNEKVLPKHSLLYEYFTVYNELTKVKYVTEGMRKPAFLSGEQKKAIVDLLFKTNRKVTVKQLKEDYFKKIECFDSVEISGVEDRFNASLGTYHDLLKIIKDKDFLDNEENEDILEDIVLTLTLFEDREMIEERLKTYAHLFDDKVMKQLKRRRYTGWGRLSRKLINGIRDKQSGKTILDFLKSDGFANRNFMQLIHDDSLTFKEDIQKAQVSGQGDSLHEHIANLAGSPAIKKGILQTVKVVDELVKVMGRHKPENIVIEMARENQTTQKGQKNSRERMKRIEEGIKELGSQILKEHPVENTQLQNEKLYLYYLQNGRDMYVDQELDINRLSDYDVDHIVPQSFLKDDSIDNKVLTRSDKARGKSDNVPSEEVVKKMKNYWRQLLNAKLITQRKFDNLTKAERGGLSELDKAGFIKRQLVETRQITKHVAQILDSRMNTKYDENDKLIREVKVITLKSKLVSDFRKDFQFYKVREINNYHHAHDAYLNAVVGTALIKKYPKLESEFVYGDYKVYDVRKMIAKSEQEIGKATAKYFFYSNIMNFFKTEITLANGEIRKRPLIETNGETGEIVWDKGRDFATVRKVLSMPQVNIVKKTEVQTGGFSKESILPKRNSDKLIARKKDWDPKKYGGFDSPTVAYSVLVVAKVEKGKSKKLKSVKELLGITIMERSSFEKNPIDFLEAKGYKEVKKDLIIKLPKYSLFELENGRKRMLASAGELQKGNELALPSKYVNFLYLASHYEKLKGSPEDNEQKQLFVEQHKHYLDEIIEQISEFSKRVILADANLDKVLSAYNKHRDKPIREQAENIIHLFTLTNLGAPAAFKYFDTTIDRKRYTSTKEVLDATLIHQSITGLYETRIDLSQLGGDGGGSSGGSPAPGGTLNIEDEHRLHETSKEPDVSLGSTWLSDFPQAWAETGGMGLAVRQAPLIIPLKATSTPVSIKQYPMSQEARLGIKPHIQRLLDQGILVPCQSPWNTPLLPVKKPGTNDYRPVQDLREVNKRVEDIHPTVPNPYNLLSGLPPSHQWYTVLDLKDAFFCLRLHPTSQPLFAFEWRDPEMGISGQLTWTRLPQGFKNSPTLFNEALHRDLADFRIQHPDLILLQYVDDLLLAATSELDCQQGTRALLQTLGNLGYRASAKKAQICQKQVKYLGYLLKEGQRWLTEARKETVMGQPTPKTPRQLREFLGTAGFCRLWIPGFAEMAAPLYPLTKPGTLFNWGPDQQKAYQEIKQALLTAPALGLPDLTKPFELFVDEKQGYAKGVLTQKLGPWRRPVAYLSKKLDPVAAGWPPCLRMVAAIAVLTKDAGKLTMGQPLVILAPHAVEALVKQPPDRWLSNARMTHYQALLLDTDRVQFGPVVALNPATLLPLPEEGLQHNCLDILAEAHGTRPDLTDQPLPDADHTWYTDGSSLLQEGQRKAGAAVTTETEVIWAKALPAGTSAQRAELIALTQALKMAEGKKLNVYTDSRYAFATAHIHGEIYRRRGWLTSEGKEIKNKDEILALLKALFLPKRLSIIHCPGHQKGHSAEARGNRMADQAARKAAITETPDTSTLLAGKRTADGSEFEKRTADGSEFESPKKKAKVE

SEQ ID NO: 2769 - protein, 2094 aa, synthetic construct
MPAAKRVKLDGGDKKYSIGLDIGTNSVGWAVITDEYKVPSKKFKVLGNTDRHSIKKNLIGALLFDSGETAEATRLKRTARRRYTRRKNRICYLQEIFSNEMAKVDDSFFHRLEESFLVEEDKKHERHPIFGNIVDEVAYHEKYPTIYHLRKKLVDSTDKADLRLIYLALAHMIKFRGHFLIEGDLNPDNSDVDKLFIQLVQTYNQLFEENPINASGVDAKAILSARLSKSRRLENLIAQLPGEKKNGLFGNLIALSLGLTPNFKSNFDLAEDAKLQLSKDTYDDDLDNLLAQIGDQYADLFLAAKNLSDAILLSDILRVNTEITKAPLSASMIKRYDEHHQDLTLLKALVRQQLPEKYKEIFFDQSKNGYAGYIDGGASQEEFYKFIKPILEKMDGTEELLVKLNREDLLRKQRTFDNGSIPHQIHLGELHAILRRQEDFYPFLKDNREKIEKILTFRIPYYVGPLARGNSRFAWMTRKSEETITPWNFEEVVDKGASAQSFIERMTNFDKNLPNEKVLPKHSLLYEYFTVYNELTKVKYVTEGMRKPAFLSGEQKKAIVDLLFKTNRKVTVKQLKEDYFKKIECFDSVEISGVEDRFNASLGTYHDLLKIIKDKDFLDNEENEDILEDIVLTLTLFEDREMIEERLKTYAHLFDDKVMKQLKRRRYTGWGRLSRKLINGIRDKQSGKTILDFLKSDGFANRNFMQLIHDDSLTFKEDIQKAQVSGQGDSLHEHIANLAGSPAIKKGILQTVKVVDELVKVMGRHKPENIVIEMARENQTTQKGQKNSRERMKRIEEGIKELGSQILKEHPVENTQLQNEKLYLYYLQNGRDMYVDQELDINRLSDYDVDHIVPQSFLKDDSIDNKVLTRSDKARGKSDNVPSEEVVKKMKNYWRQLLNAKLITQRKFDNLTKAERGGLSELDKAGFIKRQLVETRQITKHVAQILDSRMNTKYDENDKLIREVKVITLKSKLVSDFRKDFQFYKVREINNYHHAHDAYLNAVVGTALIKKYPKLESEFVYGDYKVYDVRKMIAKSEQEIGKATAKYFFYSNIMNFFKTEITLANGEIRKRPLIETNGETGEIVWDKGRDFATVRKVLSMPQVNIVKKTEVQTGGFSKESILPKRNSDKLIARKKDWDPKKYGGFDSPTVAYSVLVVAKVEKGKSKKLKSVKELLGITIMERSSFEKNPIDFLEAKGYKEVKKDLIIKLPKYSLFELENGRKRMLASAGELQKGNELALPSKYVNFLYLASHYEKLKGSPEDNEQKQLFVEQHKHYLDEIIEQISEFSKRVILADANLDKVLSAYNKHRDKPIREQAENIIHLFTLTNLGAPAAFKYFDTTIDRKRYTSTKEVLDATLIHQSITGLYETRIDLSQLGGDGGGGGGGSPAPGGTLNIEDEHRLHETSKEPDVSLGSTWLSDFPQAWAETGGMGLAVRQAPLIIPLKATSTPVSIKQYPMSQEARLGIKPHIQRLLDQGILVPCQSPWNTPLLPVKKPGTNDYRPVQDLREVNKRVEDIHPTVPNPYNLLSGLPPSHQWYTVLDLKDAFFCLRLHPTSQPLFAFEWRDPEMGISGQLTWTRLPQGFKNSPTLFNEALHRDLADFRIQHPDLILLQYVDDLLLAATSELDCQQGTRALLQTLGNLGYRASAKKAQICQKQVKYLGYLLKEGQRWLTEARKETVMGQPTPKTPRQLREFLGTAGFCRLWIPGFAEMAAPLYPLTKPGTLFNWGPDQQKAYQEIKQALLTAPALGLPDLTKPFELFVDEKQGYAKGVLTQKLGPWRRPVAYLSKKLDPVAAGWPPCLRMVAAIAVLTKDAGKLTMGQPLVILAPHAVEALVKQPPDRWLSNARMTHYQALLLDTDRVQFGPVVALNPATLLPLPEEGLQHNCLDILAEAHGTRPDLTDQPLPDADHTWYTDGSSLLQEGQRKAGAAVTTETEVIWAKALPAGTSAQRAELIALTQALKMAEGKKLNVYTDSRYAFATAHIHGEIYRRRGWLTSEGKEIKNKDEILALLKALFLPKRLSIIHCPGHQKGHSAEARGNRMADQAARKAAITETPDTSTLLAGKRTADGSEFEKRTADGSEFESPKKKAKVE

SEQ ID NO: 2770 - protein, 2094 aa, synthetic construct
MPAAKRVKLDGGDKKYSIGLDIGTNSVGWAVITDEYKVPSKKFKVLGNTDRHSIKKNLIGALLFDSGETAEATRLKRTARRRYTRRKNRICYLQEIFSNEMAKVDDSFFHRLEESFLVEEDKKHERHPIFGNIVDEVAYHEKYPTIYHLRKKLVDSTDKADLRLIYLALAHMIKFRGHFLIEGDLNPDNSDVDKLFIQLVQTYNQLFEENPINASGVDAKAILSARLSKSRRLENLIAQLPGEKKNGLFGNLIALSLGLTPNFKSNFDLAEDAKLQLSKDTYDDDLDNLLAQIGDQYADLFLAAKNLSDAILLSDILRVNTEITKAPLSASMIKRYDEHHQDLTLLKALVRQQLPEKYKEIFFDQSKNGYAGYIDGGASQEEFYKFIKPILEKMDGTEELLVKLNREDLLRKQRTFDNGSIPHQIHLGELHAILRRQEDFYPFLKDNREKIEKILTFRIPYYVGPLARGNSRFAWMTRKSEETITPWNFEEVVDKGASAQSFIERMTNFDKNLPNEKVLPKHSLLYEYFTVYNELTKVKYVTEGMRKPAFLSGEQKKAIVDLLFKTNRKVTVKQLKEDYFKKIECFDSVEISGVEDRFNASLGTYHDLLKIIKDKDFLDNEENEDILEDIVLTLTLFEDREMIEERLKTYAHLFDDKVMKQLKRRRYTGWGRLSRKLINGIRDKQSGKTILDFLKSDGFANRNFMQLIHDDSLTFKEDIQKAQVSGQGDSLHEHIANLAGSPAIKKGILQTVKVVDELVKVMGRHKPENIVIEMARENQTTQKGQKNSRERMKRIEEGIKELGSQILKEHPVENTQLQNEKLYLYYLQNGRDMYVDQELDINRLSDYDVDHIVPQSFLKDDSIDNKVLTRSDKARGKSDNVPSEEVVKKMKNYWRQLLNAKLITQRKFDNLTKAERGGLSELDKAGFIKRQLVETRQITKHVAQILDSRMNTKYDENDKLIREVKVITLKSKLVSDFRKDFQFYKVREINNYHHAHDAYLNAVVGTALIKKYPKLESEFVYGDYKVYDVRKMIAKSEQEIGKATAKYFFYSNIMNFFKTEITLANGEIRKRPLIETNGETGEIVWDKGRDFATVRKVLSMPQVNIVKKTEVQTGGFSKESILPKRNSDKLIARKKDWDPKKYGGFDSPTVAYSVLVVAKVEKGKSKKLKSVKELLGITIMERSSFEKNPIDFLEAKGYKEVKKDLIIKLPKYSLFELENGRKRMLASAGELQKGNELALPSKYVNFLYLASHYEKLKGSPEDNEQKQLFVEQHKHYLDEIIEQISEFSKRVILADANLDKVLSAYNKHRDKPIREQAENIIHLFTLTNLGAPAAFKYFDTTIDRKRYTSTKEVLDATLIHQSITGLYETRIDLSQLGGDGGGGGGSSPAPGGTLNIEDEHRLHETSKEPDVSLGSTWLSDFPQAWAETGGMGLAVRQAPLIIPLKATSTPVSIKQYPMSQEARLGIKPHIQRLLDQGILVPCQSPWNTPLLPVKKPGTNDYRPVQDLREVNKRVEDIHPTVPNPYNLLSGLPPSHQWYTVLDLKDAFFCLRLHPTSQPLFAFEWRDPEMGISGQLTWTRLPQGFKNSPTLFNEALHRDLADFRIQHPDLILLQYVDDLLLAATSELDCQQGTRALLQTLGNLGYRASAKKAQICQKQVKYLGYLLKEGQRWLTEARKETVMGQPTPKTPRQLREFLGTAGFCRLWIPGFAEMAAPLYPLTKPGTLFNWGPDQQKAYQEIKQALLTAPALGLPDLTKPFELFVDEKQGYAKGVLTQKLGPWRRPVAYLSKKLDPVAAGWPPCLRMVAAIAVLTKDAGKLTMGQPLVILAPHAVEALVKQPPDRWLSNARMTHYQALLLDTDRVQFGPVVALNPATLLPLPEEGLQHNCLDILAEAHGTRPDLTDQPLPDADHTWYTDGSSLLQEGQRKAGAAVTTETEVIWAKALPAGTSAQRAELIALTQALKMAEGKKLNVYTDSRYAFATAHIHGEIYRRRGWLTSEGKEIKNKDEILALLKALFLPKRLSIIHCPGHQKGHSAEARGNRMADQAARKAAITETPDTSTLLAGKRTADGSEFEKRTADGSEFESPKKKAKVE

SEQ ID NO: 2771 - protein, 2105 aa, synthetic construct
MPAAKRVKLDGGDKKYSIGLDIGTNSVGWAVITDEYKVPSKKFKVLGNTDRHSIKKNLIGALLFDSGETAEATRLKRTARRRYTRRKNRICYLQEIFSNEMAKVDDSFFHRLEESFLVEEDKKHERHPIFGNIVDEVAYHEKYPTIYHLRKKLVDSTDKADLRLIYLALAHMIKFRGHFLIEGDLNPDNSDVDKLFIQLVQTYNQLFEENPINASGVDAKAILSARLSKSRRLENLIAQLPGEKKNGLFGNLIALSLGLTPNFKSNFDLAEDAKLQLSKDTYDDDLDNLLAQIGDQYADLFLAAKNLSDAILLSDILRVNTEITKAPLSASMIKRYDEHHQDLTLLKALVRQQLPEKYKEIFFDQSKNGYAGYIDGGASQEEFYKFIKPILEKMDGTEELLVKLNREDLLRKQRTFDNGSIPHQIHLGELHAILRRQEDFYPFLKDNREKIEKILTFRIPYYVGPLARGNSRFAWMTRKSEETITPWNFEEVVDKGASAQSFIERMTNFDKNLPNEKVLPKHSLLYEYFTVYNELTKVKYVTEGMRKPAFLSGEQKKAIVDLLFKTNRKVTVKQLKEDYFKKIECFDSVEISGVEDRFNASLGTYHDLLKIIKDKDFLDNEENEDILEDIVLTLTLFEDREMIEERLKTYAHLFDDKVMKQLKRRRYTGWGRLSRKLINGIRDKQSGKTILDFLKSDGFANRNFMQLIHDDSLTFKEDIQKAQVSGQGDSLHEHIANLAGSPAIKKGILQTVKVVDELVKVMGRHKPENIVIEMARENQTTQKGQKNSRERMKRIEEGIKELGSQILKEHPVENTQLQNEKLYLYYLQNGRDMYVDQELDINRLSDYDVDHIVPQSFLKDDSIDNKVLTRSDKARGKSDNVPSEEVVKKMKNYWRQLLNAKLITQRKFDNLTKAERGGLSELDKAGFIKRQLVETRQITKHVAQILDSRMNTKYDENDKLIREVKVITLKSKLVSDFRKDFQFYKVREINNYHHAHDAYLNAVVGTALIKKYPKLESEFVYGDYKVYDVRKMIAKSEQEIGKATAKYFFYSNIMNFFKTEITLANGEIRKRPLIETNGETGEIVWDKGRDFATVRKVLSMPQVNIVKKTEVQTGGFSKESILPKRNSDKLIARKKDWDPKKYGGFDSPTVAYSVLVVAKVEKGKSKKLKSVKELLGITIMERSSFEKNPIDFLEAKGYKEVKKDLIIKLPKYSLFELENGRKRMLASAGELQKGNELALPSKYVNFLYLASHYEKLKGSPEDNEQKQLFVEQHKHYLDEIIEQISEFSKRVILADANLDKVLSAYNKHRDKPIREQAENIIHLFTLTNLGAPAAFKYFDTTIDRKRYTSTKEVLDATLIHQSITGLYETRIDLSQLGGDGGGGGGSGGGGSGGGGSGGGGSGGTLNIEDEHRLHETSKEPDVSLGSTWLSDFPQAWAETGGMGLAVRQAPLIIPLKATSTPVSIKQYPMSQEARLGIKPHIQRLLDQGILVPCQSPWNTPLLPVKKPGTNDYRPVQDLREVNKRVEDIHPTVPNPYNLLSGLPPSHQWYTVLDLKDAFFCLRLHPTSQPLFAFEWRDPEMGISGQLTWTRLPQGFKNSPTLFNEALHRDLADFRIQHPDLILLQYVDDLLLAATSELDCQQGTRALLQTLGNLGYRASAKKAQICQKQVKYLGYLLKEGQRWLTEARKETVMGQPTPKTPRQLREFLGTAGFCRLWIPGFAEMAAPLYPLTKPGTLFNWGPDQQKAYQEIKQALLTAPALGLPDLTKPFELFVDEKQGYAKGVLTQKLGPWRRPVAYLSKKLDPVAAGWPPCLRMVAAIAVLTKDAGKLTMGQPLVILAPHAVEALVKQPPDRWLSNARMTHYQALLLDTDRVQFGPVVALNPATLLPLPEEGLQHNCLDILAEAHGTRPDLTDQPLPDADHTWYTDGSSLLQEGQRKAGAAVTTETEVIWAKALPAGTSAQRAELIALTQALKMAEGKKLNVYTDSRYAFATAHIHGEIYRRRGWLTSEGKEIKNKDEILALLKALFLPKRLSIIHCPGHQKGHSAEARGNRMADQAARKAAITETPDTSTLLAGKRTADGSEFEKRTADGSEFESPKKKAKVE

SEQ ID NO: 2772 - protein, 2100 aa, synthetic construct
MPAAKRVKLDGGDKKYSIGLDIGTNSVGWAVITDEYKVPSKKFKVLGNTDRHSIKKNLIGALLFDSGETAEATRLKRTARRRYTRRKNRICYLQEIFSNEMAKVDDSFFHRLEESFLVEEDKKHERHPIFGNIVDEVAYHEKYPTIYHLRKKLVDSTDKADLRLIYLALAHMIKFRGHFLIEGDLNPDNSDVDKLFIQLVQTYNQLFEENPINASGVDAKAILSARLSKSRRLENLIAQLPGEKKNGLFGNLIALSLGLTPNFKSNFDLAEDAKLQLSKDTYDDDLDNLLAQIGDQYADLFLAAKNLSDAILLSDILRVNTEITKAPLSASMIKRYDEHHQDLTLLKALVRQQLPEKYKEIFFDQSKNGYAGYIDGGASQEEFYKFIKPILEKMDGTEELLVKLNREDLLRKQRTFDNGSIPHQIHLGELHAILRRQEDFYPFLKDNREKIEKILTFRIPYYVGPLARGNSRFAWMTRKSEETITPWNFEEVVDKGASAQSFIERMTNFDKNLPNEKVLPKHSLLYEYFTVYNELTKVKYVTEGMRKPAFLSGEQKKAIVDLLFKTNRKVTVKQLKEDYFKKIECFDSVEISGVEDRFNASLGTYHDLLKIIKDKDFLDNEENEDILEDIVLTLTLFEDREMIEERLKTYAHLFDDKVMKQLKRRRYTGWGRLSRKLINGIRDKQSGKTILDFLKSDGFANRNFMQLIHDDSLTFKEDIQKAQVSGQGDSLHEHIANLAGSPAIKKGILQTVKVVDELVKVMGRHKPENIVIEMARENQTTQKGQKNSRERMKRIEEGIKELGSQILKEHPVENTQLQNEKLYLYYLQNGRDMYVDQELDINRLSDYDVDHIVPQSFLKDDSIDNKVLTRSDKARGKSDNVPSEEVVKKMKNYWRQLLNAKLITQRKFDNLTKAERGGLSELDKAGFIKRQLVETRQITKHVAQILDSRMNTKYDENDKLIREVKVITLKSKLVSDFRKDFQFYKVREINNYHHAHDAYLNAVVGTALIKKYPKLESEFVYGDYKVYDVRKMIAKSEQEIGKATAKYFFYSNIMNFFKTEITLANGEIRKRPLIETNGETGEIVWDKGRDFATVRKVLSMPQVNIVKKTEVQTGGFSKESILPKRNSDKLIARKKDWDPKKYGGFDSPTVAYSVLVVAKVEKGKSKKLKSVKELLGITIMERSSFEKNPIDFLEAKGYKEVKKDLIIKLPKYSLFELENGRKRMLASAGELQKGNELALPSKYVNFLYLASHYEKLKGSPEDNEQKQLFVEQHKHYLDEIIEQISEFSKRVILADANLDKVLSAYNKHRDKPIREQAENIIHLFTLTNLGAPAAFKYFDTTIDRKRYTSTKEVLDATLIHQSITGLYETRIDLSQLGGDGGEAAAKEAAAKEAAAKGGTLNIEDEHRLHETSKEPDVSLGSTWLSDFPQAWAETGGMGLAVRQAPLIIPLKATSTPVSIKQYPMSQEARLGIKPHIQRLLDQGILVPCQSPWNTPLLPVKKPGTNDYRPVQDLREVNKRVEDIHPTVPNPYNLLSGLPPSHQWYTVLDLKDAFFCLRLHPTSQPLFAFEWRDPEMGISGQLTWTRLPQGFKNSPTLFNEALHRDLADFRIQHPDLILLQYVDDLLLAATSELDCQQGTRALLQTLGNLGYRASAKKAQICQKQVKYLGYLLKEGQRWLTEARKETVMGQPTPKTPRQLREFLGTAGFCRLWIPGFAEMAAPLYPLTKPGTLFNWGPDQQKAYQEIKQALLTAPALGLPDLTKPFELFVDEKQGYAKGVLTQKLGPWRRPVAYLSKKLDPVAAGWPPCLRMVAAIAVLTKDAGKLTMGQPLVILAPHAVEALVKQPPDRWLSNARMTHYQALLLDTDRVQFGPVVALNPATLLPLPEEGLQHNCLDILAEAHGTRPDLTDQPLPDADHTWYTDGSSLLQEGQRKAGAAVTTETEVIWAKALPAGTSAQRAELIALTQALKMAEGKKLNVYTDSRYAFATAHIHGEIYRRRGWLTSEGKEIKNKDEILALLKALFLPKRLSIIHCPGHQKGHSAEARGNRMADQAARKAAITETPDTSTLLAGKRTADGSEFEKRTADGSEFESPKKKAKVE

SEQ ID NO: 2773 - protein, 2094 aa, synthetic construct
MPAAKRVKLDGGDKKYSIGLDIGTNSVGWAVITDEYKVPSKKFKVLGNTDRHSIKKNLIGALLFDSGETAEATRLKRTARRRYTRRKNRICYLQEIFSNEMAKVDDSFFHRLEESFLVEEDKKHERHPIFGNIVDEVAYHEKYPTIYHLRKKLVDSTDKADLRLIYLALAHMIKFRGHFLIEGDLNPDNSDVDKLFIQLVQTYNQLFEENPINASGVDAKAILSARLSKSRRLENLIAQLPGEKKNGLFGNLIALSLGLTPNFKSNFDLAEDAKLQLSKDTYDDDLDNLLAQIGDQYADLFLAAKNLSDAILLSDILRVNTEITKAPLSASMIKRYDEHHQDLTLLKALVRQQLPEKYKEIFFDQSKNGYAGYIDGGASQEEFYKFIKPILEKMDGTEELLVKLNREDLLRKQRTFDNGSIPHQIHLGELHAILRRQEDFYPFLKDNREKIEKILTFRIPYYVGPLARGNSRFAWMTRKSEETITPWNFEEVVDKGASAQSFIERMTNFDKNLPNEKVLPKHSLLYEYFTVYNELTKVKYVTEGMRKPAFLSGEQKKAIVDLLFKTNRKVTVKQLKEDYFKKIECFDSVEISGVEDRFNASLGTYHDLLKIIKDKDFLDNEENEDILEDIVLTLTLFEDREMIEERLKTYAHLFDDKVMKQLKRRRYTGWGRLSRKLINGIRDKQSGKTILDFLKSDGFANRNFMQLIHDDSLTFKEDIQKAQVSGQGDSLHEHIANLAGSPAIKKGILQTVKVVDELVKVMGRHKPENIVIEMARENQTTQKGQKNSRERMKRIEEGIKELGSQILKEHPVENTQLQNEKLYLYYLQNGRDMYVDQELDINRLSDYDVDHIVPQSFLKDDSIDNKVLTRSDKARGKSDNVPSEEVVKKMKNYWRQLLNAKLITQRKFDNLTKAERGGLSELDKAGFIKRQLVETRQITKHVAQILDSRMNTKYDENDKLIREVKVITLKSKLVSDFRKDFQFYKVREINNYHHAHDAYLNAVVGTALIKKYPKLESEFVYGDYKVYDVRKMIAKSEQEIGKATAKYFFYSNIMNFFKTEITLANGEIRKRPLIETNGETGEIVWDKGRDFATVRKVLSMPQVNIVKKTEVQTGGFSKESILPKRNSDKLIARKKDWDPKKYGGFDSPTVAYSVLVVAKVEKGKSKKLKSVKELLGITIMERSSFEKNPIDFLEAKGYKEVKKDLIIKLPKYSLFELENGRKRMLASAGELQKGNELALPSKYVNFLYLASHYEKLKGSPEDNEQKQLFVEQHKHYLDEIIEQISEFSKRVILADANLDKVLSAYNKHRDKPIREQAENIIHLFTLTNLGAPAAFKYFDTTIDRKRYTSTKEVLDATLIHQSITGLYETRIDLSQLGGDGGGGGPAPGSSGGTLNIEDEHRLHETSKEPDVSLGSTWLSDFPQAWAETGGMGLAVRQAPLIIPLKATSTPVSIKQYPMSQEARLGIKPHIQRLLDQGILVPCQSPWNTPLLPVKKPGTNDYRPVQDLREVNKRVEDIHPTVPNPYNLLSGLPPSHQWYTVLDLKDAFFCLRLHPTSQPLFAFEWRDPEMGISGQLTWTRLPQGFKNSPTLFNEALHRDLADFRIQHPDLILLQYVDDLLLAATSELDCQQGTRALLQTLGNLGYRASAKKAQICQKQVKYLGYLLKEGQRWLTEARKETVMGQPTPKTPRQLREFLGTAGFCRLWIPGFAEMAAPLYPLTKPGTLFNWGPDQQKAYQEIKQALLTAPALGLPDLTKPFELFVDEKQGYAKGVLTQKLGPWRRPVAYLSKKLDPVAAGWPPCLRMVAAIAVLTKDAGKLTMGQPLVILAPHAVEALVKQPPDRWLSNARMTHYQALLLDTDRVQFGPVVALNPATLLPLPEEGLQHNCLDILAEAHGTRPDLTDQPLPDADHTWYTDGSSLLQEGQRKAGAAVTTETEVIWAKALPAGTSAQRAELIALTQALKMAEGKKLNVYTDSRYAFATAHIHGEIYRRRGWLTSEGKEIKNKDEILALLKALFLPKRLSIIHCPGHQKGHSAEARGNRMADQAARKAAITETPDTSTLLAGKRTADGSEFEKRTADGSEFESPKKKAKVE

SEQ ID NO: 2774 - protein, 2093 aa, synthetic construct
MPAAKRVKLDGGDKKYSIGLDIGTNSVGWAVITDEYKVPSKKFKVLGNTDRHSIKKNLIGALLFDSGETAEATRLKRTARRRYTRRKNRICYLQEIFSNEMAKVDDSFFHRLEESFLVEEDKKHERHPIFGNIVDEVAYHEKYPTIYHLRKKLVDSTDKADLRLIYLALAHMIKFRGHFLIEGDLNPDNSDVDKLFIQLVQTYNQLFEENPINASGVDAKAILSARLSKSRRLENLIAQLPGEKKNGLFGNLIALSLGLTPNFKSNFDLAEDAKLQLSKDTYDDDLDNLLAQIGDQYADLFLAAKNLSDAILLSDILRVNTEITKAPLSASMIKRYDEHHQDLTLLKALVRQQLPEKYKEIFFDQSKNGYAGYIDGGASQEEFYKFIKPILEKMDGTEELLVKLNREDLLRKQRTFDNGSIPHQIHLGELHAILRRQEDFYPFLKDNREKIEKILTFRIPYYVGPLARGNSRFAWMTRKSEETITPWNFEEVVDKGASAQSFIERMTNFDKNLPNEKVLPKHSLLYEYFTVYNELTKVKYVTEGMRKPAFLSGEQKKAIVDLLFKTNRKVTVKQLKEDYFKKIECFDSVEISGVEDRFNASLGTYHDLLKIIKDKDFLDNEENEDILEDIVLTLTLFEDREMIEERLKTYAHLFDDKVMKQLKRRRYTGWGRLSRKLINGIRDKQSGKTILDFLKSDGFANRNFMQLIHDDSLTFKEDIQKAQVSGQGDSLHEHIANLAGSPAIKKGILQTVKVVDELVKVMGRHKPENIVIEMARENQTTQKGQKNSRERMKRIEEGIKELGSQILKEHPVENTQLQNEKLYLYYLQNGRDMYVDQELDINRLSDYDVDHIVPQSFLKDDSIDNKVLTRSDKARGKSDNVPSEEVVKKMKNYWRQLLNAKLITQRKFDNLTKAERGGLSELDKAGFIKRQLVETRQITKHVAQILDSRMNTKYDENDKLIREVKVITLKSKLVSDFRKDFQFYKVREINNYHHAHDAYLNAVVGTALIKKYPKLESEFVYGDYKVYDVRKMIAKSEQEIGKATAKYFFYSNIMNFFKTEITLANGEIRKRPLIETNGETGEIVWDKGRDFATVRKVLSMPQVNIVKKTEVQTGGFSKESILPKRNSDKLIARKKDWDPKKYGGFDSPTVAYSVLVVAKVEKGKSKKLKSVKELLGITIMERSSFEKNPIDFLEAKGYKEVKKDLIIKLPKYSLFELENGRKRMLASAGELQKGNELALPSKYVNFLYLASHYEKLKGSPEDNEQKQLFVEQHKHYLDEIIEQISEFSKRVILADANLDKVLSAYNKHRDKPIREQAENIIHLFTLTNLGAPAAFKYFDTTIDRKRYTSTKEVLDATLIHQSITGLYETRIDLSQLGGDGGGGSEAAAKGGTLNIEDEHRLHETSKEPDVSLGSTWLSDFPQAWAETGGMGLAVRQAPLIIPLKATSTPVSIKQYPMSQEARLGIKPHIQRLLDQGILVPCQSPWNTPLLPVKKPGTNDYRPVQDLREVNKRVEDIHPTVPNPYNLLSGLPPSHQWYTVLDLKDAFFCLRLHPTSQPLFAFEWRDPEMGISGQLTWTRLPQGFKNSPTLFNEALHRDLADFRIQHPDLILLQYVDDLLLAATSELDCQQGTRALLQTLGNLGYRASAKKAQICQKQVKYLGYLLKEGQRWLTEARKETVMGQPTPKTPRQLREFLGTAGFCRLWIPGFAEMAAPLYPLTKPGTLFNWGPDQQKAYQEIKQALLTAPALGLPDLTKPFELFVDEKQGYAKGVLTQKLGPWRRPVAYLSKKLDPVAAGWPPCLRMVAAIAVLTKDAGKLTMGQPLVILAPHAVEALVKQPPDRWLSNARMTHYQALLLDTDRVQFGPVVALNPATLLPLPEEGLQHNCLDILAEAHGTRPDLTDQPLPDADHTWYTDGSSLLQEGQRKAGAAVTTETEVIWAKALPAGTSAQRAELIALTQALKMAEGKKLNVYTDSRYAFATAHIHGEIYRRRGWLTSEGKEIKNKDEILALLKALFLPKRLSIIHCPGHQKGHSAEARGNRMADQAARKAAITETPDTSTLLAGKRTADGSEFEKRTADGSEFESPKKKAKVE

SEQ ID NO: 2775 - protein, 2096 aa, synthetic construct
MPAAKRVKLDGGDKKYSIGLDIGTNSVGWAVITDEYKVPSKKFKVLGNTDRHSIKKNLIGALLFDSGETAEATRLKRTARRRYTRRKNRICYLQEIFSNEMAKVDDSFFHRLEESFLVEEDKKHERHPIFGNIVDEVAYHEKYPTIYHLRKKLVDSTDKADLRLIYLALAHMIKFRGHFLIEGDLNPDNSDVDKLFIQLVQTYNQLFEENPINASGVDAKAILSARLSKSRRLENLIAQLPGEKKNGLFGNLIALSLGLTPNFKSNFDLAEDAKLQLSKDTYDDDLDNLLAQIGDQYADLFLAAKNLSDAILLSDILRVNTEITKAPLSASMIKRYDEHHQDLTLLKALVRQQLPEKYKEIFFDQSKNGYAGYIDGGASQEEFYKFIKPILEKMDGTEELLVKLNREDLLRKQRTFDNGSIPHQIHLGELHAILRRQEDFYPFLKDNREKIEKILTFRIPYYVGPLARGNSRFAWMTRKSEETITPWNFEEVVDKGASAQSFIERMTNFDKNLPNEKVLPKHSLLYEYFTVYNELTKVKYVTEGMRKPAFLSGEQKKAIVDLLFKTNRKVTVKQLKEDYFKKIECFDSVEISGVEDRFNASLGTYHDLLKIIKDKDFLDNEENEDILEDIVLTLTLFEDREMIEERLKTYAHLFDDKVMKQLKRRRYTGWGRLSRKLINGIRDKQSGKTILDFLKSDGFANRNFMQLIHDDSLTFKEDIQKAQVSGQGDSLHEHIANLAGSPAIKKGILQTVKVVDELVKVMGRHKPENIVIEMARENQTTQKGQKNSRERMKRIEEGIKELGSQILKEHPVENTQLQNEKLYLYYLQNGRDMYVDQELDINRLSDYDVDHIVPQSFLKDDSIDNKVLTRSDKARGKSDNVPSEEVVKKMKNYWRQLLNAKLITQRKFDNLTKAERGGLSELDKAGFIKRQLVETRQITKHVAQILDSRMNTKYDENDKLIREVKVITLKSKLVSDFRKDFQFYKVREINNYHHAHDAYLNAVVGTALIKKYPKLESEFVYGDYKVYDVRKMIAKSEQEIGKATAKYFFYSNIMNFFKTEITLANGEIRKRPLIETNGETGEIVWDKGRDFATVRKVLSMPQVNIVKKTEVQTGGFSKESILPKRNSDKLIARKKDWDPKKYGGFDSPTVAYSVLVVAKVEKGKSKKLKSVKELLGITIMERSSFEKNPIDFLEAKGYKEVKKDLIIKLPKYSLFELENGRKRMLASAGELQKGNELALPSKYVNFLYLASHYEKLKGSPEDNEQKQLFVEQHKHYLDEIIEQISEFSKRVILADANLDKVLSAYNKHRDKPIREQAENIIHLFTLTNLGAPAAFKYFDTTIDRKRYTSTKEVLDATLIHQSITGLYETRIDLSQLGGDGGGSSEAAAKPAPGGTLNIEDEHRLHETSKEPDVSLGSTWLSDFPQAWAETGGMGLAVRQAPLIIPLKATSTPVSIKQYPMSQEARLGIKPHIQRLLDQGILVPCQSPWNTPLLPVKKPGTNDYRPVQDLREVNKRVEDIHPTVPNPYNLLSGLPPSHQWYTVLDLKDAFFCLRLHPTSQPLFAFEWRDPEMGISGQLTWTRLPQGFKNSPTLFNEALHRDLADFRIQHPDLILLQYVDDLLLAATSELDCQQGTRALLQTLGNLGYRASAKKAQICQKQVKYLGYLLKEGQRWLTEARKETVMGQPTPKTPRQLREFLGTAGFCRLWIPGFAEMAAPLYPLTKPGTLFNWGPDQQKAYQEIKQALLTAPALGLPDLTKPFELFVDEKQGYAKGVLTQKLGPWRRPVAYLSKKLDPVAAGWPPCLRMVAAIAVLTKDAGKLTMGQPLVILAPHAVEALVKQPPDRWLSNARMTHYQALLLDTDRVQFGPVVALNPATLLPLPEEGLQHNCLDILAEAHGTRPDLTDQPLPDADHTWYTDGSSLLQEGQRKAGAAVTTETEVIWAKALPAGTSAQRAELIALTQALKMAEGKKLNVYTDSRYAFATAHIHGEIYRRRGWLTSEGKEIKNKDEILALLKALFLPKRLSIIHCPGHQKGHSAEARGNRMADQAARKAAITETPDTSTLLAGKRTADGSEFEKRTADGSEFESPKKKAKVE

SEQ ID NO: 2776 - protein, 2096 aa, synthetic construct
MPAAKRVKLDGGDKKYSIGLDIGTNSVGWAVITDEYKVPSKKFKVLGNTDRHSIKKNLIGALLFDSGETAEATRLKRTARRRYTRRKNRICYLQEIFSNEMAKVDDSFFHRLEESFLVEEDKKHERHPIFGNIVDEVAYHEKYPTIYHLRKKLVDSTDKADLRLIYLALAHMIKFRGHFLIEGDLNPDNSDVDKLFIQLVQTYNQLFEENPINASGVDAKAILSARLSKSRRLENLIAQLPGEKKNGLFGNLIALSLGLTPNFKSNFDLAEDAKLQLSKDTYDDDLDNLLAQIGDQYADLFLAAKNLSDAILLSDILRVNTEITKAPLSASMIKRYDEHHQDLTLLKALVRQQLPEKYKEIFFDQSKNGYAGYIDGGASQEEFYKFIKPILEKMDGTEELLVKLNREDLLRKQRTFDNGSIPHQIHLGELHAILRRQEDFYPFLKDNREKIEKILTFRIPYYVGPLARGNSRFAWMTRKSEETITPWNFEEVVDKGASAQSFIERMTNFDKNLPNEKVLPKHSLLYEYFTVYNELTKVKYVTEGMRKPAFLSGEQKKAIVDLLFKTNRKVTVKQLKEDYFKKIECFDSVEISGVEDRFNASLGTYHDLLKIIKDKDFLDNEENEDILEDIVLTLTLFEDREMIEERLKTYAHLFDDKVMKQLKRRRYTGWGRLSRKLINGIRDKQSGKTILDFLKSDGFANRNFMQLIHDDSLTFKEDIQKAQVSGQGDSLHEHIANLAGSPAIKKGILQTVKVVDELVKVMGRHKPENIVIEMARENQTTQKGQKNSRERMKRIEEGIKELGSQILKEHPVENTQLQNEKLYLYYLQNGRDMYVDQELDINRLSDYDVDHIVPQSFLKDDSIDNKVLTRSDKARGKSDNVPSEEVVKKMKNYWRQLLNAKLITQRKFDNLTKAERGGLSELDKAGFIKRQLVETRQITKHVAQILDSRMNTKYDENDKLIREVKVITLKSKLVSDFRKDFQFYKVREINNYHHAHDAYLNAVVGTALIKKYPKLESEFVYGDYKVYDVRKMIAKSEQEIGKATAKYFFYSNIMNFFKTEITLANGEIRKRPLIETNGETGEIVWDKGRDFATVRKVLSMPQVNIVKKTEVQTGGFSKESILPKRNSDKLIARKKDWDPKKYGGFDSPTVAYSVLVVAKVEKGKSKKLKSVKELLGITIMERSSFEKNPIDFLEAKGYKEVKKDLIIKLPKYSLFELENGRKRMLASAGELQKGNELALPSKYVNFLYLASHYEKLKGSPEDNEQKQLFVEQHKHYLDEIIEQISEFSKRVILADANLDKVLSAYNKHRDKPIREQAENIIHLFTLTNLGAPAAFKYFDTTIDRKRYTSTKEVLDATLIHQSITGLYETRIDLSQLGGDGGGGSPAPEAAAKGGTLNIEDEHRLHETSKEPDVSLGSTWLSDFPQAWAETGGMGLAVRQAPLIIPLKATSTPVSIKQYPMSQEARLGIKPHIQRLLDQGILVPCQSPWNTPLLPVKKPGTNDYRPVQDLREVNKRVEDIHPTVPNPYNLLSGLPPSHQWYTVLDLKDAFFCLRLHPTSQPLFAFEWRDPEMGISGQLTWTRLPQGFKNSPTLFNEALHRDLADFRIQHPDLILLQYVDDLLLAATSELDCQQGTRALLQTLGNLGYRASAKKAQICQKQVKYLGYLLKEGQRWLTEARKETVMGQPTPKTPRQLREFLGTAGFCRLWIPGFAEMAAPLYPLTKPGTLFNWGPDQQKAYQEIKQALLTAPALGLPDLTKPFELFVDEKQGYAKGVLTQKLGPWRRPVAYLSKKLDPVAAGWPPCLRMVAAIAVLTKDAGKLTMGQPLVILAPHAVEALVKQPPDRWLSNARMTHYQALLLDTDRVQFGPVVALNPATLLPLPEEGLQHNCLDILAEAHGTRPDLTDQPLPDADHTWYTDGSSLLQEGQRKAGAAVTTETEVIWAKALPAGTSAQRAELIALTQALKMAEGKKLNVYTDSRYAFATAHIHGEIYRRRGWLTSEGKEIKNKDEILALLKALFLPKRLSIIHCPGHQKGHSAEARGNRMADQAARKAAITETPDTSTLLAGKRTADGSEFEKRTADGSEFESPKKKAKVE

SEQ ID NO: 2777 - protein, 2096 aa, synthetic construct
MPAAKRVKLDGGDKKYSIGLDIGTNSVGWAVITDEYKVPSKKFKVLGNTDRHSIKKNLIGALLFDSGETAEATRLKRTARRRYTRRKNRICYLQEIFSNEMAKVDDSFFHRLEESFLVEEDKKHERHPIFGNIVDEVAYHEKYPTIYHLRKKLVDSTDKADLRLIYLALAHMIKFRGHFLIEGDLNPDNSDVDKLFIQLVQTYNQLFEENPINASGVDAKAILSARLSKSRRLENLIAQLPGEKKNGLFGNLIALSLGLTPNFKSNFDLAEDAKLQLSKDTYDDDLDNLLAQIGDQYADLFLAAKNLSDAILLSDILRVNTEITKAPLSASMIKRYDEHHQDLTLLKALVRQQLPEKYKEIFFDQSKNGYAGYIDGGASQEEFYKFIKPILEKMDGTEELLVKLNREDLLRKQRTFDNGSIPHQIHLGELHAILRRQEDFYPFLKDNREKIEKILTFRIPYYVGPLARGNSRFAWMTRKSEETITPWNFEEVVDKGASAQSFIERMTNFDKNLPNEKVLPKHSLLYEYFTVYNELTKVKYVTEGMRKPAFLSGEQKKAIVDLLFKTNRKVTVKQLKEDYFKKIECFDSVEISGVEDRFNASLGTYHDLLKIIKDKDFLDNEENEDILEDIVLTLTLFEDREMIEERLKTYAHLFDDKVMKQLKRRRYTGWGRLSRKLINGIRDKQSGKTILDFLKSDGFANRNFMQLIHDDSLTFKEDIQKAQVSGQGDSLHEHIANLAGSPAIKKGILQTVKVVDELVKVMGRHKPENIVIEMARENQTTQKGQKNSRERMKRIEEGIKELGSQILKEHPVENTQLQNEKLYLYYLQNGRDMYVDQELDINRLSDYDVDHIVPQSFLKDDSIDNKVLTRSDKARGKSDNVPSEEVVKKMKNYWRQLLNAKLITQRKFDNLTKAERGGLSELDKAGFIKRQLVETRQITKHVAQILDSRMNTKYDENDKLIREVKVITLKSKLVSDFRKDFQFYKVREINNYHHAHDAYLNAVVGTALIKKYPKLESEFVYGDYKVYDVRKMIAKSEQEIGKATAKYFFYSNIMNFFKTEITLANGEIRKRPLIETNGETGEIVWDKGRDFATVRKVLSMPQVNIVKKTEVQTGGFSKESILPKRNSDKLIARKKDWDPKKYGGFDSPTVAYSVLVVAKVEKGKSKKLKSVKELLGITIMERSSFEKNPIDFLEAKGYKEVKKDLIIKLPKYSLFELENGRKRMLASAGELQKGNELALPSKYVNFLYLASHYEKLKGSPEDNEQKQLFVEQHKHYLDEIIEQISEFSKRVILADANLDKVLSAYNKHRDKPIREQAENIIHLFTLTNLGAPAAFKYFDTTIDRKRYTSTKEVLDATLIHQSITGLYETRIDLSQLGGDGGGSSGGGEAAAKGGTLNIEDEHRLHETSKEPDVSLGSTWLSDFPQAWAETGGMGLAVRQAPLIIPLKATSTPVSIKQYPMSQEARLGIKPHIQRLLDQGILVPCQSPWNTPLLPVKKPGTNDYRPVQDLREVNKRVEDIHPTVPNPYNLLSGLPPSHQWYTVLDLKDAFFCLRLHPTSQPLFAFEWRDPEMGISGQLTWTRLPQGFKNSPTLFNEALHRDLADFRIQHPDLILLQYVDDLLLAATSELDCQQGTRALLQTLGNLGYRASAKKAQICQKQVKYLGYLLKEGQRWLTEARKETVMGQPTPKTPRQLREFLGTAGFCRLWIPGFAEMAAPLYPLTKPGTLFNWGPDQQKAYQEIKQALLTAPALGLPDLTKPFELFVDEKQGYAKGVLTQKLGPWRRPVAYLSKKLDPVAAGWPPCLRMVAAIAVLTKDAGKLTMGQPLVILAPHAVEALVKQPPDRWLSNARMTHYQALLLDTDRVQFGPVVALNPATLLPLPEEGLQHNCLDILAEAHGTRPDLTDQPLPDADHTWYTDGSSLLQEGQRKAGAAVTTETEVIWAKALPAGTSAQRAELIALTQALKMAEGKKLNVYTDSRYAFATAHIHGEIYRRRGWLTSEGKEIKNKDEILALLKALFLPKRLSIIHCPGHQKGHSAEARGNRMADQAARKAAITETPDTSTLLAGKRTADGSEFEKRTADGSEFESPKKKAKVE

SEQ ID NO: 2778 - protein, 2091 aa, synthetic construct
MPAAKRVKLDGGDKKYSIGLDIGTNSVGWAVITDEYKVPSKKFKVLGNTDRHSIKKNLIGALLFDSGETAEATRLKRTARRRYTRRKNRICYLQEIFSNEMAKVDDSFFHRLEESFLVEEDKKHERHPIFGNIVDEVAYHEKYPTIYHLRKKLVDSTDKADLRLIYLALAHMIKFRGHFLIEGDLNPDNSDVDKLFIQLVQTYNQLFEENPINASGVDAKAILSARLSKSRRLENLIAQLPGEKKNGLFGNLIALSLGLTPNFKSNFDLAEDAKLQLSKDTYDDDLDNLLAQIGDQYADLFLAAKNLSDAILLSDILRVNTEITKAPLSASMIKRYDEHHQDLTLLKALVRQQLPEKYKEIFFDQSKNGYAGYIDGGASQEEFYKFIKPILEKMDGTEELLVKLNREDLLRKQRTFDNGSIPHQIHLGELHAILRRQEDFYPFLKDNREKIEKILTFRIPYYVGPLARGNSRFAWMTRKSEETITPWNFEEVVDKGASAQSFIERMTNFDKNLPNEKVLPKHSLLYEYFTVYNELTKVKYVTEGMRKPAFLSGEQKKAIVDLLFKTNRKVTVKQLKEDYFKKIECFDSVEISGVEDRFNASLGTYHDLLKIIKDKDFLDNEENEDILEDIVLTLTLFEDREMIEERLKTYAHLFDDKVMKQLKRRRYTGWGRLSRKLINGIRDKQSGKTILDFLKSDGFANRNFMQLIHDDSLTFKEDIQKAQVSGQGDSLHEHIANLAGSPAIKKGILQTVKVVDELVKVMGRHKPENIVIEMARENQTTQKGQKNSRERMKRIEEGIKELGSQILKEHPVENTQLQNEKLYLYYLQNGRDMYVDQELDINRLSDYDVDHIVPQSFLKDDSIDNKVLTRSDKARGKSDNVPSEEVVKKMKNYWRQLLNAKLITQRKFDNLTKAERGGLSELDKAGFIKRQLVETRQITKHVAQILDSRMNTKYDENDKLIREVKVITLKSKLVSDFRKDFQFYKVREINNYHHAHDAYLNAVVGTALIKKYPKLESEFVYGDYKVYDVRKMIAKSEQEIGKATAKYFFYSNIMNFFKTEITLANGEIRKRPLIETNGETGEIVWDKGRDFATVRKVLSMPQVNIVKKTEVQTGGFSKESILPKRNSDKLIARKKDWDPKKYGGFDSPTVAYSVLVVAKVEKGKSKKLKSVKELLGITIMERSSFEKNPIDFLEAKGYKEVKKDLIIKLPKYSLFELENGRKRMLASAGELQKGNELALPSKYVNFLYLASHYEKLKGSPEDNEQKQLFVEQHKHYLDEIIEQISEFSKRVILADANLDKVLSAYNKHRDKPIREQAENIIHLFTLTNLGAPAAFKYFDTTIDRKRYTSTKEVLDATLIHQSITGLYETRIDLSQLGGDGGGSSGGSGGTLNIEDEHRLHETSKEPDVSLGSTWLSDFPQAWAETGGMGLAVRQAPLIIPLKATSTPVSIKQYPMSQEARLGIKPHIQRLLDQGILVPCQSPWNTPLLPVKKPGTNDYRPVQDLREVNKRVEDIHPTVPNPYNLLSGLPPSHQWYTVLDLKDAFFCLRLHPTSQPLFAFEWRDPEMGISGQLTWTRLPQGFKNSPTLFNEALHRDLADFRIQHPDLILLQYVDDLLLAATSELDCQQGTRALLQTLGNLGYRASAKKAQICQKQVKYLGYLLKEGQRWLTEARKETVMGQPTPKTPRQLREFLGTAGFCRLWIPGFAEMAAPLYPLTKPGTLFNWGPDQQKAYQEIKQALLTAPALGLPDLTKPFELFVDEKQGYAKGVLTQKLGPWRRPVAYLSKKLDPVAAGWPPCLRMVAAIAVLTKDAGKLTMGQPLVILAPHAVEALVKQPPDRWLSNARMTHYQALLLDTDRVQFGPVVALNPATLLPLPEEGLQHNCLDILAEAHGTRPDLTDQPLPDADHTWYTDGSSLLQEGQRKAGAAVTTETEVIWAKALPAGTSAQRAELIALTQALKMAEGKKLNVYTDSRYAFATAHIHGEIYRRRGWLTSEGKEIKNKDEILALLKALFLPKRLSIIHCPGHQKGHSAEARGNRMADQAARKAAITETPDTSTLLAGKRTADGSEFEKRTADGSEFESPKKKAKVE

SEQ ID NO: 2779 - protein, 2091 aa, synthetic construct
MPAAKRVKLDGGDKKYSIGLDIGTNSVGWAVITDEYKVPSKKFKVLGNTDRHSIKKNLIGALLFDSGETAEATRLKRTARRRYTRRKNRICYLQEIFSNEMAKVDDSFFHRLEESFLVEEDKKHERHPIFGNIVDEVAYHEKYPTIYHLRKKLVDSTDKADLRLIYLALAHMIKFRGHFLIEGDLNPDNSDVDKLFIQLVQTYNQLFEENPINASGVDAKAILSARLSKSRRLENLIAQLPGEKKNGLFGNLIALSLGLTPNFKSNFDLAEDAKLQLSKDTYDDDLDNLLAQIGDQYADLFLAAKNLSDAILLSDILRVNTEITKAPLSASMIKRYDEHHQDLTLLKALVRQQLPEKYKEIFFDQSKNGYAGYIDGGASQEEFYKFIKPILEKMDGTEELLVKLNREDLLRKQRTFDNGSIPHQIHLGELHAILRRQEDFYPFLKDNREKIEKILTFRIPYYVGPLARGNSRFAWMTRKSEETITPWNFEEVVDKGASAQSFIERMTNFDKNLPNEKVLPKHSLLYEYFTVYNELTKVKYVTEGMRKPAFLSGEQKKAIVDLLFKTNRKVTVKQLKEDYFKKIECFDSVEISGVEDRFNASLGTYHDLLKIIKDKDFLDNEENEDILEDIVLTLTLFEDREMIEERLKTYAHLFDDKVMKQLKRRRYTGWGRLSRKLINGIRDKQSGKTILDFLKSDGFANRNFMQLIHDDSLTFKEDIQKAQVSGQGDSLHEHIANLAGSPAIKKGILQTVKVVDELVKVMGRHKPENIVIEMARENQTTQKGQKNSRERMKRIEEGIKELGSQILKEHPVENTQLQNEKLYLYYLQNGRDMYVDQELDINRLSDYDVDHIVPQSFLKDDSIDNKVLTRSDKARGKSDNVPSEEVVKKMKNYWRQLLNAKLITQRKFDNLTKAERGGLSELDKAGFIKRQLVETRQITKHVAQILDSRMNTKYDENDKLIREVKVITLKSKLVSDFRKDFQFYKVREINNYHHAHDAYLNAVVGTALIKKYPKLESEFVYGDYKVYDVRKMIAKSEQEIGKATAKYFFYSNIMNFFKTEITLANGEIRKRPLIETNGETGEIVWDKGRDFATVRKVLSMPQVNIVKKTEVQTGGFSKESILPKRNSDKLIARKKDWDPKKYGGFDSPTVAYSVLVVAKVEKGKSKKLKSVKELLGITIMERSSFEKNPIDFLEAKGYKEVKKDLIIKLPKYSLFELENGRKRMLASAGELQKGNELALPSKYVNFLYLASHYEKLKGSPEDNEQKQLFVEQHKHYLDEIIEQISEFSKRVILADANLDKVLSAYNKHRDKPIREQAENIIHLFTLTNLGAPAAFKYFDTTIDRKRYTSTKEVLDATLIHQSITGLYETRIDLSQLGGDGGGSSGSSGGTLNIEDEHRLHETSKEPDVSLGSTWLSDFPQAWAETGGMGLAVRQAPLIIPLKATSTPVSIKQYPMSQEARLGIKPHIQRLLDQGILVPCQSPWNTPLLPVKKPGTNDYRPVQDLREVNKRVEDIHPTVPNPYNLLSGLPPSHQWYTVLDLKDAFFCLRLHPTSQPLFAFEWRDPEMGISGQLTWTRLPQGFKNSPTLFNEALHRDLADFRIQHPDLILLQYVDDLLLAATSELDCQQGTRALLQTLGNLGYRASAKKAQICQKQVKYLGYLLKEGQRWLTEARKETVMGQPTPKTPRQLREFLGTAGFCRLWIPGFAEMAAPLYPLTKPGTLFNWGPDQQKAYQEIKQALLTAPALGLPDLTKPFELFVDEKQGYAKGVLTQKLGPWRRPVAYLSKKLDPVAAGWPPCLRMVAAIAVLTKDAGKLTMGQPLVILAPHAVEALVKQPPDRWLSNARMTHYQALLLDTDRVQFGPVVALNPATLLPLPEEGLQHNCLDILAEAHGTRPDLTDQPLPDADHTWYTDGSSLLQEGQRKAGAAVTTETEVIWAKALPAGTSAQRAELIALTQALKMAEGKKLNVYTDSRYAFATAHIHGEIYRRRGWLTSEGKEIKNKDEILALLKALFLPKRLSIIHCPGHQKGHSAEARGNRMADQAARKAAITETPDTSTLLAGKRTADGSEFEKRTADGSEFESPKKKAKVE

SEQ ID NO: 2780 - protein, 2091 aa, synthetic construct
MPAAKRVKLDGGDKKYSIGLDIGTNSVGWAVITDEYKVPSKKFKVLGNTDRHSIKKNLIGALLFDSGETAEATRLKRTARRRYTRRKNRICYLQEIFSNEMAKVDDSFFHRLEESFLVEEDKKHERHPIFGNIVDEVAYHEKYPTIYHLRKKLVDSTDKADLRLIYLALAHMIKFRGHFLIEGDLNPDNSDVDKLFIQLVQTYNQLFEENPINASGVDAKAILSARLSKSRRLENLIAQLPGEKKNGLFGNLIALSLGLTPNFKSNFDLAEDAKLQLSKDTYDDDLDNLLAQIGDQYADLFLAAKNLSDAILLSDILRVNTEITKAPLSASMIKRYDEHHQDLTLLKALVRQQLPEKYKEIFFDQSKNGYAGYIDGGASQEEFYKFIKPILEKMDGTEELLVKLNREDLLRKQRTFDNGSIPHQIHLGELHAILRRQEDFYPFLKDNREKIEKILTFRIPYYVGPLARGNSRFAWMTRKSEETITPWNFEEVVDKGASAQSFIERMTNFDKNLPNEKVLPKHSLLYEYFTVYNELTKVKYVTEGMRKPAFLSGEQKKAIVDLLFKTNRKVTVKQLKEDYFKKIECFDSVEISGVEDRFNASLGTYHDLLKIIKDKDFLDNEENEDILEDIVLTLTLFEDREMIEERLKTYAHLFDDKVMKQLKRRRYTGWGRLSRKLINGIRDKQSGKTILDFLKSDGFANRNFMQLIHDDSLTFKEDIQKAQVSGQGDSLHEHIANLAGSPAIKKGILQTVKVVDELVKVMGRHKPENIVIEMARENQTTQKGQKNSRERMKRIEEGIKELGSQILKEHPVENTQLQNEKLYLYYLQNGRDMYVDQELDINRLSDYDVDHIVPQSFLKDDSIDNKVLTRSDKARGKSDNVPSEEVVKKMKNYWRQLLNAKLITQRKFDNLTKAERGGLSELDKAGFIKRQLVETRQITKHVAQILDSRMNTKYDENDKLIREVKVITLKSKLVSDFRKDFQFYKVREINNYHHAHDAYLNAVVGTALIKKYPKLESEFVYGDYKVYDVRKMIAKSEQEIGKATAKYFFYSNIMNFFKTEITLANGEIRKRPLIETNGETGEIVWDKGRDFATVRKVLSMPQVNIVKKTEVQTGGFSKESILPKRNSDKLIARKKDWDPKKYGGFDSPTVAYSVLVVAKVEKGKSKKLKSVKELLGITIMERSSFEKNPIDFLEAKGYKEVKKDLIIKLPKYSLFELENGRKRMLASAGELQKGNELALPSKYVNFLYLASHYEKLKGSPEDNEQKQLFVEQHKHYLDEIIEQISEFSKRVILADANLDKVLSAYNKHRDKPIREQAENIIHLFTLTNLGAPAAFKYFDTTIDRKRYTSTKEVLDATLIHQSITGLYETRIDLSQLGGDGGGGGGGSGGTLNIEDEHRLHETSKEPDVSLGSTWLSDFPQAWAETGGMGLAVRQAPLIIPLKATSTPVSIKQYPMSQEARLGIKPHIQRLLDQGILVPCQSPWNTPLLPVKKPGTNDYRPVQDLREVNKRVEDIHPTVPNPYNLLSGLPPSHQWYTVLDLKDAFFCLRLHPTSQPLFAFEWRDPEMGISGQLTWTRLPQGFKNSPTLFNEALHRDLADFRIQHPDLILLQYVDDLLLAATSELDCQQGTRALLQTLGNLGYRASAKKAQICQKQVKYLGYLLKEGQRWLTEARKETVMGQPTPKTPRQLREFLGKAGFCRLFIPGFAEMAAPLYPLTKPGTLFNWGPDQQKAYQEIKQALLTAPALGLPDLTKPFELFVDEKQGYAKGVLTQKLGPWRRPVAYLSKKLDPVAAGWPPCLRMVAAIAVLTKDAGKLTMGQPLVILAPHAVEALVKQPPDRWLSNARMTHYQALLLDTDRVQFGPVVALNPATLLPLPEEGLQHNCLDILAEAHGTRPDLTDQPLPDADHTWYTDGSSLLQEGQRKAGAAVTTETEVIWAKALPAGTSAQRAELIALTQALKMAEGKKLNVYTDSRYAFATAHIHGEIYRRRGWLTSEGKEIKNKDEILALLKALFLPKRLSIIHCPGHQKGHSAEARGNRMADQAARKAAITETPDTSTLLAGKRTADGSEFEKRTADGSEFESPKKKAKVE

SEQ ID NO: 2781 - protein, 2096 aa, synthetic construct
MPAAKRVKLDGGDKKYSIGLDIGTNSVGWAVITDEYKVPSKKFKVLGNTDRHSIKKNLIGALLFDSGETAEATRLKRTARRRYTRRKNRICYLQEIFSNEMAKVDDSFFHRLEESFLVEEDKKHERHPIFGNIVDEVAYHEKYPTIYHLRKKLVDSTDKADLRLIYLALAHMIKFRGHFLIEGDLNPDNSDVDKLFIQLVQTYNQLFEENPINASGVDAKAILSARLSKSRRLENLIAQLPGEKKNGLFGNLIALSLGLTPNFKSNFDLAEDAKLQLSKDTYDDDLDNLLAQIGDQYADLFLAAKNLSDAILLSDILRVNTEITKAPLSASMIKRYDEHHQDLTLLKALVRQQLPEKYKEIFFDQSKNGYAGYIDGGASQEEFYKFIKPILEKMDGTEELLVKLNREDLLRKQRTFDNGSIPHQIHLGELHAILRRQEDFYPFLKDNREKIEKILTFRIPYYVGPLARGNSRFAWMTRKSEETITPWNFEEVVDKGASAQSFIERMTNFDKNLPNEKVLPKHSLLYEYFTVYNELTKVKYVTEGMRKPAFLSGEQKKAIVDLLFKTNRKVTVKQLKEDYFKKIECFDSVEISGVEDRFNASLGTYHDLLKIIKDKDFLDNEENEDILEDIVLTLTLFEDREMIEERLKTYAHLFDDKVMKQLKRRRYTGWGRLSRKLINGIRDKQSGKTILDFLKSDGFANRNFMQLIHDDSLTFKEDIQKAQVSGQGDSLHEHIANLAGSPAIKKGILQTVKVVDELVKVMGRHKPENIVIEMARENQTTQKGQKNSRERMKRIEEGIKELGSQILKEHPVENTQLQNEKLYLYYLQNGRDMYVDQELDINRLSDYDVDHIVPQSFLKDDSIDNKVLTRSDKARGKSDNVPSEEVVKKMKNYWRQLLNAKLITQRKFDNLTKAERGGLSELDKAGFIKRQLVETRQITKHVAQILDSRMNTKYDENDKLIREVKVITLKSKLVSDFRKDFQFYKVREINNYHHAHDAYLNAVVGTALIKKYPKLESEFVYGDYKVYDVRKMIAKSEQEIGKATAKYFFYSNIMNFFKTEITLANGEIRKRPLIETNGETGEIVWDKGRDFATVRKVLSMPQVNIVKKTEVQTGGFSKESILPKRNSDKLIARKKDWDPKKYGGFDSPTVAYSVLVVAKVEKGKSKKLKSVKELLGITIMERSSFEKNPIDFLEAKGYKEVKKDLIIKLPKYSLFELENGRKRMLASAGELQKGNELALPSKYVNFLYLASHYEKLKGSPEDNEQKQLFVEQHKHYLDEIIEQISEFSKRVILADANLDKVLSAYNKHRDKPIREQAENIIHLFTLTNLGAPAAFKYFDTTIDRKRYTSTKEVLDATLIHQSITGLYETRIDLSQLGGDGGEAAAKPAPGSSGGTLNIEDEHRLHETSKEPDVSLGSTWLSDFPQAWAETGGMGLAVRQAPLIIPLKATSTPVSIKQYPMSQEARLGIKPHIQRLLDQGILVPCQSPWNTPLLPVKKPGTNDYRPVQDLREVNKRVEDIHPTVPNPYNLLSGLPPSHQWYTVLDLKDAFFCLRLHPTSQPLFAFEWRDPEMGISGQLTWTRLPQGFKNSPTLFNEALHRDLADFRIQHPDLILLQYVDDLLLAATSELDCQQGTRALLQTLGNLGYRASAKKAQICQKQVKYLGYLLKEGQRWLTEARKETVMGQPTPKTPRQLREFLGKAGFCRLFIPGFAEMAAPLYPLTKPGTLFNWGPDQQKAYQEIKQALLTAPALGLPDLTKPFELFVDEKQGYAKGVLTQKLGPWRRPVAYLSKKLDPVAAGWPPCLRMVAAIAVLTKDAGKLTMGQPLVILAPHAVEALVKQPPDRWLSNARMTHYQALLLDTDRVQFGPVVALNPATLLPLPEEGLQHNCLDILAEAHGTRPDLTDQPLPDADHTWYTDGSSLLQEGQRKAGAAVTTETEVIWAKALPAGTSAQRAELIALTQALKMAEGKKLNVYTDSRYAFATAHIHGEIYRRRGWLTSEGKEIKNKDEILALLKALFLPKRLSIIHCPGHQKGHSAEARGNRMADQAARKAAITETPDTSTLLAGKRTADGSEFEKRTADGSEFESPKKKAKVE

SEQ ID NO: 2782 - protein, 2096 aa, synthetic construct
MPAAKRVKLDGGDKKYSIGLDIGTNSVGWAVITDEYKVPSKKFKVLGNTDRHSIKKNLIGALLFDSGETAEATRLKRTARRRYTRRKNRICYLQEIFSNEMAKVDDSFFHRLEESFLVEEDKKHERHPIFGNIVDEVAYHEKYPTIYHLRKKLVDSTDKADLRLIYLALAHMIKFRGHFLIEGDLNPDNSDVDKLFIQLVQTYNQLFEENPINASGVDAKAILSARLSKSRRLENLIAQLPGEKKNGLFGNLIALSLGLTPNFKSNFDLAEDAKLQLSKDTYDDDLDNLLAQIGDQYADLFLAAKNLSDAILLSDILRVNTEITKAPLSASMIKRYDEHHQDLTLLKALVRQQLPEKYKEIFFDQSKNGYAGYIDGGASQEEFYKFIKPILEKMDGTEELLVKLNREDLLRKQRTFDNGSIPHQIHLGELHAILRRQEDFYPFLKDNREKIEKILTFRIPYYVGPLARGNSRFAWMTRKSEETITPWNFEEVVDKGASAQSFIERMTNFDKNLPNEKVLPKHSLLYEYFTVYNELTKVKYVTEGMRKPAFLSGEQKKAIVDLLFKTNRKVTVKQLKEDYFKKIECFDSVEISGVEDRFNASLGTYHDLLKIIKDKDFLDNEENEDILEDIVLTLTLFEDREMIEERLKTYAHLFDDKVMKQLKRRRYTGWGRLSRKLINGIRDKQSGKTILDFLKSDGFANRNFMQLIHDDSLTFKEDIQKAQVSGQGDSLHEHIANLAGSPAIKKGILQTVKVVDELVKVMGRHKPENIVIEMARENQTTQKGQKNSRERMKRIEEGIKELGSQILKEHPVENTQLQNEKLYLYYLQNGRDMYVDQELDINRLSDYDVDHIVPQSFLKDDSIDNKVLTRSDKARGKSDNVPSEEVVKKMKNYWRQLLNAKLITQRKFDNLTKAERGGLSELDKAGFIKRQLVETRQITKHVAQILDSRMNTKYDENDKLIREVKVITLKSKLVSDFRKDFQFYKVREINNYHHAHDAYLNAVVGTALIKKYPKLESEFVYGDYKVYDVRKMIAKSEQEIGKATAKYFFYSNIMNFFKTEITLANGEIRKRPLIETNGETGEIVWDKGRDFATVRKVLSMPQVNIVKKTEVQTGGFSKESILPKRNSDKLIARKKDWDPKKYGGFDSPTVAYSVLVVAKVEKGKSKKLKSVKELLGITIMERSSFEKNPIDFLEAKGYKEVKKDLIIKLPKYSLFELENGRKRMLASAGELQKGNELALPSKYVNFLYLASHYEKLKGSPEDNEQKQLFVEQHKHYLDEIIEQISEFSKRVILADANLDKVLSAYNKHRDKPIREQAENIIHLFTLTNLGAPAAFKYFDTTIDRKRYTSTKEVLDATLIHQSITGLYETRIDLSQLGGDGGEAAAKGGSPAPGGTLNIEDEHRLHETSKEPDVSLGSTWLSDFPQAWAETGGMGLAVRQAPLIIPLKATSTPVSIKQYPMSQEARLGIKPHIQRLLDQGILVPCQSPWNTPLLPVKKPGTNDYRPVQDLREVNKRVEDIHPTVPNPYNLLSGLPPSHQWYTVLDLKDAFFCLRLHPTSQPLFAFEWRDPEMGISGQLTWTRLPQGFKNSPTLFNEALHRDLADFRIQHPDLILLQYVDDLLLAATSELDCQQGTRALLQTLGNLGYRASAKKAQICQKQVKYLGYLLKEGQRWLTEARKETVMGQPTPKTPRQLREFLGKAGFCRLFIPGFAEMAAPLYPLTKPGTLFNWGPDQQKAYQEIKQALLTAPALGLPDLTKPFELFVDEKQGYAKGVLTQKLGPWRRPVAYLSKKLDPVAAGWPPCLRMVAAIAVLTKDAGKLTMGQPLVILAPHAVEALVKQPPDRWLSNARMTHYQALLLDTDRVQFGPVVALNPATLLPLPEEGLQHNCLDILAEAHGTRPDLTDQPLPDADHTWYTDGSSLLQEGQRKAGAAVTTETEVIWAKALPAGTSAQRAELIALTQALKMAEGKKLNVYTDSRYAFATAHIHGEIYRRRGWLTSEGKEIKNKDEILALLKALFLPKRLSIIHCPGHQKGHSAEARGNRMADQAARKAAITETPDTSTLLAGKRTADGSEFEKRTADGSEFESPKKKAKVE

SEQ ID NO: 2783 - protein, 2093 aa, synthetic construct
MPAAKRVKLDGGDKKYSIGLDIGTNSVGWAVITDEYKVPSKKFKVLGNTDRHSIKKNLIGALLFDSGETAEATRLKRTARRRYTRRKNRICYLQEIFSNEMAKVDDSFFHRLEESFLVEEDKKHERHPIFGNIVDEVAYHEKYPTIYHLRKKLVDSTDKADLRLIYLALAHMIKFRGHFLIEGDLNPDNSDVDKLFIQLVQTYNQLFEENPINASGVDAKAILSARLSKSRRLENLIAQLPGEKKNGLFGNLIALSLGLTPNFKSNFDLAEDAKLQLSKDTYDDDLDNLLAQIGDQYADLFLAAKNLSDAILLSDILRVNTEITKAPLSASMIKRYDEHHQDLTLLKALVRQQLPEKYKEIFFDQSKNGYAGYIDGGASQEEFYKFIKPILEKMDGTEELLVKLNREDLLRKQRTFDNGSIPHQIHLGELHAILRRQEDFYPFLKDNREKIEKILTFRIPYYVGPLARGNSRFAWMTRKSEETITPWNFEEVVDKGASAQSFIERMTNFDKNLPNEKVLPKHSLLYEYFTVYNELTKVKYVTEGMRKPAFLSGEQKKAIVDLLFKTNRKVTVKQLKEDYFKKIECFDSVEISGVEDRFNASLGTYHDLLKIIKDKDFLDNEENEDILEDIVLTLTLFEDREMIEERLKTYAHLFDDKVMKQLKRRRYTGWGRLSRKLINGIRDKQSGKTILDFLKSDGFANRNFMQLIHDDSLTFKEDIQKAQVSGQGDSLHEHIANLAGSPAIKKGILQTVKVVDELVKVMGRHKPENIVIEMARENQTTQKGQKNSRERMKRIEEGIKELGSQILKEHPVENTQLQNEKLYLYYLQNGRDMYVDQELDINRLSDYDVDHIVPQSFLKDDSIDNKVLTRSDKARGKSDNVPSEEVVKKMKNYWRQLLNAKLITQRKFDNLTKAERGGLSELDKAGFIKRQLVETRQITKHVAQILDSRMNTKYDENDKLIREVKVITLKSKLVSDFRKDFQFYKVREINNYHHAHDAYLNAVVGTALIKKYPKLESEFVYGDYKVYDVRKMIAKSEQEIGKATAKYFFYSNIMNFFKTEITLANGEIRKRPLIETNGETGEIVWDKGRDFATVRKVLSMPQVNIVKKTEVQTGGFSKESILPKRNSDKLIARKKDWDPKKYGGFDSPTVAYSVLVVAKVEKGKSKKLKSVKELLGITIMERSSFEKNPIDFLEAKGYKEVKKDLIIKLPKYSLFELENGRKRMLASAGELQKGNELALPSKYVNFLYLASHYEKLKGSPEDNEQKQLFVEQHKHYLDEIIEQISEFSKRVILADANLDKVLSAYNKHRDKPIREQAENIIHLFTLTNLGAPAAFKYFDTTIDRKRYTSTKEVLDATLIHQSITGLYETRIDLSQLGGDGGEAAAKGGSGGTLNIEDEHRLHETSKEPDVSLGSTWLSDFPQAWAETGGMGLAVRQAPLIIPLKATSTPVSIKQYPMSQEARLGIKPHIQRLLDQGILVPCQSPWNTPLLPVKKPGTNDYRPVQDLREVNKRVEDIHPTVPNPYNLLSGLPPSHQWYTVLDLKDAFFCLRLHPTSQPLFAFEWRDPEMGISGQLTWTRLPQGFKNSPTLFNEALHRDLADFRIQHPDLILLQYVDDLLLAATSELDCQQGTRALLQTLGNLGYRASAKKAQICQKQVKYLGYLLKEGQRWLTEARKETVMGQPTPKTPRQLREFLGKAGFCRLFIPGFAEMAAPLYPLTKPGTLFNWGPDQQKAYQEIKQALLTAPALGLPDLTKPFELFVDEKQGYAKGVLTQKLGPWRRPVAYLSKKLDPVAAGWPPCLRMVAAIAVLTKDAGKLTMGQPLVILAPHAVEALVKQPPDRWLSNARMTHYQALLLDTDRVQFGPVVALNPATLLPLPEEGLQHNCLDILAEAHGTRPDLTDQPLPDADHTWYTDGSSLLQEGQRKAGAAVTTETEVIWAKALPAGTSAQRAELIALTQALKMAEGKKLNVYTDSRYAFATAHIHGEIYRRRGWLTSEGKEIKNKDEILALLKALFLPKRLSIIHCPGHQKGHSAEARGNRMADQAARKAAITETPDTSTLLAGKRTADGSEFEKRTADGSEFESPKKKAKVE

SEQ ID NO: 2784 - protein, 2131 aa, synthetic construct
MPAAKRVKLDGGDKKYSIGLDIGTNSVGWAVITDEYKVPSKKFKVLGNTDRHSIKKNLIGALLFDSGETAEATRLKRTARRRYTRRKNRICYLQEIFSNEMAKVDDSFFHRLEESFLVEEDKKHERHPIFGNIVDEVAYHEKYPTIYHLRKKLVDSTDKADLRLIYLALAHMIKFRGHFLIEGDLNPDNSDVDKLFIQLVQTYNQLFEENPINASGVDAKAILSARLSKSRRLENLIAQLPGEKKNGLFGNLIALSLGLTPNFKSNFDLAEDAKLQLSKDTYDDDLDNLLAQIGDQYADLFLAAKNLSDAILLSDILRVNTEITKAPLSASMIKRYDEHHQDLTLLKALVRQQLPEKYKEIFFDQSKNGYAGYIDGGASQEEFYKFIKPILEKMDGTEELLVKLNREDLLRKQRTFDNGSIPHQIHLGELHAILRRQEDFYPFLKDNREKIEKILTFRIPYYVGPLARGNSRFAWMTRKSEETITPWNFEEVVDKGASAQSFIERMTNFDKNLPNEKVLPKHSLLYEYFTVYNELTKVKYVTEGMRKPAFLSGEQKKAIVDLLFKTNRKVTVKQLKEDYFKKIECFDSVEISGVEDRFNASLGTYHDLLKIIKDKDFLDNEENEDILEDIVLTLTLFEDREMIEERLKTYAHLFDDKVMKQLKRRRYTGWGRLSRKLINGIRDKQSGKTILDFLKSDGFANRNFMQLIHDDSLTFKEDIQKAQVSGQGDSLHEHIANLAGSPAIKKGILQTVKVVDELVKVMGRHKPENIVIEMARENQTTQKGQKNSRERMKRIEEGIKELGSQILKEHPVENTQLQNEKLYLYYLQNGRDMYVDQELDINRLSDYDVDHIVPQSFLKDDSIDNKVLTRSDKARGKSDNVPSEEVVKKMKNYWRQLLNAKLITQRKFDNLTKAERGGLSELDKAGFIKRQLVETRQITKHVAQILDSRMNTKYDENDKLIREVKVITLKSKLVSDFRKDFQFYKVREINNYHHAHDAYLNAVVGTALIKKYPKLESEFVYGDYKVYDVRKMIAKSEQEIGKATAKYFFYSNIMNFFKTEITLANGEIRKRPLIETNGETGEIVWDKGRDFATVRKVLSMPQVNIVKKTEVQTGGFSKESILPKRNSDKLIARKKDWDPKKYGGFDSPTVAYSVLVVAKVEKGKSKKLKSVKELLGITIMERSSFEKNPIDFLEAKGYKEVKKDLIIKLPKYSLFELENGRKRMLASAGELQKGNELALPSKYVNFLYLASHYEKLKGSPEDNEQKQLFVEQHKHYLDEIIEQISEFSKRVILADANLDKVLSAYNKHRDKPIREQAENIIHLFTLTNLGAPAAFKYFDTTIDRKRYTSTKEVLDATLIHQSITGLYETRIDLSQLGGDGGAEAAAKEAAAKEAAAKEAAAKALEAEAAAKEAAAKEAAAKEAAAKAGGTLNIEDEHRLHETSKEPDVSLGSTWLSDFPQAWAETGGMGLAVRQAPLIIPLKATSTPVSIKQYPMSQEARLGIKPHIQRLLDQGILVPCQSPWNTPLLPVKKPGTNDYRPVQDLREVNKRVEDIHPTVPNPYNLLSGLPPSHQWYTVLDLKDAFFCLRLHPTSQPLFAFEWRDPEMGISGQLTWTRLPQGFKNSPTLFNEALHRDLADFRIQHPDLILLQYVDDLLLAATSELDCQQGTRALLQTLGNLGYRASAKKAQICQKQVKYLGYLLKEGQRWLTEARKETVMGQPTPKTPRQLREFLGKAGFCRLFIPGFAEMAAPLYPLTKPGTLFNWGPDQQKAYQEIKQALLTAPALGLPDLTKPFELFVDEKQGYAKGVLTQKLGPWRRPVAYLSKKLDPVAAGWPPCLRMVAAIAVLTKDAGKLTMGQPLVILAPHAVEALVKQPPDRWLSNARMTHYQALLLDTDRVQFGPVVALNPATLLPLPEEGLQHNCLDILAEAHGTRPDLTDQPLPDADHTWYTDGSSLLQEGQRKAGAAVTTETEVIWAKALPAGTSAQRAELIALTQALKMAEGKKLNVYTDSRYAFATAHIHGEIYRRRGWLTSEGKEIKNKDEILALLKALFLPKRLSIIHCPGHQKGHSAEARGNRMADQAARKAAITETPDTSTLLAGKRTADGSEFEKRTADGSEFESPKKKAKVE

SEQ ID NO: 2785 - protein, 2096 aa, synthetic construct
MPAAKRVKLDGGDKKYSIGLDIGTNSVGWAVITDEYKVPSKKFKVLGNTDRHSIKKNLIGALLFDSGETAEATRLKRTARRRYTRRKNRICYLQEIFSNEMAKVDDSFFHRLEESFLVEEDKKHERHPIFGNIVDEVAYHEKYPTIYHLRKKLVDSTDKADLRLIYLALAHMIKFRGHFLIEGDLNPDNSDVDKLFIQLVQTYNQLFEENPINASGVDAKAILSARLSKSRRLENLIAQLPGEKKNGLFGNLIALSLGLTPNFKSNFDLAEDAKLQLSKDTYDDDLDNLLAQIGDQYADLFLAAKNLSDAILLSDILRVNTEITKAPLSASMIKRYDEHHQDLTLLKALVRQQLPEKYKEIFFDQSKNGYAGYIDGGASQEEFYKFIKPILEKMDGTEELLVKLNREDLLRKQRTFDNGSIPHQIHLGELHAILRRQEDFYPFLKDNREKIEKILTFRIPYYVGPLARGNSRFAWMTRKSEETITPWNFEEVVDKGASAQSFIERMTNFDKNLPNEKVLPKHSLLYEYFTVYNELTKVKYVTEGMRKPAFLSGEQKKAIVDLLFKTNRKVTVKQLKEDYFKKIECFDSVEISGVEDRFNASLGTYHDLLKIIKDKDFLDNEENEDILEDIVLTLTLFEDREMIEERLKTYAHLFDDKVMKQLKRRRYTGWGRLSRKLINGIRDKQSGKTILDFLKSDGFANRNFMQLIHDDSLTFKEDIQKAQVSGQGDSLHEHIANLAGSPAIKKGILQTVKVVDELVKVMGRHKPENIVIEMARENQTTQKGQKNSRERMKRIEEGIKELGSQILKEHPVENTQLQNEKLYLYYLQNGRDMYVDQELDINRLSDYDVDHIVPQSFLKDDSIDNKVLTRSDKARGKSDNVPSEEVVKKMKNYWRQLLNAKLITQRKFDNLTKAERGGLSELDKAGFIKRQLVETRQITKHVAQILDSRMNTKYDENDKLIREVKVITLKSKLVSDFRKDFQFYKVREINNYHHAHDAYLNAVVGTALIKKYPKLESEFVYGDYKVYDVRKMIAKSEQEIGKATAKYFFYSNIMNFFKTEITLANGEIRKRPLIETNGETGEIVWDKGRDFATVRKVLSMPQVNIVKKTEVQTGGFSKESILPKRNSDKLIARKKDWDPKKYGGFDSPTVAYSVLVVAKVEKGKSKKLKSVKELLGITIMERSSFEKNPIDFLEAKGYKEVKKDLIIKLPKYSLFELENGRKRMLASAGELQKGNELALPSKYVNFLYLASHYEKLKGSPEDNEQKQLFVEQHKHYLDEIIEQISEFSKRVILADANLDKVLSAYNKHRDKPIREQAENIIHLFTLTNLGAPAAFKYFDTTIDRKRYTSTKEVLDATLIHQSITGLYETRIDLSQLGGDGGEAAAKGSSGGGGGTLNIEDEHRLHETSKEPDVSLGSTWLSDFPQAWAETGGMGLAVRQAPLIIPLKATSTPVSIKQYPMSQEARLGIKPHIQRLLDQGILVPCQSPWNTPLLPVKKPGTNDYRPVQDLREVNKRVEDIHPTVPNPYNLLSGLPPSHQWYTVLDLKDAFFCLRLHPTSQPLFAFEWRDPEMGISGQLTWTRLPQGFKNSPTLFNEALHRDLADFRIQHPDLILLQYVDDLLLAATSELDCQQGTRALLQTLGNLGYRASAKKAQICQKQVKYLGYLLKEGQRWLTEARKETVMGQPTPKTPRQLREFLGKAGFCRLFIPGFAEMAAPLYPLTKPGTLFNWGPDQQKAYQEIKQALLTAPALGLPDLTKPFELFVDEKQGYAKGVLTQKLGPWRRPVAYLSKKLDPVAAGWPPCLRMVAAIAVLTKDAGKLTMGQPLVILAPHAVEALVKQPPDRWLSNARMTHYQALLLDTDRVQFGPVVALNPATLLPLPEEGLQHNCLDILAEAHGTRPDLTDQPLPDADHTWYTDGSSLLQEGQRKAGAAVTTETEVIWAKALPAGTSAQRAELIALTQALKMAEGKKLNVYTDSRYAFATAHIHGEIYRRRGWLTSEGKEIKNKDEILALLKALFLPKRLSIIHCPGHQKGHSAEARGNRMADQAARKAAITETPDTSTLLAGKRTADGSEFEKRTADGSEFESPKKKAKVE

SEQ ID NO: 2786 - protein, 2096 aa, synthetic construct
MPAAKRVKLDGGDKKYSIGLDIGTNSVGWAVITDEYKVPSKKFKVLGNTDRHSIKKNLIGALLFDSGETAEATRLKRTARRRYTRRKNRICYLQEIFSNEMAKVDDSFFHRLEESFLVEEDKKHERHPIFGNIVDEVAYHEKYPTIYHLRKKLVDSTDKADLRLIYLALAHMIKFRGHFLIEGDLNPDNSDVDKLFIQLVQTYNQLFEENPINASGVDAKAILSARLSKSRRLENLIAQLPGEKKNGLFGNLIALSLGLTPNFKSNFDLAEDAKLQLSKDTYDDDLDNLLAQIGDQYADLFLAAKNLSDAILLSDILRVNTEITKAPLSASMIKRYDEHHQDLTLLKALVRQQLPEKYKEIFFDQSKNGYAGYIDGGASQEEFYKFIKPILEKMDGTEELLVKLNREDLLRKQRTFDNGSIPHQIHLGELHAILRRQEDFYPFLKDNREKIEKILTFRIPYYVGPLARGNSRFAWMTRKSEETITPWNFEEVVDKGASAQSFIERMTNFDKNLPNEKVLPKHSLLYEYFTVYNELTKVKYVTEGMRKPAFLSGEQKKAIVDLLFKTNRKVTVKQLKEDYFKKIECFDSVEISGVEDRFNASLGTYHDLLKIIKDKDFLDNEENEDILEDIVLTLTLFEDREMIEERLKTYAHLFDDKVMKQLKRRRYTGWGRLSRKLINGIRDKQSGKTILDFLKSDGFANRNFMQLIHDDSLTFKEDIQKAQVSGQGDSLHEHIANLAGSPAIKKGILQTVKVVDELVKVMGRHKPENIVIEMARENQTTQKGQKNSRERMKRIEEGIKELGSQILKEHPVENTQLQNEKLYLYYLQNGRDMYVDQELDINRLSDYDVDHIVPQSFLKDDSIDNKVLTRSDKARGKSDNVPSEEVVKKMKNYWRQLLNAKLITQRKFDNLTKAERGGLSELDKAGFIKRQLVETRQITKHVAQILDSRMNTKYDENDKLIREVKVITLKSKLVSDFRKDFQFYKVREINNYHHAHDAYLNAVVGTALIKKYPKLESEFVYGDYKVYDVRKMIAKSEQEIGKATAKYFFYSNIMNFFKTEITLANGEIRKRPLIETNGETGEIVWDKGRDFATVRKVLSMPQVNIVKKTEVQTGGFSKESILPKRNSDKLIARKKDWDPKKYGGFDSPTVAYSVLVVAKVEKGKSKKLKSVKELLGITIMERSSFEKNPIDFLEAKGYKEVKKDLIIKLPKYSLFELENGRKRMLASAGELQKGNELALPSKYVNFLYLASHYEKLKGSPEDNEQKQLFVEQHKHYLDEIIEQISEFSKRVILADANLDKVLSAYNKHRDKPIREQAENIIHLFTLTNLGAPAAFKYFDTTIDRKRYTSTKEVLDATLIHQSITGLYETRIDLSQLGGDGGPAPGGSEAAAKGGTLNIEDEHRLHETSKEPDVSLGSTWLSDFPQAWAETGGMGLAVRQAPLIIPLKATSTPVSIKQYPMSQEARLGIKPHIQRLLDQGILVPCQSPWNTPLLPVKKPGTNDYRPVQDLREVNKRVEDIHPTVPNPYNLLSGLPPSHQWYTVLDLKDAFFCLRLHPTSQPLFAFEWRDPEMGISGQLTWTRLPQGFKNSPTLFNEALHRDLADFRIQHPDLILLQYVDDLLLAATSELDCQQGTRALLQTLGNLGYRASAKKAQICQKQVKYLGYLLKEGQRWLTEARKETVMGQPTPKTPRQLREFLGKAGFCRLFIPGFAEMAAPLYPLTKPGTLFNWGPDQQKAYQEIKQALLTAPALGLPDLTKPFELFVDEKQGYAKGVLTQKLGPWRRPVAYLSKKLDPVAAGWPPCLRMVAAIAVLTKDAGKLTMGQPLVILAPHAVEALVKQPPDRWLSNARMTHYQALLLDTDRVQFGPVVALNPATLLPLPEEGLQHNCLDILAEAHGTRPDLTDQPLPDADHTWYTDGSSLLQEGQRKAGAAVTTETEVIWAKALPAGTSAQRAELIALTQALKMAEGKKLNVYTDSRYAFATAHIHGEIYRRRGWLTSEGKEIKNKDEILALLKALFLPKRLSIIHCPGHQKGHSAEARGNRMADQAARKAAITETPDTSTLLAGKRTADGSEFEKRTADGSEFESPKKKAKVE

SEQ ID NO: 2787 - protein, 2096 aa, synthetic construct
MPAAKRVKLDGGDKKYSIGLDIGTNSVGWAVITDEYKVPSKKFKVLGNTDRHSIKKNLIGALLFDSGETAEATRLKRTARRRYTRRKNRICYLQEIFSNEMAKVDDSFFHRLEESFLVEEDKKHERHPIFGNIVDEVAYHEKYPTIYHLRKKLVDSTDKADLRLIYLALAHMIKFRGHFLIEGDLNPDNSDVDKLFIQLVQTYNQLFEENPINASGVDAKAILSARLSKSRRLENLIAQLPGEKKNGLFGNLIALSLGLTPNFKSNFDLAEDAKLQLSKDTYDDDLDNLLAQIGDQYADLFLAAKNLSDAILLSDILRVNTEITKAPLSASMIKRYDEHHQDLTLLKALVRQQLPEKYKEIFFDQSKNGYAGYIDGGASQEEFYKFIKPILEKMDGTEELLVKLNREDLLRKQRTFDNGSIPHQIHLGELHAILRRQEDFYPFLKDNREKIEKILTFRIPYYVGPLARGNSRFAWMTRKSEETITPWNFEEVVDKGASAQSFIERMTNFDKNLPNEKVLPKHSLLYEYFTVYNELTKVKYVTEGMRKPAFLSGEQKKAIVDLLFKTNRKVTVKQLKEDYFKKIECFDSVEISGVEDRFNASLGTYHDLLKIIKDKDFLDNEENEDILEDIVLTLTLFEDREMIEERLKTYAHLFDDKVMKQLKRRRYTGWGRLSRKLINGIRDKQSGKTILDFLKSDGFANRNFMQLIHDDSLTFKEDIQKAQVSGQGDSLHEHIANLAGSPAIKKGILQTVKVVDELVKVMGRHKPENIVIEMARENQTTQKGQKNSRERMKRIEEGIKELGSQILKEHPVENTQLQNEKLYLYYLQNGRDMYVDQELDINRLSDYDVDHIVPQSFLKDDSIDNKVLTRSDKARGKSDNVPSEEVVKKMKNYWRQLLNAKLITQRKFDNLTKAERGGLSELDKAGFIKRQLVETRQITKHVAQILDSRMNTKYDENDKLIREVKVITLKSKLVSDFRKDFQFYKVREINNYHHAHDAYLNAVVGTALIKKYPKLESEFVYGDYKVYDVRKMIAKSEQEIGKATAKYFFYSNIMNFFKTEITLANGEIRKRPLIETNGETGEIVWDKGRDFATVRKVLSMPQVNIVKKTEVQTGGFSKESILPKRNSDKLIARKKDWDPKKYGGFDSPTVAYSVLVVAKVEKGKSKKLKSVKELLGITIMERSSFEKNPIDFLEAKGYKEVKKDLIIKLPKYSLFELENGRKRMLASAGELQKGNELALPSKYVNFLYLASHYEKLKGSPEDNEQKQLFVEQHKHYLDEIIEQISEFSKRVILADANLDKVLSAYNKHRDKPIREQAENIIHLFTLTNLGAPAAFKYFDTTIDRKRYTSTKEVLDATLIHQSITGLYETRIDLSQLGGDGGGGSEAAAKGGGGGTLNIEDEHRLHETSKEPDVSLGSTWLSDFPQAWAETGGMGLAVRQAPLIIPLKATSTPVSIKQYPMSQEARLGIKPHIQRLLDQGILVPCQSPWNTPLLPVKKPGTNDYRPVQDLREVNKRVEDIHPTVPNPYNLLSGLPPSHQWYTVLDLKDAFFCLRLHPTSQPLFAFEWRDPEMGISGQLTWTRLPQGFKNSPTLFNEALHRDLADFRIQHPDLILLQYVDDLLLAATSELDCQQGTRALLQTLGNLGYRASAKKAQICQKQVKYLGYLLKEGQRWLTEARKETVMGQPTPKTPRQLREFLGKAGFCRLFIPGFAEMAAPLYPLTKPGTLFNWGPDQQKAYQEIKQALLTAPALGLPDLTKPFELFVDEKQGYAKGVLTQKLGPWRRPVAYLSKKLDPVAAGWPPCLRMVAAIAVLTKDAGKLTMGQPLVILAPHAVEALVKQPPDRWLSNARMTHYQALLLDTDRVQFGPVVALNPATLLPLPEEGLQHNCLDILAEAHGTRPDLTDQPLPDADHTWYTDGSSLLQEGQRKAGAAVTTETEVIWAKALPAGTSAQRAELIALTQALKMAEGKKLNVYTDSRYAFATAHIHGEIYRRRGWLTSEGKEIKNKDEILALLKALFLPKRLSIIHCPGHQKGHSAEARGNRMADQAARKAAITETPDTSTLLAGKRTADGSEFEKRTADGSEFESPKKKAKVE

SEQ ID NO: 2788 - protein, 2100 aa, synthetic construct
MPAAKRVKLDGGDKKYSIGLDIGTNSVGWAVITDEYKVPSKKFKVLGNTDRHSIKKNLIGALLFDSGETAEATRLKRTARRRYTRRKNRICYLQEIFSNEMAKVDDSFFHRLEESFLVEEDKKHERHPIFGNIVDEVAYHEKYPTIYHLRKKLVDSTDKADLRLIYLALAHMIKFRGHFLIEGDLNPDNSDVDKLFIQLVQTYNQLFEENPINASGVDAKAILSARLSKSRRLENLIAQLPGEKKNGLFGNLIALSLGLTPNFKSNFDLAEDAKLQLSKDTYDDDLDNLLAQIGDQYADLFLAAKNLSDAILLSDILRVNTEITKAPLSASMIKRYDEHHQDLTLLKALVRQQLPEKYKEIFFDQSKNGYAGYIDGGASQEEFYKFIKPILEKMDGTEELLVKLNREDLLRKQRTFDNGSIPHQIHLGELHAILRRQEDFYPFLKDNREKIEKILTFRIPYYVGPLARGNSRFAWMTRKSEETITPWNFEEVVDKGASAQSFIERMTNFDKNLPNEKVLPKHSLLYEYFTVYNELTKVKYVTEGMRKPAFLSGEQKKAIVDLLFKTNRKVTVKQLKEDYFKKIECFDSVEISGVEDRFNASLGTYHDLLKIIKDKDFLDNEENEDILEDIVLTLTLFEDREMIEERLKTYAHLFDDKVMKQLKRRRYTGWGRLSRKLINGIRDKQSGKTILDFLKSDGFANRNFMQLIHDDSLTFKEDIQKAQVSGQGDSLHEHIANLAGSPAIKKGILQTVKVVDELVKVMGRHKPENIVIEMARENQTTQKGQKNSRERMKRIEEGIKELGSQILKEHPVENTQLQNEKLYLYYLQNGRDMYVDQELDINRLSDYDVDHIVPQSFLKDDSIDNKVLTRSDKARGKSDNVPSEEVVKKMKNYWRQLLNAKLITQRKFDNLTKAERGGLSELDKAGFIKRQLVETRQITKHVAQILDSRMNTKYDENDKLIREVKVITLKSKLVSDFRKDFQFYKVREINNYHHAHDAYLNAVVGTALIKKYPKLESEFVYGDYKVYDVRKMIAKSEQEIGKATAKYFFYSNIMNFFKTEITLANGEIRKRPLIETNGETGEIVWDKGRDFATVRKVLSMPQVNIVKKTEVQTGGFSKESILPKRNSDKLIARKKDWDPKKYGGFDSPTVAYSVLVVAKVEKGKSKKLKSVKELLGITIMERSSFEKNPIDFLEAKGYKEVKKDLIIKLPKYSLFELENGRKRMLASAGELQKGNELALPSKYVNFLYLASHYEKLKGSPEDNEQKQLFVEQHKHYLDEIIEQISEFSKRVILADANLDKVLSAYNKHRDKPIREQAENIIHLFTLTNLGAPAAFKYFDTTIDRKRYTSTKEVLDATLIHQSITGLYETRIDLSQLGGDGGEAAAKGGGGSEAAAKGGTLNIEDEHRLHETSKEPDVSLGSTWLSDFPQAWAETGGMGLAVRQAPLIIPLKATSTPVSIKQYPMSQEARLGIKPHIQRLLDQGILVPCQSPWNTPLLPVKKPGTNDYRPVQDLREVNKRVEDIHPTVPNPYNLLSGLPPSHQWYTVLDLKDAFFCLRLHPTSQPLFAFEWRDPEMGISGQLTWTRLPQGFKNSPTLFNEALHRDLADFRIQHPDLILLQYVDDLLLAATSELDCQQGTRALLQTLGNLGYRASAKKAQICQKQVKYLGYLLKEGQRWLTEARKETVMGQPTPKTPRQLREFLGKAGFCRLFIPGFAEMAAPLYPLTKPGTLFNWGPDQQKAYQEIKQALLTAPALGLPDLTKPFELFVDEKQGYAKGVLTQKLGPWRRPVAYLSKKLDPVAAGWPPCLRMVAAIAVLTKDAGKLTMGQPLVILAPHAVEALVKQPPDRWLSNARMTHYQALLLDTDRVQFGPVVALNPATLLPLPEEGLQHNCLDILAEAHGTRPDLTDQPLPDADHTWYTDGSSLLQEGQRKAGAAVTTETEVIWAKALPAGTSAQRAELIALTQALKMAEGKKLNVYTDSRYAFATAHIHGEIYRRRGWLTSEGKEIKNKDEILALLKALFLPKRLSIIHCPGHQKGHSAEARGNRMADQAARKAAITETPDTSTLLAGKRTADGSEFEKRTADGSEFESPKKKAKVE

SEQ ID NO: 2789 - protein, 2096 aa, synthetic construct
MPAAKRVKLDGGDKKYSIGLDIGTNSVGWAVITDEYKVPSKKFKVLGNTDRHSIKKNLIGALLFDSGETAEATRLKRTARRRYTRRKNRICYLQEIFSNEMAKVDDSFFHRLEESFLVEEDKKHERHPIFGNIVDEVAYHEKYPTIYHLRKKLVDSTDKADLRLIYLALAHMIKFRGHFLIEGDLNPDNSDVDKLFIQLVQTYNQLFEENPINASGVDAKAILSARLSKSRRLENLIAQLPGEKKNGLFGNLIALSLGLTPNFKSNFDLAEDAKLQLSKDTYDDDLDNLLAQIGDQYADLFLAAKNLSDAILLSDILRVNTEITKAPLSASMIKRYDEHHQDLTLLKALVRQQLPEKYKEIFFDQSKNGYAGYIDGGASQEEFYKFIKPILEKMDGTEELLVKLNREDLLRKQRTFDNGSIPHQIHLGELHAILRRQEDFYPFLKDNREKIEKILTFRIPYYVGPLARGNSRFAWMTRKSEETITPWNFEEVVDKGASAQSFIERMTNFDKNLPNEKVLPKHSLLYEYFTVYNELTKVKYVTEGMRKPAFLSGEQKKAIVDLLFKTNRKVTVKQLKEDYFKKIECFDSVEISGVEDRFNASLGTYHDLLKIIKDKDFLDNEENEDILEDIVLTLTLFEDREMIEERLKTYAHLFDDKVMKQLKRRRYTGWGRLSRKLINGIRDKQSGKTILDFLKSDGFANRNFMQLIHDDSLTFKEDIQKAQVSGQGDSLHEHIANLAGSPAIKKGILQTVKVVDELVKVMGRHKPENIVIEMARENQTTQKGQKNSRERMKRIEEGIKELGSQILKEHPVENTQLQNEKLYLYYLQNGRDMYVDQELDINRLSDYDVDHIVPQSFLKDDSIDNKVLTRSDKARGKSDNVPSEEVVKKMKNYWRQLLNAKLITQRKFDNLTKAERGGLSELDKAGFIKRQLVETRQITKHVAQILDSRMNTKYDENDKLIREVKVITLKSKLVSDFRKDFQFYKVREINNYHHAHDAYLNAVVGTALIKKYPKLESEFVYGDYKVYDVRKMIAKSEQEIGKATAKYFFYSNIMNFFKTEITLANGEIRKRPLIETNGETGEIVWDKGRDFATVRKVLSMPQVNIVKKTEVQTGGFSKESILPKRNSDKLIARKKDWDPKKYGGFDSPTVAYSVLVVAKVEKGKSKKLKSVKELLGITIMERSSFEKNPIDFLEAKGYKEVKKDLIIKLPKYSLFELENGRKRMLASAGELQKGNELALPSKYVNFLYLASHYEKLKGSPEDNEQKQLFVEQHKHYLDEIIEQISEFSKRVILADANLDKVLSAYNKHRDKPIREQAENIIHLFTLTNLGAPAAFKYFDTTIDRKRYTSTKEVLDATLIHQSITGLYETRIDLSQLGGDGGEAAAKGGGGSSGGTLNIEDEHRLHETSKEPDVSLGSTWLSDFPQAWAETGGMGLAVRQAPLIIPLKATSTPVSIKQYPMSQEARLGIKPHIQRLLDQGILVPCQSPWNTPLLPVKKPGTNDYRPVQDLREVNKRVEDIHPTVPNPYNLLSGLPPSHQWYTVLDLKDAFFCLRLHPTSQPLFAFEWRDPEMGISGQLTWTRLPQGFKNSPTLFNEALHRDLADFRIQHPDLILLQYVDDLLLAATSELDCQQGTRALLQTLGNLGYRASAKKAQICQKQVKYLGYLLKEGQRWLTEARKETVMGQPTPKTPRQLREFLGKAGFCRLFIPGFAEMAAPLYPLTKPGTLFNWGPDQQKAYQEIKQALLTAPALGLPDLTKPFELFVDEKQGYAKGVLTQKLGPWRRPVAYLSKKLDPVAAGWPPCLRMVAAIAVLTKDAGKLTMGQPLVILAPHAVEALVKQPPDRWLSNARMTHYQALLLDTDRVQFGPVVALNPATLLPLPEEGLQHNCLDILAEAHGTRPDLTDQPLPDADHTWYTDGSSLLQEGQRKAGAAVTTETEVIWAKALPAGTSAQRAELIALTQALKMAEGKKLNVYTDSRYAFATAHIHGEIYRRRGWLTSEGKEIKNKDEILALLKALFLPKRLSIIHCPGHQKGHSAEARGNRMADQAARKAAITETPDTSTLLAGKRTADGSEFEKRTADGSEFESPKKKAKVE

SEQ ID NO: 2790 - protein, 2092 aa, synthetic construct
MPAAKRVKLDGGDKKYSIGLDIGTNSVGWAVITDEYKVPSKKFKVLGNTDRHSIKKNLIGALLFDSGETAEATRLKRTARRRYTRRKNRICYLQEIFSNEMAKVDDSFFHRLEESFLVEEDKKHERHPIFGNIVDEVAYHEKYPTIYHLRKKLVDSTDKADLRLIYLALAHMIKFRGHFLIEGDLNPDNSDVDKLFIQLVQTYNQLFEENPINASGVDAKAILSARLSKSRRLENLIAQLPGEKKNGLFGNLIALSLGLTPNFKSNFDLAEDAKLQLSKDTYDDDLDNLLAQIGDQYADLFLAAKNLSDAILLSDILRVNTEITKAPLSASMIKRYDEHHQDLTLLKALVRQQLPEKYKEIFFDQSKNGYAGYIDGGASQEEFYKFIKPILEKMDGTEELLVKLNREDLLRKQRTFDNGSIPHQIHLGELHAILRRQEDFYPFLKDNREKIEKILTFRIPYYVGPLARGNSRFAWMTRKSEETITPWNFEEVVDKGASAQSFIERMTNFDKNLPNEKVLPKHSLLYEYFTVYNELTKVKYVTEGMRKPAFLSGEQKKAIVDLLFKTNRKVTVKQLKEDYFKKIECFDSVEISGVEDRFNASLGTYHDLLKIIKDKDFLDNEENEDILEDIVLTLTLFEDREMIEERLKTYAHLFDDKVMKQLKRRRYTGWGRLSRKLINGIRDKQSGKTILDFLKSDGFANRNFMQLIHDDSLTFKEDIQKAQVSGQGDSLHEHIANLAGSPAIKKGILQTVKVVDELVKVMGRHKPENIVIEMARENQTTQKGQKNSRERMKRIEEGIKELGSQILKEHPVENTQLQNEKLYLYYLQNGRDMYVDQELDINRLSDYDVDHIVPQSFLKDDSIDNKVLTRSDKARGKSDNVPSEEVVKKMKNYWRQLLNAKLITQRKFDNLTKAERGGLSELDKAGFIKRQLVETRQITKHVAQILDSRMNTKYDENDKLIREVKVITLKSKLVSDFRKDFQFYKVREINNYHHAHDAYLNAVVGTALIKKYPKLESEFVYGDYKVYDVRKMIAKSEQEIGKATAKYFFYSNIMNFFKTEITLANGEIRKRPLIETNGETGEIVWDKGRDFATVRKVLSMPQVNIVKKTEVQTGGFSKESILPKRNSDKLIARKKDWDPKKYGGFDSPTVAYSVLVVAKVEKGKSKKLKSVKELLGITIMERSSFEKNPIDFLEAKGYKEVKKDLIIKLPKYSLFELENGRKRMLASAGELQKGNELALPSKYVNFLYLASHYEKLKGSPEDNEQKQLFVEQHKHYLDEIIEQISEFSKRVILADANLDKVLSAYNKHRDKPIREQAENIIHLFTLTNLGAPAAFKYFDTTIDRKRYTSTKEVLDATLIHQSITGLYETRIDLSQLGGDGGGGGGGGGGGTLNIEDEHRLHETSKEPDVSLGSTWLSDFPQAWAETGGMGLAVRQAPLIIPLKATSTPVSIKQYPMSQEARLGIKPHIQRLLDQGILVPCQSPWNTPLLPVKKPGTNDYRPVQDLREVNKRVEDIHPTVPNPYNLLSGLPPSHQWYTVLDLKDAFFCLRLHPTSQPLFAFEWRDPEMGISGQLTWTRLPQGFKNSPTLFNEALHRDLADFRIQHPDLILLQYVDDLLLAATSELDCQQGTRALLQTLGNLGYRASAKKAQICQKQVKYLGYLLKEGQRWLTEARKETVMGQPTPKTPRQLREFLGKAGFCRLFIPGFAEMAAPLYPLTKPGTLFNWGPDQQKAYQEIKQALLTAPALGLPDLTKPFELFVDEKQGYAKGVLTQKLGPWRRPVAYLSKKLDPVAAGWPPCLRMVAAIAVLTKDAGKLTMGQPLVILAPHAVEALVKQPPDRWLSNARMTHYQALLLDTDRVQFGPVVALNPATLLPLPEEGLQHNCLDILAEAHGTRPDLTDQPLPDADHTWYTDGSSLLQEGQRKAGAAVTTETEVIWAKALPAGTSAQRAELIALTQALKMAEGKKLNVYTDSRYAFATAHIHGEIYRRRGWLTSEGKEIKNKDEILALLKALFLPKRLSIIHCPGHQKGHSAEARGNRMADQAARKAAITETPDTSTLLAGKRTADGSEFEKRTADGSEFESPKKKAKVE

SEQ ID NO: 2791 - protein, 2100 aa, synthetic construct
MPAAKRVKLDGGDKKYSIGLDIGTNSVGWAVITDEYKVPSKKFKVLGNTDRHSIKKNLIGALLFDSGETAEATRLKRTARRRYTRRKNRICYLQEIFSNEMAKVDDSFFHRLEESFLVEEDKKHERHPIFGNIVDEVAYHEKYPTIYHLRKKLVDSTDKADLRLIYLALAHMIKFRGHFLIEGDLNPDNSDVDKLFIQLVQTYNQLFEENPINASGVDAKAILSARLSKSRRLENLIAQLPGEKKNGLFGNLIALSLGLTPNFKSNFDLAEDAKLQLSKDTYDDDLDNLLAQIGDQYADLFLAAKNLSDAILLSDILRVNTEITKAPLSASMIKRYDEHHQDLTLLKALVRQQLPEKYKEIFFDQSKNGYAGYIDGGASQEEFYKFIKPILEKMDGTEELLVKLNREDLLRKQRTFDNGSIPHQIHLGELHAILRRQEDFYPFLKDNREKIEKILTFRIPYYVGPLARGNSRFAWMTRKSEETITPWNFEEVVDKGASAQSFIERMTNFDKNLPNEKVLPKHSLLYEYFTVYNELTKVKYVTEGMRKPAFLSGEQKKAIVDLLFKTNRKVTVKQLKEDYFKKIECFDSVEISGVEDRFNASLGTYHDLLKIIKDKDFLDNEENEDILEDIVLTLTLFEDREMIEERLKTYAHLFDDKVMKQLKRRRYTGWGRLSRKLINGIRDKQSGKTILDFLKSDGFANRNFMQLIHDDSLTFKEDIQKAQVSGQGDSLHEHIANLAGSPAIKKGILQTVKVVDELVKVMGRHKPENIVIEMARENQTTQKGQKNSRERMKRIEEGIKELGSQILKEHPVENTQLQNEKLYLYYLQNGRDMYVDQELDINRLSDYDVDHIVPQSFLKDDSIDNKVLTRSDKARGKSDNVPSEEVVKKMKNYWRQLLNAKLITQRKFDNLTKAERGGLSELDKAGFIKRQLVETRQITKHVAQILDSRMNTKYDENDKLIREVKVITLKSKLVSDFRKDFQFYKVREINNYHHAHDAYLNAVVGTALIKKYPKLESEFVYGDYKVYDVRKMIAKSEQEIGKATAKYFFYSNIMNFFKTEITLANGEIRKRPLIETNGETGEIVWDKGRDFATVRKVLSMPQVNIVKKTEVQTGGFSKESILPKRNSDKLIARKKDWDPKKYGGFDSPTVAYSVLVVAKVEKGKSKKLKSVKELLGITIMERSSFEKNPIDFLEAKGYKEVKKDLIIKLPKYSLFELENGRKRMLASAGELQKGNELALPSKYVNFLYLASHYEKLKGSPEDNEQKQLFVEQHKHYLDEIIEQISEFSKRVILADANLDKVLSAYNKHRDKPIREQAENIIHLFTLTNLGAPAAFKYFDTTIDRKRYTSTKEVLDATLIHQSITGLYETRIDLSQLGGDGGEAAAKEAAAKEAAAKGGTLNIEDEHRLHETSKEPDVSLGSTWLSDFPQAWAETGGMGLAVRQAPLIIPLKATSTPVSIKQYPMSQEARLGIKPHIQRLLDQGILVPCQSPWNTPLLPVKKPGTNDYRPVQDLREVNKRVEDIHPTVPNPYNLLSGLPPSHQWYTVLDLKDAFFCLRLHPTSQPLFAFEWRDPEMGISGQLTWTRLPQGFKNSPTLFNEALHRDLADFRIQHPDLILLQYVDDLLLAATSELDCQQGTRALLQTLGNLGYRASAKKAQICQKQVKYLGYLLKEGQRWLTEARKETVMGQPTPKTPRQLREFLGKAGFCRLFIPGFAEMAAPLYPLTKPGTLFNWGPDQQKAYQEIKQALLTAPALGLPDLTKPFELFVDEKQGYAKGVLTQKLGPWRRPVAYLSKKLDPVAAGWPPCLRMVAAIAVLTKDAGKLTMGQPLVILAPHAVEALVKQPPDRWLSNARMTHYQALLLDTDRVQFGPVVALNPATLLPLPEEGLQHNCLDILAEAHGTRPDLTDQPLPDADHTWYTDGSSLLQEGQRKAGAAVTTETEVIWAKALPAGTSAQRAELIALTQALKMAEGKKLNVYTDSRYAFATAHIHGEIYRRRGWLTSEGKEIKNKDEILALLKALFLPKRLSIIHCPGHQKGHSAEARGNRMADQAARKAAITETPDTSTLLAGKRTADGSEFEKRTADGSEFESPKKKAKVE

SEQ ID NO: 2792 - protein, 2096 aa, synthetic construct
MPAAKRVKLDGGDKKYSIGLDIGTNSVGWAVITDEYKVPSKKFKVLGNTDRHSIKKNLIGALLFDSGETAEATRLKRTARRRYTRRKNRICYLQEIFSNEMAKVDDSFFHRLEESFLVEEDKKHERHPIFGNIVDEVAYHEKYPTIYHLRKKLVDSTDKADLRLIYLALAHMIKFRGHFLIEGDLNPDNSDVDKLFIQLVQTYNQLFEENPINASGVDAKAILSARLSKSRRLENLIAQLPGEKKNGLFGNLIALSLGLTPNFKSNFDLAEDAKLQLSKDTYDDDLDNLLAQIGDQYADLFLAAKNLSDAILLSDILRVNTEITKAPLSASMIKRYDEHHQDLTLLKALVRQQLPEKYKEIFFDQSKNGYAGYIDGGASQEEFYKFIKPILEKMDGTEELLVKLNREDLLRKQRTFDNGSIPHQIHLGELHAILRRQEDFYPFLKDNREKIEKILTFRIPYYVGPLARGNSRFAWMTRKSEETITPWNFEEVVDKGASAQSFIERMTNFDKNLPNEKVLPKHSLLYEYFTVYNELTKVKYVTEGMRKPAFLSGEQKKAIVDLLFKTNRKVTVKQLKEDYFKKIECFDSVEISGVEDRFNASLGTYHDLLKIIKDKDFLDNEENEDILEDIVLTLTLFEDREMIEERLKTYAHLFDDKVMKQLKRRRYTGWGRLSRKLINGIRDKQSGKTILDFLKSDGFANRNFMQLIHDDSLTFKEDIQKAQVSGQGDSLHEHIANLAGSPAIKKGILQTVKVVDELVKVMGRHKPENIVIEMARENQTTQKGQKNSRERMKRIEEGIKELGSQILKEHPVENTQLQNEKLYLYYLQNGRDMYVDQELDINRLSDYDVDHIVPQSFLKDDSIDNKVLTRSDKARGKSDNVPSEEVVKKMKNYWRQLLNAKLITQRKFDNLTKAERGGLSELDKAGFIKRQLVETRQITKHVAQILDSRMNTKYDENDKLIREVKVITLKSKLVSDFRKDFQFYKVREINNYHHAHDAYLNAVVGTALIKKYPKLESEFVYGDYKVYDVRKMIAKSEQEIGKATAKYFFYSNIMNFFKTEITLANGEIRKRPLIETNGETGEIVWDKGRDFATVRKVLSMPQVNIVKKTEVQTGGFSKESILPKRNSDKLIARKKDWDPKKYGGFDSPTVAYSVLVVAKVEKGKSKKLKSVKELLGITIMERSSFEKNPIDFLEAKGYKEVKKDLIIKLPKYSLFELENGRKRMLASAGELQKGNELALPSKYVNFLYLASHYEKLKGSPEDNEQKQLFVEQHKHYLDEIIEQISEFSKRVILADANLDKVLSAYNKHRDKPIREQAENIIHLFTLTNLGAPAAFKYFDTTIDRKRYTSTKEVLDATLIHQSITGLYETRIDLSQLGGDGGEAAAKGSSPAPGGTLNIEDEHRLHETSKEPDVSLGSTWLSDFPQAWAETGGMGLAVRQAPLIIPLKATSTPVSIKQYPMSQEARLGIKPHIQRLLDQGILVPCQSPWNTPLLPVKKPGTNDYRPVQDLREVNKRVEDIHPTVPNPYNLLSGLPPSHQWYTVLDLKDAFFCLRLHPTSQPLFAFEWRDPEMGISGQLTWTRLPQGFKNSPTLFNEALHRDLADFRIQHPDLILLQYVDDLLLAATSELDCQQGTRALLQTLGNLGYRASAKKAQICQKQVKYLGYLLKEGQRWLTEARKETVMGQPTPKTPRQLREFLGKAGFCRLFIPGFAEMAAPLYPLTKPGTLFNWGPDQQKAYQEIKQALLTAPALGLPDLTKPFELFVDEKQGYAKGVLTQKLGPWRRPVAYLSKKLDPVAAGWPPCLRMVAAIAVLTKDAGKLTMGQPLVILAPHAVEALVKQPPDRWLSNARMTHYQALLLDTDRVQFGPVVALNPATLLPLPEEGLQHNCLDILAEAHGTRPDLTDQPLPDADHTWYTDGSSLLQEGQRKAGAAVTTETEVIWAKALPAGTSAQRAELIALTQALKMAEGKKLNVYTDSRYAFATAHIHGEIYRRRGWLTSEGKEIKNKDEILALLKALFLPKRLSIIHCPGHQKGHSAEARGNRMADQAARKAAITETPDTSTLLAGKRTADGSEFEKRTADGSEFESPKKKAKVE

SEQ ID NO: 2793 - protein, 2094 aa, synthetic construct
MPAAKRVKLDGGDKKYSIGLDIGTNSVGWAVITDEYKVPSKKFKVLGNTDRHSIKKNLIGALLFDSGETAEATRLKRTARRRYTRRKNRICYLQEIFSNEMAKVDDSFFHRLEESFLVEEDKKHERHPIFGNIVDEVAYHEKYPTIYHLRKKLVDSTDKADLRLIYLALAHMIKFRGHFLIEGDLNPDNSDVDKLFIQLVQTYNQLFEENPINASGVDAKAILSARLSKSRRLENLIAQLPGEKKNGLFGNLIALSLGLTPNFKSNFDLAEDAKLQLSKDTYDDDLDNLLAQIGDQYADLFLAAKNLSDAILLSDILRVNTEITKAPLSASMIKRYDEHHQDLTLLKALVRQQLPEKYKEIFFDQSKNGYAGYIDGGASQEEFYKFIKPILEKMDGTEELLVKLNREDLLRKQRTFDNGSIPHQIHLGELHAILRRQEDFYPFLKDNREKIEKILTFRIPYYVGPLARGNSRFAWMTRKSEETITPWNFEEVVDKGASAQSFIERMTNFDKNLPNEKVLPKHSLLYEYFTVYNELTKVKYVTEGMRKPAFLSGEQKKAIVDLLFKTNRKVTVKQLKEDYFKKIECFDSVEISGVEDRFNASLGTYHDLLKIIKDKDFLDNEENEDILEDIVLTLTLFEDREMIEERLKTYAHLFDDKVMKQLKRRRYTGWGRLSRKLINGIRDKQSGKTILDFLKSDGFANRNFMQLIHDDSLTFKEDIQKAQVSGQGDSLHEHIANLAGSPAIKKGILQTVKVVDELVKVMGRHKPENIVIEMARENQTTQKGQKNSRERMKRIEEGIKELGSQILKEHPVENTQLQNEKLYLYYLQNGRDMYVDQELDINRLSDYDVDHIVPQSFLKDDSIDNKVLTRSDKARGKSDNVPSEEVVKKMKNYWRQLLNAKLITQRKFDNLTKAERGGLSELDKAGFIKRQLVETRQITKHVAQILDSRMNTKYDENDKLIREVKVITLKSKLVSDFRKDFQFYKVREINNYHHAHDAYLNAVVGTALIKKYPKLESEFVYGDYKVYDVRKMIAKSEQEIGKATAKYFFYSNIMNFFKTEITLANGEIRKRPLIETNGETGEIVWDKGRDFATVRKVLSMPQVNIVKKTEVQTGGFSKESILPKRNSDKLIARKKDWDPKKYGGFDSPTVAYSVLVVAKVEKGKSKKLKSVKELLGITIMERSSFEKNPIDFLEAKGYKEVKKDLIIKLPKYSLFELENGRKRMLASAGELQKGNELALPSKYVNFLYLASHYEKLKGSPEDNEQKQLFVEQHKHYLDEIIEQISEFSKRVILADANLDKVLSAYNKHRDKPIREQAENIIHLFTLTNLGAPAAFKYFDTTIDRKRYTSTKEVLDATLIHQSITGLYETRIDLSQLGGDGGPAPGGGGSSGGTLNIEDEHRLHETSKEPDVSLGSTWLSDFPQAWAETGGMGLAVRQAPLIIPLKATSTPVSIKQYPMSQEARLGIKPHIQRLLDQGILVPCQSPWNTPLLPVKKPGTNDYRPVQDLREVNKRVEDIHPTVPNPYNLLSGLPPSHQWYTVLDLKDAFFCLRLHPTSQPLFAFEWRDPEMGISGQLTWTRLPQGFKNSPTLFNEALHRDLADFRIQHPDLILLQYVDDLLLAATSELDCQQGTRALLQTLGNLGYRASAKKAQICQKQVKYLGYLLKEGQRWLTEARKETVMGQPTPKTPRQLREFLGKAGFCRLFIPGFAEMAAPLYPLTKPGTLFNWGPDQQKAYQEIKQALLTAPALGLPDLTKPFELFVDEKQGYAKGVLTQKLGPWRRPVAYLSKKLDPVAAGWPPCLRMVAAIAVLTKDAGKLTMGQPLVILAPHAVEALVKQPPDRWLSNARMTHYQALLLDTDRVQFGPVVALNPATLLPLPEEGLQHNCLDILAEAHGTRPDLTDQPLPDADHTWYTDGSSLLQEGQRKAGAAVTTETEVIWAKALPAGTSAQRAELIALTQALKMAEGKKLNVYTDSRYAFATAHIHGEIYRRRGWLTSEGKEIKNKDEILALLKALFLPKRLSIIHCPGHQKGHSAEARGNRMADQAARKAAITETPDTSTLLAGKRTADGSEFEKRTADGSEFESPKKKAKVE

SEQ ID NO: 2794 - protein, 2096 aa, synthetic construct
MPAAKRVKLDGGDKKYSIGLDIGTNSVGWAVITDEYKVPSKKFKVLGNTDRHSIKKNLIGALLFDSGETAEATRLKRTARRRYTRRKNRICYLQEIFSNEMAKVDDSFFHRLEESFLVEEDKKHERHPIFGNIVDEVAYHEKYPTIYHLRKKLVDSTDKADLRLIYLALAHMIKFRGHFLIEGDLNPDNSDVDKLFIQLVQTYNQLFEENPINASGVDAKAILSARLSKSRRLENLIAQLPGEKKNGLFGNLIALSLGLTPNFKSNFDLAEDAKLQLSKDTYDDDLDNLLAQIGDQYADLFLAAKNLSDAILLSDILRVNTEITKAPLSASMIKRYDEHHQDLTLLKALVRQQLPEKYKEIFFDQSKNGYAGYIDGGASQEEFYKFIKPILEKMDGTEELLVKLNREDLLRKQRTFDNGSIPHQIHLGELHAILRRQEDFYPFLKDNREKIEKILTFRIPYYVGPLARGNSRFAWMTRKSEETITPWNFEEVVDKGASAQSFIERMTNFDKNLPNEKVLPKHSLLYEYFTVYNELTKVKYVTEGMRKPAFLSGEQKKAIVDLLFKTNRKVTVKQLKEDYFKKIECFDSVEISGVEDRFNASLGTYHDLLKIIKDKDFLDNEENEDILEDIVLTLTLFEDREMIEERLKTYAHLFDDKVMKQLKRRRYTGWGRLSRKLINGIRDKQSGKTILDFLKSDGFANRNFMQLIHDDSLTFKEDIQKAQVSGQGDSLHEHIANLAGSPAIKKGILQTVKVVDELVKVMGRHKPENIVIEMARENQTTQKGQKNSRERMKRIEEGIKELGSQILKEHPVENTQLQNEKLYLYYLQNGRDMYVDQELDINRLSDYDVDHIVPQSFLKDDSIDNKVLTRSDKARGKSDNVPSEEVVKKMKNYWRQLLNAKLITQRKFDNLTKAERGGLSELDKAGFIKRQLVETRQITKHVAQILDSRMNTKYDENDKLIREVKVITLKSKLVSDFRKDFQFYKVREINNYHHAHDAYLNAVVGTALIKKYPKLESEFVYGDYKVYDVRKMIAKSEQEIGKATAKYFFYSNIMNFFKTEITLANGEIRKRPLIETNGETGEIVWDKGRDFATVRKVLSMPQVNIVKKTEVQTGGFSKESILPKRNSDKLIARKKDWDPKKYGGFDSPTVAYSVLVVAKVEKGKSKKLKSVKELLGITIMERSSFEKNPIDFLEAKGYKEVKKDLIIKLPKYSLFELENGRKRMLASAGELQKGNELALPSKYVNFLYLASHYEKLKGSPEDNEQKQLFVEQHKHYLDEIIEQISEFSKRVILADANLDKVLSAYNKHRDKPIREQAENIIHLFTLTNLGAPAAFKYFDTTIDRKRYTSTKEVLDATLIHQSITGLYETRIDLSQLGGDGGEAAAKGGSGGGGGTLNIEDEHRLHETSKEPDVSLGSTWLSDFPQAWAETGGMGLAVRQAPLIIPLKATSTPVSIKQYPMSQEARLGIKPHIQRLLDQGILVPCQSPWNTPLLPVKKPGTNDYRPVQDLREVNKRVEDIHPTVPNPYNLLSGLPPSHQWYTVLDLKDAFFCLRLHPTSQPLFAFEWRDPEMGISGQLTWTRLPQGFKNSPTLFNEALHRDLADFRIQHPDLILLQYVDDLLLAATSELDCQQGTRALLQTLGNLGYRASAKKAQICQKQVKYLGYLLKEGQRWLTEARKETVMGQPTPKTPRQLREFLGKAGFCRLFIPGFAEMAAPLYPLTKPGTLFNWGPDQQKAYQEIKQALLTAPALGLPDLTKPFELFVDEKQGYAKGVLTQKLGPWRRPVAYLSKKLDPVAAGWPPCLRMVAAIAVLTKDAGKLTMGQPLVILAPHAVEALVKQPPDRWLSNARMTHYQALLLDTDRVQFGPVVALNPATLLPLPEEGLQHNCLDILAEAHGTRPDLTDQPLPDADHTWYTDGSSLLQEGQRKAGAAVTTETEVIWAKALPAGTSAQRAELIALTQALKMAEGKKLNVYTDSRYAFATAHIHGEIYRRRGWLTSEGKEIKNKDEILALLKALFLPKRLSIIHCPGHQKGHSAEARGNRMADQAARKAAITETPDTSTLLAGKRTADGSEFEKRTADGSEFESPKKKAKVE

SEQ ID NO: 2795 - protein, 2097 aa, synthetic construct
MPAAKRVKLDGGDKKYSIGLDIGTNSVGWAVITDEYKVPSKKFKVLGNTDRHSIKKNLIGALLFDSGETAEATRLKRTARRRYTRRKNRICYLQEIFSNEMAKVDDSFFHRLEESFLVEEDKKHERHPIFGNIVDEVAYHEKYPTIYHLRKKLVDSTDKADLRLIYLALAHMIKFRGHFLIEGDLNPDNSDVDKLFIQLVQTYNQLFEENPINASGVDAKAILSARLSKSRRLENLIAQLPGEKKNGLFGNLIALSLGLTPNFKSNFDLAEDAKLQLSKDTYDDDLDNLLAQIGDQYADLFLAAKNLSDAILLSDILRVNTEITKAPLSASMIKRYDEHHQDLTLLKALVRQQLPEKYKEIFFDQSKNGYAGYIDGGASQEEFYKFIKPILEKMDGTEELLVKLNREDLLRKQRTFDNGSIPHQIHLGELHAILRRQEDFYPFLKDNREKIEKILTFRIPYYVGPLARGNSRFAWMTRKSEETITPWNFEEVVDKGASAQSFIERMTNFDKNLPNEKVLPKHSLLYEYFTVYNELTKVKYVTEGMRKPAFLSGEQKKAIVDLLFKTNRKVTVKQLKEDYFKKIECFDSVEISGVEDRFNASLGTYHDLLKIIKDKDFLDNEENEDILEDIVLTLTLFEDREMIEERLKTYAHLFDDKVMKQLKRRRYTGWGRLSRKLINGIRDKQSGKTILDFLKSDGFANRNFMQLIHDDSLTFKEDIQKAQVSGQGDSLHEHIANLAGSPAIKKGILQTVKVVDELVKVMGRHKPENIVIEMARENQTTQKGQKNSRERMKRIEEGIKELGSQILKEHPVENTQLQNEKLYLYYLQNGRDMYVDQELDINRLSDYDVDHIVPQSFLKDDSIDNKVLTRSDKARGKSDNVPSEEVVKKMKNYWRQLLNAKLITQRKFDNLTKAERGGLSELDKAGFIKRQLVETRQITKHVAQILDSRMNTKYDENDKLIREVKVITLKSKLVSDFRKDFQFYKVREINNYHHAHDAYLNAVVGTALIKKYPKLESEFVYGDYKVYDVRKMIAKSEQEIGKATAKYFFYSNIMNFFKTEITLANGEIRKRPLIETNGETGEIVWDKGRDFATVRKVLSMPQVNIVKKTEVQTGGFSKESILPKRNSDKLIARKKDWDPKKYGGFDSPTVAYSVLVVAKVEKGKSKKLKSVKELLGITIMERSSFEKNPIDFLEAKGYKEVKKDLIIKLPKYSLFELENGRKRMLASAGELQKGNELALPSKYVNFLYLASHYEKLKGSPEDNEQKQLFVEQHKHYLDEIIEQISEFSKRVILADANLDKVLSAYNKHRDKPIREQAENIIHLFTLTNLGAPAAFKYFDTTIDRKRYTSTKEVLDATLIHQSITGLYETRIDLSQLGGDGGGGSGGSGGSGGSGGTLNIEDEHRLHETSKEPDVSLGSTWLSDFPQAWAETGGMGLAVRQAPLIIPLKATSTPVSIKQYPMSQEARLGIKPHIQRLLDQGILVPCQSPWNTPLLPVKKPGTNDYRPVQDLREVNKRVEDIHPTVPNPYNLLSGLPPSHQWYTVLDLKDAFFCLRLHPTSQPLFAFEWRDPEMGISGQLTWTRLPQGFKNSPTLFNEALHRDLADFRIQHPDLILLQYVDDLLLAATSELDCQQGTRALLQTLGNLGYRASAKKAQICQKQVKYLGYLLKEGQRWLTEARKETVMGQPTPKTPRQLREFLGKAGFCRLFIPGFAEMAAPLYPLTKPGTLFNWGPDQQKAYQEIKQALLTAPALGLPDLTKPFELFVDEKQGYAKGVLTQKLGPWRRPVAYLSKKLDPVAAGWPPCLRMVAAIAVLTKDAGKLTMGQPLVILAPHAVEALVKQPPDRWLSNARMTHYQALLLDTDRVQFGPVVALNPATLLPLPEEGLQHNCLDILAEAHGTRPDLTDQPLPDADHTWYTDGSSLLQEGQRKAGAAVTTETEVIWAKALPAGTSAQRAELIALTQALKMAEGKKLNVYTDSRYAFATAHIHGEIYRRRGWLTSEGKEIKNKDEILALLKALFLPKRLSIIHCPGHQKGHSAEARGNRMADQAARKAAITETPDTSTLLAGKRTADGSEFEKRTADGSEFESPKKKAKVE

SEQ ID NO: 2796 - protein, 2093 aa, synthetic construct
MPAAKRVKLDGGDKKYSIGLDIGTNSVGWAVITDEYKVPSKKFKVLGNTDRHSIKKNLIGALLFDSGETAEATRLKRTARRRYTRRKNRICYLQEIFSNEMAKVDDSFFHRLEESFLVEEDKKHERHPIFGNIVDEVAYHEKYPTIYHLRKKLVDSTDKADLRLIYLALAHMIKFRGHFLIEGDLNPDNSDVDKLFIQLVQTYNQLFEENPINASGVDAKAILSARLSKSRRLENLIAQLPGEKKNGLFGNLIALSLGLTPNFKSNFDLAEDAKLQLSKDTYDDDLDNLLAQIGDQYADLFLAAKNLSDAILLSDILRVNTEITKAPLSASMIKRYDEHHQDLTLLKALVRQQLPEKYKEIFFDQSKNGYAGYIDGGASQEEFYKFIKPILEKMDGTEELLVKLNREDLLRKQRTFDNGSIPHQIHLGELHAILRRQEDFYPFLKDNREKIEKILTFRIPYYVGPLARGNSRFAWMTRKSEETITPWNFEEVVDKGASAQSFIERMTNFDKNLPNEKVLPKHSLLYEYFTVYNELTKVKYVTEGMRKPAFLSGEQKKAIVDLLFKTNRKVTVKQLKEDYFKKIECFDSVEISGVEDRFNASLGTYHDLLKIIKDKDFLDNEENEDILEDIVLTLTLFEDREMIEERLKTYAHLFDDKVMKQLKRRRYTGWGRLSRKLINGIRDKQSGKTILDFLKSDGFANRNFMQLIHDDSLTFKEDIQKAQVSGQGDSLHEHIANLAGSPAIKKGILQTVKVVDELVKVMGRHKPENIVIEMARENQTTQKGQKNSRERMKRIEEGIKELGSQILKEHPVENTQLQNEKLYLYYLQNGRDMYVDQELDINRLSDYDVDHIVPQSFLKDDSIDNKVLTRSDKARGKSDNVPSEEVVKKMKNYWRQLLNAKLITQRKFDNLTKAERGGLSELDKAGFIKRQLVETRQITKHVAQILDSRMNTKYDENDKLIREVKVITLKSKLVSDFRKDFQFYKVREINNYHHAHDAYLNAVVGTALIKKYPKLESEFVYGDYKVYDVRKMIAKSEQEIGKATAKYFFYSNIMNFFKTEITLANGEIRKRPLIETNGETGEIVWDKGRDFATVRKVLSMPQVNIVKKTEVQTGGFSKESILPKRNSDKLIARKKDWDPKKYGGFDSPTVAYSVLVVAKVEKGKSKKLKSVKELLGITIMERSSFEKNPIDFLEAKGYKEVKKDLIIKLPKYSLFELENGRKRMLASAGELQKGNELALPSKYVNFLYLASHYEKLKGSPEDNEQKQLFVEQHKHYLDEIIEQISEFSKRVILADANLDKVLSAYNKHRDKPIREQAENIIHLFTLTNLGAPAAFKYFDTTIDRKRYTSTKEVLDATLIHQSITGLYETRIDLSQLGGDGGEAAAKGGGGGTLNIEDEHRLHETSKEPDVSLGSTWLSDFPQAWAETGGMGLAVRQAPLIIPLKATSTPVSIKQYPMSQEARLGIKPHIQRLLDQGILVPCQSPWNTPLLPVKKPGTNDYRPVQDLREVNKRVEDIHPTVPNPYNLLSGLPPSHQWYTVLDLKDAFFCLRLHPTSQPLFAFEWRDPEMGISGQLTWTRLPQGFKNSPTLFNEALHRDLADFRIQHPDLILLQYVDDLLLAATSELDCQQGTRALLQTLGNLGYRASAKKAQICQKQVKYLGYLLKEGQRWLTEARKETVMGQPTPKTPRQLREFLGKAGFCRLFIPGFAEMAAPLYPLTKPGTLFNWGPDQQKAYQEIKQALLTAPALGLPDLTKPFELFVDEKQGYAKGVLTQKLGPWRRPVAYLSKKLDPVAAGWPPCLRMVAAIAVLTKDAGKLTMGQPLVILAPHAVEALVKQPPDRWLSNARMTHYQALLLDTDRVQFGPVVALNPATLLPLPEEGLQHNCLDILAEAHGTRPDLTDQPLPDADHTWYTDGSSLLQEGQRKAGAAVTTETEVIWAKALPAGTSAQRAELIALTQALKMAEGKKLNVYTDSRYAFATAHIHGEIYRRRGWLTSEGKEIKNKDEILALLKALFLPKRLSIIHCPGHQKGHSAEARGNRMADQAARKAAITETPDTSTLLAGKRTADGSEFEKRTADGSEFESPKKKAKVE

SEQ ID NO: 2797 - protein, 2098 aa, synthetic construct
MPAAKRVKLDGGDKKYSIGLDIGTNSVGWAVITDEYKVPSKKFKVLGNTDRHSIKKNLIGALLFDSGETAEATRLKRTARRRYTRRKNRICYLQEIFSNEMAKVDDSFFHRLEESFLVEEDKKHERHPIFGNIVDEVAYHEKYPTIYHLRKKLVDSTDKADLRLIYLALAHMIKFRGHFLIEGDLNPDNSDVDKLFIQLVQTYNQLFEENPINASGVDAKAILSARLSKSRRLENLIAQLPGEKKNGLFGNLIALSLGLTPNFKSNFDLAEDAKLQLSKDTYDDDLDNLLAQIGDQYADLFLAAKNLSDAILLSDILRVNTEITKAPLSASMIKRYDEHHQDLTLLKALVRQQLPEKYKEIFFDQSKNGYAGYIDGGASQEEFYKFIKPILEKMDGTEELLVKLNREDLLRKQRTFDNGSIPHQIHLGELHAILRRQEDFYPFLKDNREKIEKILTFRIPYYVGPLARGNSRFAWMTRKSEETITPWNFEEVVDKGASAQSFIERMTNFDKNLPNEKVLPKHSLLYEYFTVYNELTKVKYVTEGMRKPAFLSGEQKKAIVDLLFKTNRKVTVKQLKEDYFKKIECFDSVEISGVEDRFNASLGTYHDLLKIIKDKDFLDNEENEDILEDIVLTLTLFEDREMIEERLKTYAHLFDDKVMKQLKRRRYTGWGRLSRKLINGIRDKQSGKTILDFLKSDGFANRNFMQLIHDDSLTFKEDIQKAQVSGQGDSLHEHIANLAGSPAIKKGILQTVKVVDELVKVMGRHKPENIVIEMARENQTTQKGQKNSRERMKRIEEGIKELGSQILKEHPVENTQLQNEKLYLYYLQNGRDMYVDQELDINRLSDYDVDHIVPQSFLKDDSIDNKVLTRSDKARGKSDNVPSEEVVKKMKNYWRQLLNAKLITQRKFDNLTKAERGGLSELDKAGFIKRQLVETRQITKHVAQILDSRMNTKYDENDKLIREVKVITLKSKLVSDFRKDFQFYKVREINNYHHAHDAYLNAVVGTALIKKYPKLESEFVYGDYKVYDVRKMIAKSEQEIGKATAKYFFYSNIMNFFKTEITLANGEIRKRPLIETNGETGEIVWDKGRDFATVRKVLSMPQVNIVKKTEVQTGGFSKESILPKRNSDKLIARKKDWDPKKYGGFDSPTVAYSVLVVAKVEKGKSKKLKSVKELLGITIMERSSFEKNPIDFLEAKGYKEVKKDLIIKLPKYSLFELENGRKRMLASAGELQKGNELALPSKYVNFLYLASHYEKLKGSPEDNEQKQLFVEQHKHYLDEIIEQISEFSKRVILADANLDKVLSAYNKHRDKPIREQAENIIHLFTLTNLGAPAAFKYFDTTIDRKRYTSTKEVLDATLIHQSITGLYETRIDLSQLGGDGGPAPAPAPAPAPAPGGTLNIEDEHRLHETSKEPDVSLGSTWLSDFPQAWAETGGMGLAVRQAPLIIPLKATSTPVSIKQYPMSQEARLGIKPHIQRLLDQGILVPCQSPWNTPLLPVKKPGTNDYRPVQDLREVNKRVEDIHPTVPNPYNLLSGLPPSHQWYTVLDLKDAFFCLRLHPTSQPLFAFEWRDPEMGISGQLTWTRLPQGFKNSPTLFNEALHRDLADFRIQHPDLILLQYVDDLLLAATSELDCQQGTRALLQTLGNLGYRASAKKAQICQKQVKYLGYLLKEGQRWLTEARKETVMGQPTPKTPRQLREFLGKAGFCRLFIPGFAEMAAPLYPLTKPGTLFNWGPDQQKAYQEIKQALLTAPALGLPDLTKPFELFVDEKQGYAKGVLTQKLGPWRRPVAYLSKKLDPVAAGWPPCLRMVAAIAVLTKDAGKLTMGQPLVILAPHAVEALVKQPPDRWLSNARMTHYQALLLDTDRVQFGPVVALNPATLLPLPEEGLQHNCLDILAEAHGTRPDLTDQPLPDADHTWYTDGSSLLQEGQRKAGAAVTTETEVIWAKALPAGTSAQRAELIALTQALKMAEGKKLNVYTDSRYAFATAHIHGEIYRRRGWLTSEGKEIKNKDEILALLKALFLPKRLSIIHCPGHQKGHSAEARGNRMADQAARKAAITETPDTSTLLAGKRTADGSEFEKRTADGSEFESPKKKAKVE

SEQ ID NO: 2798 - protein, 2096 aa, synthetic construct
MPAAKRVKLDGGDKKYSIGLDIGTNSVGWAVITDEYKVPSKKFKVLGNTDRHSIKKNLIGALLFDSGETAEATRLKRTARRRYTRRKNRICYLQEIFSNEMAKVDDSFFHRLEESFLVEEDKKHERHPIFGNIVDEVAYHEKYPTIYHLRKKLVDSTDKADLRLIYLALAHMIKFRGHFLIEGDLNPDNSDVDKLFIQLVQTYNQLFEENPINASGVDAKAILSARLSKSRRLENLIAQLPGEKKNGLFGNLIALSLGLTPNFKSNFDLAEDAKLQLSKDTYDDDLDNLLAQIGDQYADLFLAAKNLSDAILLSDILRVNTEITKAPLSASMIKRYDEHHQDLTLLKALVRQQLPEKYKEIFFDQSKNGYAGYIDGGASQEEFYKFIKPILEKMDGTEELLVKLNREDLLRKQRTFDNGSIPHQIHLGELHAILRRQEDFYPFLKDNREKIEKILTFRIPYYVGPLARGNSRFAWMTRKSEETITPWNFEEVVDKGASAQSFIERMTNFDKNLPNEKVLPKHSLLYEYFTVYNELTKVKYVTEGMRKPAFLSGEQKKAIVDLLFKTNRKVTVKQLKEDYFKKIECFDSVEISGVEDRFNASLGTYHDLLKIIKDKDFLDNEENEDILEDIVLTLTLFEDREMIEERLKTYAHLFDDKVMKQLKRRRYTGWGRLSRKLINGIRDKQSGKTILDFLKSDGFANRNFMQLIHDDSLTFKEDIQKAQVSGQGDSLHEHIANLAGSPAIKKGILQTVKVVDELVKVMGRHKPENIVIEMARENQTTQKGQKNSRERMKRIEEGIKELGSQILKEHPVENTQLQNEKLYLYYLQNGRDMYVDQELDINRLSDYDVDHIVPQSFLKDDSIDNKVLTRSDKARGKSDNVPSEEVVKKMKNYWRQLLNAKLITQRKFDNLTKAERGGLSELDKAGFIKRQLVETRQITKHVAQILDSRMNTKYDENDKLIREVKVITLKSKLVSDFRKDFQFYKVREINNYHHAHDAYLNAVVGTALIKKYPKLESEFVYGDYKVYDVRKMIAKSEQEIGKATAKYFFYSNIMNFFKTEITLANGEIRKRPLIETNGETGEIVWDKGRDFATVRKVLSMPQVNIVKKTEVQTGGFSKESILPKRNSDKLIARKKDWDPKKYGGFDSPTVAYSVLVVAKVEKGKSKKLKSVKELLGITIMERSSFEKNPIDFLEAKGYKEVKKDLIIKLPKYSLFELENGRKRMLASAGELQKGNELALPSKYVNFLYLASHYEKLKGSPEDNEQKQLFVEQHKHYLDEIIEQISEFSKRVILADANLDKVLSAYNKHRDKPIREQAENIIHLFTLTNLGAPAAFKYFDTTIDRKRYTSTKEVLDATLIHQSITGLYETRIDLSQLGGDGGPAPGSSEAAAKGGTLNIEDEHRLHETSKEPDVSLGSTWLSDFPQAWAETGGMGLAVRQAPLIIPLKATSTPVSIKQYPMSQEARLGIKPHIQRLLDQGILVPCQSPWNTPLLPVKKPGTNDYRPVQDLREVNKRVEDIHPTVPNPYNLLSGLPPSHQWYTVLDLKDAFFCLRLHPTSQPLFAFEWRDPEMGISGQLTWTRLPQGFKNSPTLFNEALHRDLADFRIQHPDLILLQYVDDLLLAATSELDCQQGTRALLQTLGNLGYRASAKKAQICQKQVKYLGYLLKEGQRWLTEARKETVMGQPTPKTPRQLREFLGKAGFCRLFIPGFAEMAAPLYPLTKPGTLFNWGPDQQKAYQEIKQALLTAPALGLPDLTKPFELFVDEKQGYAKGVLTQKLGPWRRPVAYLSKKLDPVAAGWPPCLRMVAAIAVLTKDAGKLTMGQPLVILAPHAVEALVKQPPDRWLSNARMTHYQALLLDTDRVQFGPVVALNPATLLPLPEEGLQHNCLDILAEAHGTRPDLTDQPLPDADHTWYTDGSSLLQEGQRKAGAAVTTETEVIWAKALPAGTSAQRAELIALTQALKMAEGKKLNVYTDSRYAFATAHIHGEIYRRRGWLTSEGKEIKNKDEILALLKALFLPKRLSIIHCPGHQKGHSAEARGNRMADQAARKAAITETPDTSTLLAGKRTADGSEFEKRTADGSEFESPKKKAKVE

SEQ ID NO: 2799 - protein, 2096 aa, synthetic construct
MPAAKRVKLDGGDKKYSIGLDIGTNSVGWAVITDEYKVPSKKFKVLGNTDRHSIKKNLIGALLFDSGETAEATRLKRTARRRYTRRKNRICYLQEIFSNEMAKVDDSFFHRLEESFLVEEDKKHERHPIFGNIVDEVAYHEKYPTIYHLRKKLVDSTDKADLRLIYLALAHMIKFRGHFLIEGDLNPDNSDVDKLFIQLVQTYNQLFEENPINASGVDAKAILSARLSKSRRLENLIAQLPGEKKNGLFGNLIALSLGLTPNFKSNFDLAEDAKLQLSKDTYDDDLDNLLAQIGDQYADLFLAAKNLSDAILLSDILRVNTEITKAPLSASMIKRYDEHHQDLTLLKALVRQQLPEKYKEIFFDQSKNGYAGYIDGGASQEEFYKFIKPILEKMDGTEELLVKLNREDLLRKQRTFDNGSIPHQIHLGELHAILRRQEDFYPFLKDNREKIEKILTFRIPYYVGPLARGNSRFAWMTRKSEETITPWNFEEVVDKGASAQSFIERMTNFDKNLPNEKVLPKHSLLYEYFTVYNELTKVKYVTEGMRKPAFLSGEQKKAIVDLLFKTNRKVTVKQLKEDYFKKIECFDSVEISGVEDRFNASLGTYHDLLKIIKDKDFLDNEENEDILEDIVLTLTLFEDREMIEERLKTYAHLFDDKVMKQLKRRRYTGWGRLSRKLINGIRDKQSGKTILDFLKSDGFANRNFMQLIHDDSLTFKEDIQKAQVSGQGDSLHEHIANLAGSPAIKKGILQTVKVVDELVKVMGRHKPENIVIEMARENQTTQKGQKNSRERMKRIEEGIKELGSQILKEHPVENTQLQNEKLYLYYLQNGRDMYVDQELDINRLSDYDVDHIVPQSFLKDDSIDNKVLTRSDKARGKSDNVPSEEVVKKMKNYWRQLLNAKLITQRKFDNLTKAERGGLSELDKAGFIKRQLVETRQITKHVAQILDSRMNTKYDENDKLIREVKVITLKSKLVSDFRKDFQFYKVREINNYHHAHDAYLNAVVGTALIKKYPKLESEFVYGDYKVYDVRKMIAKSEQEIGKATAKYFFYSNIMNFFKTEITLANGEIRKRPLIETNGETGEIVWDKGRDFATVRKVLSMPQVNIVKKTEVQTGGFSKESILPKRNSDKLIARKKDWDPKKYGGFDSPTVAYSVLVVAKVEKGKSKKLKSVKELLGITIMERSSFEKNPIDFLEAKGYKEVKKDLIIKLPKYSLFELENGRKRMLASAGELQKGNELALPSKYVNFLYLASHYEKLKGSPEDNEQKQLFVEQHKHYLDEIIEQISEFSKRVILADANLDKVLSAYNKHRDKPIREQAENIIHLFTLTNLGAPAAFKYFDTTIDRKRYTSTKEVLDATLIHQSITGLYETRIDLSQLGGDGGEAAAKGSSGGSGGTLNIEDEHRLHETSKEPDVSLGSTWLSDFPQAWAETGGMGLAVRQAPLIIPLKATSTPVSIKQYPMSQEARLGIKPHIQRLLDQGILVPCQSPWNTPLLPVKKPGTNDYRPVQDLREVNKRVEDIHPTVPNPYNLLSGLPPSHQWYTVLDLKDAFFCLRLHPTSQPLFAFEWRDPEMGISGQLTWTRLPQGFKNSPTLFNEALHRDLADFRIQHPDLILLQYVDDLLLAATSELDCQQGTRALLQTLGNLGYRASAKKAQICQKQVKYLGYLLKEGQRWLTEARKETVMGQPTPKTPRQLREFLGKAGFCRLFIPGFAEMAAPLYPLTKPGTLFNWGPDQQKAYQEIKQALLTAPALGLPDLTKPFELFVDEKQGYAKGVLTQKLGPWRRPVAYLSKKLDPVAAGWPPCLRMVAAIAVLTKDAGKLTMGQPLVILAPHAVEALVKQPPDRWLSNARMTHYQALLLDTDRVQFGPVVALNPATLLPLPEEGLQHNCLDILAEAHGTRPDLTDQPLPDADHTWYTDGSSLLQEGQRKAGAAVTTETEVIWAKALPAGTSAQRAELIALTQALKMAEGKKLNVYTDSRYAFATAHIHGEIYRRRGWLTSEGKEIKNKDEILALLKALFLPKRLSIIHCPGHQKGHSAEARGNRMADQAARKAAITETPDTSTLLAGKRTADGSEFEKRTADGSEFESPKKKAKVE

SEQ ID NO: 2800 - protein, 2094 aa, synthetic construct
MPAAKRVKLDGGDKKYSIGLDIGTNSVGWAVITDEYKVPSKKFKVLGNTDRHSIKKNLIGALLFDSGETAEATRLKRTARRRYTRRKNRICYLQEIFSNEMAKVDDSFFHRLEESFLVEEDKKHERHPIFGNIVDEVAYHEKYPTIYHLRKKLVDSTDKADLRLIYLALAHMIKFRGHFLIEGDLNPDNSDVDKLFIQLVQTYNQLFEENPINASGVDAKAILSARLSKSRRLENLIAQLPGEKKNGLFGNLIALSLGLTPNFKSNFDLAEDAKLQLSKDTYDDDLDNLLAQIGDQYADLFLAAKNLSDAILLSDILRVNTEITKAPLSASMIKRYDEHHQDLTLLKALVRQQLPEKYKEIFFDQSKNGYAGYIDGGASQEEFYKFIKPILEKMDGTEELLVKLNREDLLRKQRTFDNGSIPHQIHLGELHAILRRQEDFYPFLKDNREKIEKILTFRIPYYVGPLARGNSRFAWMTRKSEETITPWNFEEVVDKGASAQSFIERMTNFDKNLPNEKVLPKHSLLYEYFTVYNELTKVKYVTEGMRKPAFLSGEQKKAIVDLLFKTNRKVTVKQLKEDYFKKIECFDSVEISGVEDRFNASLGTYHDLLKIIKDKDFLDNEENEDILEDIVLTLTLFEDREMIEERLKTYAHLFDDKVMKQLKRRRYTGWGRLSRKLINGIRDKQSGKTILDFLKSDGFANRNFMQLIHDDSLTFKEDIQKAQVSGQGDSLHEHIANLAGSPAIKKGILQTVKVVDELVKVMGRHKPENIVIEMARENQTTQKGQKNSRERMKRIEEGIKELGSQILKEHPVENTQLQNEKLYLYYLQNGRDMYVDQELDINRLSDYDVDHIVPQSFLKDDSIDNKVLTRSDKARGKSDNVPSEEVVKKMKNYWRQLLNAKLITQRKFDNLTKAERGGLSELDKAGFIKRQLVETRQITKHVAQILDSRMNTKYDENDKLIREVKVITLKSKLVSDFRKDFQFYKVREINNYHHAHDAYLNAVVGTALIKKYPKLESEFVYGDYKVYDVRKMIAKSEQEIGKATAKYFFYSNIMNFFKTEITLANGEIRKRPLIETNGETGEIVWDKGRDFATVRKVLSMPQVNIVKKTEVQTGGFSKESILPKRNSDKLIARKKDWDPKKYGGFDSPTVAYSVLVVAKVEKGKSKKLKSVKELLGITIMERSSFEKNPIDFLEAKGYKEVKKDLIIKLPKYSLFELENGRKRMLASAGELQKGNELALPSKYVNFLYLASHYEKLKGSPEDNEQKQLFVEQHKHYLDEIIEQISEFSKRVILADANLDKVLSAYNKHRDKPIREQAENIIHLFTLTNLGAPAAFKYFDTTIDRKRYTSTKEVLDATLIHQSITGLYETRIDLSQLGGDGGGGGPAPGGSGGTLNIEDEHRLHETSKEPDVSLGSTWLSDFPQAWAETGGMGLAVRQAPLIIPLKATSTPVSIKQYPMSQEARLGIKPHIQRLLDQGILVPCQSPWNTPLLPVKKPGTNDYRPVQDLREVNKRVEDIHPTVPNPYNLLSGLPPSHQWYTVLDLKDAFFCLRLHPTSQPLFAFEWRDPEMGISGQLTWTRLPQGFKNSPTLFNEALHRDLADFRIQHPDLILLQYVDDLLLAATSELDCQQGTRALLQTLGNLGYRASAKKAQICQKQVKYLGYLLKEGQRWLTEARKETVMGQPTPKTPRQLREFLGKAGFCRLFIPGFAEMAAPLYPLTKPGTLFNWGPDQQKAYQEIKQALLTAPALGLPDLTKPFELFVDEKQGYAKGVLTQKLGPWRRPVAYLSKKLDPVAAGWPPCLRMVAAIAVLTKDAGKLTMGQPLVILAPHAVEALVKQPPDRWLSNARMTHYQALLLDTDRVQFGPVVALNPATLLPLPEEGLQHNCLDILAEAHGTRPDLTDQPLPDADHTWYTDGSSLLQEGQRKAGAAVTTETEVIWAKALPAGTSAQRAELIALTQALKMAEGKKLNVYTDSRYAFATAHIHGEIYRRRGWLTSEGKEIKNKDEILALLKALFLPKRLSIIHCPGHQKGHSAEARGNRMADQAARKAAITETPDTSTLLAGKRTADGSEFEKRTADGSEFESPKKKAKVE

SEQ ID NO: 2801 - protein, 2094 aa, synthetic construct
MPAAKRVKLDGGDKKYSIGLDIGTNSVGWAVITDEYKVPSKKFKVLGNTDRHSIKKNLIGALLFDSGETAEATRLKRTARRRYTRRKNRICYLQEIFSNEMAKVDDSFFHRLEESFLVEEDKKHERHPIFGNIVDEVAYHEKYPTIYHLRKKLVDSTDKADLRLIYLALAHMIKFRGHFLIEGDLNPDNSDVDKLFIQLVQTYNQLFEENPINASGVDAKAILSARLSKSRRLENLIAQLPGEKKNGLFGNLIALSLGLTPNFKSNFDLAEDAKLQLSKDTYDDDLDNLLAQIGDQYADLFLAAKNLSDAILLSDILRVNTEITKAPLSASMIKRYDEHHQDLTLLKALVRQQLPEKYKEIFFDQSKNGYAGYIDGGASQEEFYKFIKPILEKMDGTEELLVKLNREDLLRKQRTFDNGSIPHQIHLGELHAILRRQEDFYPFLKDNREKIEKILTFRIPYYVGPLARGNSRFAWMTRKSEETITPWNFEEVVDKGASAQSFIERMTNFDKNLPNEKVLPKHSLLYEYFTVYNELTKVKYVTEGMRKPAFLSGEQKKAIVDLLFKTNRKVTVKQLKEDYFKKIECFDSVEISGVEDRFNASLGTYHDLLKIIKDKDFLDNEENEDILEDIVLTLTLFEDREMIEERLKTYAHLFDDKVMKQLKRRRYTGWGRLSRKLINGIRDKQSGKTILDFLKSDGFANRNFMQLIHDDSLTFKEDIQKAQVSGQGDSLHEHIANLAGSPAIKKGILQTVKVVDELVKVMGRHKPENIVIEMARENQTTQKGQKNSRERMKRIEEGIKELGSQILKEHPVENTQLQNEKLYLYYLQNGRDMYVDQELDINRLSDYDVDHIVPQSFLKDDSIDNKVLTRSDKARGKSDNVPSEEVVKKMKNYWRQLLNAKLITQRKFDNLTKAERGGLSELDKAGFIKRQLVETRQITKHVAQILDSRMNTKYDENDKLIREVKVITLKSKLVSDFRKDFQFYKVREINNYHHAHDAYLNAVVGTALIKKYPKLESEFVYGDYKVYDVRKMIAKSEQEIGKATAKYFFYSNIMNFFKTEITLANGEIRKRPLIETNGETGEIVWDKGRDFATVRKVLSMPQVNIVKKTEVQTGGFSKESILPKRNSDKLIARKKDWDPKKYGGFDSPTVAYSVLVVAKVEKGKSKKLKSVKELLGITIMERSSFEKNPIDFLEAKGYKEVKKDLIIKLPKYSLFELENGRKRMLASAGELQKGNELALPSKYVNFLYLASHYEKLKGSPEDNEQKQLFVEQHKHYLDEIIEQISEFSKRVILADANLDKVLSAYNKHRDKPIREQAENIIHLFTLTNLGAPAAFKYFDTTIDRKRYTSTKEVLDATLIHQSITGLYETRIDLSQLGGDGGGGSPAPGGGGGTLNIEDEHRLHETSKEPDVSLGSTWLSDFPQAWAETGGMGLAVRQAPLIIPLKATSTPVSIKQYPMSQEARLGIKPHIQRLLDQGILVPCQSPWNTPLLPVKKPGTNDYRPVQDLREVNKRVEDIHPTVPNPYNLLSGLPPSHQWYTVLDLKDAFFCLRLHPTSQPLFAFEWRDPEMGISGQLTWTRLPQGFKNSPTLFNEALHRDLADFRIQHPDLILLQYVDDLLLAATSELDCQQGTRALLQTLGNLGYRASAKKAQICQKQVKYLGYLLKEGQRWLTEARKETVMGQPTPKTPRQLREFLGKAGFCRLFIPGFAEMAAPLYPLTKPGTLFNWGPDQQKAYQEIKQALLTAPALGLPDLTKPFELFVDEKQGYAKGVLTQKLGPWRRPVAYLSKKLDPVAAGWPPCLRMVAAIAVLTKDAGKLTMGQPLVILAPHAVEALVKQPPDRWLSNARMTHYQALLLDTDRVQFGPVVALNPATLLPLPEEGLQHNCLDILAEAHGTRPDLTDQPLPDADHTWYTDGSSLLQEGQRKAGAAVTTETEVIWAKALPAGTSAQRAELIALTQALKMAEGKKLNVYTDSRYAFATAHIHGEIYRRRGWLTSEGKEIKNKDEILALLKALFLPKRLSIIHCPGHQKGHSAEARGNRMADQAARKAAITETPDTSTLLAGKRTADGSEFEKRTADGSEFESPKKKAKVE

SEQ ID NO: 2802 - protein, 2100 aa, synthetic construct
MPAAKRVKLDGGDKKYSIGLDIGTNSVGWAVITDEYKVPSKKFKVLGNTDRHSIKKNLIGALLFDSGETAEATRLKRTARRRYTRRKNRICYLQEIFSNEMAKVDDSFFHRLEESFLVEEDKKHERHPIFGNIVDEVAYHEKYPTIYHLRKKLVDSTDKADLRLIYLALAHMIKFRGHFLIEGDLNPDNSDVDKLFIQLVQTYNQLFEENPINASGVDAKAILSARLSKSRRLENLIAQLPGEKKNGLFGNLIALSLGLTPNFKSNFDLAEDAKLQLSKDTYDDDLDNLLAQIGDQYADLFLAAKNLSDAILLSDILRVNTEITKAPLSASMIKRYDEHHQDLTLLKALVRQQLPEKYKEIFFDQSKNGYAGYIDGGASQEEFYKFIKPILEKMDGTEELLVKLNREDLLRKQRTFDNGSIPHQIHLGELHAILRRQEDFYPFLKDNREKIEKILTFRIPYYVGPLARGNSRFAWMTRKSEETITPWNFEEVVDKGASAQSFIERMTNFDKNLPNEKVLPKHSLLYEYFTVYNELTKVKYVTEGMRKPAFLSGEQKKAIVDLLFKTNRKVTVKQLKEDYFKKIECFDSVEISGVEDRFNASLGTYHDLLKIIKDKDFLDNEENEDILEDIVLTLTLFEDREMIEERLKTYAHLFDDKVMKQLKRRRYTGWGRLSRKLINGIRDKQSGKTILDFLKSDGFANRNFMQLIHDDSLTFKEDIQKAQVSGQGDSLHEHIANLAGSPAIKKGILQTVKVVDELVKVMGRHKPENIVIEMARENQTTQKGQKNSRERMKRIEEGIKELGSQILKEHPVENTQLQNEKLYLYYLQNGRDMYVDQELDINRLSDYDVDHIVPQSFLKDDSIDNKVLTRSDKARGKSDNVPSEEVVKKMKNYWRQLLNAKLITQRKFDNLTKAERGGLSELDKAGFIKRQLVETRQITKHVAQILDSRMNTKYDENDKLIREVKVITLKSKLVSDFRKDFQFYKVREINNYHHAHDAYLNAVVGTALIKKYPKLESEFVYGDYKVYDVRKMIAKSEQEIGKATAKYFFYSNIMNFFKTEITLANGEIRKRPLIETNGETGEIVWDKGRDFATVRKVLSMPQVNIVKKTEVQTGGFSKESILPKRNSDKLIARKKDWDPKKYGGFDSPTVAYSVLVVAKVEKGKSKKLKSVKELLGITIMERSSFEKNPIDFLEAKGYKEVKKDLIIKLPKYSLFELENGRKRMLASAGELQKGNELALPSKYVNFLYLASHYEKLKGSPEDNEQKQLFVEQHKHYLDEIIEQISEFSKRVILADANLDKVLSAYNKHRDKPIREQAENIIHLFTLTNLGAPAAFKYFDTTIDRKRYTSTKEVLDATLIHQSITGLYETRIDLSQLGGDGGGSSGSSGSSGSSGSSGGTLNIEDEHRLHETSKEPDVSLGSTWLSDFPQAWAETGGMGLAVRQAPLIIPLKATSTPVSIKQYPMSQEARLGIKPHIQRLLDQGILVPCQSPWNTPLLPVKKPGTNDYRPVQDLREVNKRVEDIHPTVPNPYNLLSGLPPSHQWYTVLDLKDAFFCLRLHPTSQPLFAFEWRDPEMGISGQLTWTRLPQGFKNSPTLFNEALHRDLADFRIQHPDLILLQYVDDLLLAATSELDCQQGTRALLQTLGNLGYRASAKKAQICQKQVKYLGYLLKEGQRWLTEARKETVMGQPTPKTPRQLREFLGKAGFCRLFIPGFAEMAAPLYPLTKPGTLFNWGPDQQKAYQEIKQALLTAPALGLPDLTKPFELFVDEKQGYAKGVLTQKLGPWRRPVAYLSKKLDPVAAGWPPCLRMVAAIAVLTKDAGKLTMGQPLVILAPHAVEALVKQPPDRWLSNARMTHYQALLLDTDRVQFGPVVALNPATLLPLPEEGLQHNCLDILAEAHGTRPDLTDQPLPDADHTWYTDGSSLLQEGQRKAGAAVTTETEVIWAKALPAGTSAQRAELIALTQALKMAEGKKLNVYTDSRYAFATAHIHGEIYRRRGWLTSEGKEIKNKDEILALLKALFLPKRLSIIHCPGHQKGHSAEARGNRMADQAARKAAITETPDTSTLLAGKRTADGSEFEKRTADGSEFESPKKKAKVE

SEQ ID NO: 2803 - protein, 2110 aa, synthetic construct
MPAAKRVKLDGGDKKYSIGLDIGTNSVGWAVITDEYKVPSKKFKVLGNTDRHSIKKNLIGALLFDSGETAEATRLKRTARRRYTRRKNRICYLQEIFSNEMAKVDDSFFHRLEESFLVEEDKKHERHPIFGNIVDEVAYHEKYPTIYHLRKKLVDSTDKADLRLIYLALAHMIKFRGHFLIEGDLNPDNSDVDKLFIQLVQTYNQLFEENPINASGVDAKAILSARLSKSRRLENLIAQLPGEKKNGLFGNLIALSLGLTPNFKSNFDLAEDAKLQLSKDTYDDDLDNLLAQIGDQYADLFLAAKNLSDAILLSDILRVNTEITKAPLSASMIKRYDEHHQDLTLLKALVRQQLPEKYKEIFFDQSKNGYAGYIDGGASQEEFYKFIKPILEKMDGTEELLVKLNREDLLRKQRTFDNGSIPHQIHLGELHAILRRQEDFYPFLKDNREKIEKILTFRIPYYVGPLARGNSRFAWMTRKSEETITPWNFEEVVDKGASAQSFIERMTNFDKNLPNEKVLPKHSLLYEYFTVYNELTKVKYVTEGMRKPAFLSGEQKKAIVDLLFKTNRKVTVKQLKEDYFKKIECFDSVEISGVEDRFNASLGTYHDLLKIIKDKDFLDNEENEDILEDIVLTLTLFEDREMIEERLKTYAHLFDDKVMKQLKRRRYTGWGRLSRKLINGIRDKQSGKTILDFLKSDGFANRNFMQLIHDDSLTFKEDIQKAQVSGQGDSLHEHIANLAGSPAIKKGILQTVKVVDELVKVMGRHKPENIVIEMARENQTTQKGQKNSRERMKRIEEGIKELGSQILKEHPVENTQLQNEKLYLYYLQNGRDMYVDQELDINRLSDYDVDHIVPQSFLKDDSIDNKVLTRSDKARGKSDNVPSEEVVKKMKNYWRQLLNAKLITQRKFDNLTKAERGGLSELDKAGFIKRQLVETRQITKHVAQILDSRMNTKYDENDKLIREVKVITLKSKLVSDFRKDFQFYKVREINNYHHAHDAYLNAVVGTALIKKYPKLESEFVYGDYKVYDVRKMIAKSEQEIGKATAKYFFYSNIMNFFKTEITLANGEIRKRPLIETNGETGEIVWDKGRDFATVRKVLSMPQVNIVKKTEVQTGGFSKESILPKRNSDKLIARKKDWDPKKYGGFDSPTVAYSVLVVAKVEKGKSKKLKSVKELLGITIMERSSFEKNPIDFLEAKGYKEVKKDLIIKLPKYSLFELENGRKRMLASAGELQKGNELALPSKYVNFLYLASHYEKLKGSPEDNEQKQLFVEQHKHYLDEIIEQISEFSKRVILADANLDKVLSAYNKHRDKPIREQAENIIHLFTLTNLGAPAAFKYFDTTIDRKRYTSTKEVLDATLIHQSITGLYETRIDLSQLGGDGGEAAAKEAAAKEAAAKEAAAKEAAAKGGTLNIEDEHRLHETSKEPDVSLGSTWLSDFPQAWAETGGMGLAVRQAPLIIPLKATSTPVSIKQYPMSQEARLGIKPHIQRLLDQGILVPCQSPWNTPLLPVKKPGTNDYRPVQDLREVNKRVEDIHPTVPNPYNLLSGLPPSHQWYTVLDLKDAFFCLRLHPTSQPLFAFEWRDPEMGISGQLTWTRLPQGFKNSPTLFNEALHRDLADFRIQHPDLILLQYVDDLLLAATSELDCQQGTRALLQTLGNLGYRASAKKAQICQKQVKYLGYLLKEGQRWLTEARKETVMGQPTPKTPRQLREFLGKAGFCRLFIPGFAEMAAPLYPLTKPGTLFNWGPDQQKAYQEIKQALLTAPALGLPDLTKPFELFVDEKQGYAKGVLTQKLGPWRRPVAYLSKKLDPVAAGWPPCLRMVAAIAVLTKDAGKLTMGQPLVILAPHAVEALVKQPPDRWLSNARMTHYQALLLDTDRVQFGPVVALNPATLLPLPEEGLQHNCLDILAEAHGTRPDLTDQPLPDADHTWYTDGSSLLQEGQRKAGAAVTTETEVIWAKALPAGTSAQRAELIALTQALKMAEGKKLNVYTDSRYAFATAHIHGEIYRRRGWLTSEGKEIKNKDEILALLKALFLPKRLSIIHCPGHQKGHSAEARGNRMADQAARKAAITETPDTSTLLAGKRTADGSEFEKRTADGSEFESPKKKAKVE

SEQ ID NO: 2804 - protein, 2094 aa, synthetic construct
MPAAKRVKLDGGDKKYSIGLDIGTNSVGWAVITDEYKVPSKKFKVLGNTDRHSIKKNLIGALLFDSGETAEATRLKRTARRRYTRRKNRICYLQEIFSNEMAKVDDSFFHRLEESFLVEEDKKHERHPIFGNIVDEVAYHEKYPTIYHLRKKLVDSTDKADLRLIYLALAHMIKFRGHFLIEGDLNPDNSDVDKLFIQLVQTYNQLFEENPINASGVDAKAILSARLSKSRRLENLIAQLPGEKKNGLFGNLIALSLGLTPNFKSNFDLAEDAKLQLSKDTYDDDLDNLLAQIGDQYADLFLAAKNLSDAILLSDILRVNTEITKAPLSASMIKRYDEHHQDLTLLKALVRQQLPEKYKEIFFDQSKNGYAGYIDGGASQEEFYKFIKPILEKMDGTEELLVKLNREDLLRKQRTFDNGSIPHQIHLGELHAILRRQEDFYPFLKDNREKIEKILTFRIPYYVGPLARGNSRFAWMTRKSEETITPWNFEEVVDKGASAQSFIERMTNFDKNLPNEKVLPKHSLLYEYFTVYNELTKVKYVTEGMRKPAFLSGEQKKAIVDLLFKTNRKVTVKQLKEDYFKKIECFDSVEISGVEDRFNASLGTYHDLLKIIKDKDFLDNEENEDILEDIVLTLTLFEDREMIEERLKTYAHLFDDKVMKQLKRRRYTGWGRLSRKLINGIRDKQSGKTILDFLKSDGFANRNFMQLIHDDSLTFKEDIQKAQVSGQGDSLHEHIANLAGSPAIKKGILQTVKVVDELVKVMGRHKPENIVIEMARENQTTQKGQKNSRERMKRIEEGIKELGSQILKEHPVENTQLQNEKLYLYYLQNGRDMYVDQELDINRLSDYDVDHIVPQSFLKDDSIDNKVLTRSDKARGKSDNVPSEEVVKKMKNYWRQLLNAKLITQRKFDNLTKAERGGLSELDKAGFIKRQLVETRQITKHVAQILDSRMNTKYDENDKLIREVKVITLKSKLVSDFRKDFQFYKVREINNYHHAHDAYLNAVVGTALIKKYPKLESEFVYGDYKVYDVRKMIAKSEQEIGKATAKYFFYSNIMNFFKTEITLANGEIRKRPLIETNGETGEIVWDKGRDFATVRKVLSMPQVNIVKKTEVQTGGFSKESILPKRNSDKLIARKKDWDPKKYGGFDSPTVAYSVLVVAKVEKGKSKKLKSVKELLGITIMERSSFEKNPIDFLEAKGYKEVKKDLIIKLPKYSLFELENGRKRMLASAGELQKGNELALPSKYVNFLYLASHYEKLKGSPEDNEQKQLFVEQHKHYLDEIIEQISEFSKRVILADANLDKVLSAYNKHRDKPIREQAENIIHLFTLTNLGAPAAFKYFDTTIDRKRYTSTKEVLDATLIHQSITGLYETRIDLSQLGGDGGGGSGGGPAPGGTLNIEDEHRLHETSKEPDVSLGSTWLSDFPQAWAETGGMGLAVRQAPLIIPLKATSTPVSIKQYPMSQEARLGIKPHIQRLLDQGILVPCQSPWNTPLLPVKKPGTNDYRPVQDLREVNKRVEDIHPTVPNPYNLLSGLPPSHQWYTVLDLKDAFFCLRLHPTSQPLFAFEWRDPEMGISGQLTWTRLPQGFKNSPTLFNEALHRDLADFRIQHPDLILLQYVDDLLLAATSELDCQQGTRALLQTLGNLGYRASAKKAQICQKQVKYLGYLLKEGQRWLTEARKETVMGQPTPKTPRQLREFLGKAGFCRLFIPGFAEMAAPLYPLTKPGTLFNWGPDQQKAYQEIKQALLTAPALGLPDLTKPFELFVDEKQGYAKGVLTQKLGPWRRPVAYLSKKLDPVAAGWPPCLRMVAAIAVLTKDAGKLTMGQPLVILAPHAVEALVKQPPDRWLSNARMTHYQALLLDTDRVQFGPVVALNPATLLPLPEEGLQHNCLDILAEAHGTRPDLTDQPLPDADHTWYTDGSSLLQEGQRKAGAAVTTETEVIWAKALPAGTSAQRAELIALTQALKMAEGKKLNVYTDSRYAFATAHIHGEIYRRRGWLTSEGKEIKNKDEILALLKALFLPKRLSIIHCPGHQKGHSAEARGNRMADQAARKAAITETPDTSTLLAGKRTADGSEFEKRTADGSEFESPKKKAKVE

SEQ ID NO: 2805 - protein, 2096 aa, synthetic construct
MPAAKRVKLDGGDKKYSIGLDIGTNSVGWAVITDEYKVPSKKFKVLGNTDRHSIKKNLIGALLFDSGETAEATRLKRTARRRYTRRKNRICYLQEIFSNEMAKVDDSFFHRLEESFLVEEDKKHERHPIFGNIVDEVAYHEKYPTIYHLRKKLVDSTDKADLRLIYLALAHMIKFRGHFLIEGDLNPDNSDVDKLFIQLVQTYNQLFEENPINASGVDAKAILSARLSKSRRLENLIAQLPGEKKNGLFGNLIALSLGLTPNFKSNFDLAEDAKLQLSKDTYDDDLDNLLAQIGDQYADLFLAAKNLSDAILLSDILRVNTEITKAPLSASMIKRYDEHHQDLTLLKALVRQQLPEKYKEIFFDQSKNGYAGYIDGGASQEEFYKFIKPILEKMDGTEELLVKLNREDLLRKQRTFDNGSIPHQIHLGELHAILRRQEDFYPFLKDNREKIEKILTFRIPYYVGPLARGNSRFAWMTRKSEETITPWNFEEVVDKGASAQSFIERMTNFDKNLPNEKVLPKHSLLYEYFTVYNELTKVKYVTEGMRKPAFLSGEQKKAIVDLLFKTNRKVTVKQLKEDYFKKIECFDSVEISGVEDRFNASLGTYHDLLKIIKDKDFLDNEENEDILEDIVLTLTLFEDREMIEERLKTYAHLFDDKVMKQLKRRRYTGWGRLSRKLINGIRDKQSGKTILDFLKSDGFANRNFMQLIHDDSLTFKEDIQKAQVSGQGDSLHEHIANLAGSPAIKKGILQTVKVVDELVKVMGRHKPENIVIEMARENQTTQKGQKNSRERMKRIEEGIKELGSQILKEHPVENTQLQNEKLYLYYLQNGRDMYVDQELDINRLSDYDVDHIVPQSFLKDDSIDNKVLTRSDKARGKSDNVPSEEVVKKMKNYWRQLLNAKLITQRKFDNLTKAERGGLSELDKAGFIKRQLVETRQITKHVAQILDSRMNTKYDENDKLIREVKVITLKSKLVSDFRKDFQFYKVREINNYHHAHDAYLNAVVGTALIKKYPKLESEFVYGDYKVYDVRKMIAKSEQEIGKATAKYFFYSNIMNFFKTEITLANGEIRKRPLIETNGETGEIVWDKGRDFATVRKVLSMPQVNIVKKTEVQTGGFSKESILPKRNSDKLIARKKDWDPKKYGGFDSPTVAYSVLVVAKVEKGKSKKLKSVKELLGITIMERSSFEKNPIDFLEAKGYKEVKKDLIIKLPKYSLFELENGRKRMLASAGELQKGNELALPSKYVNFLYLASHYEKLKGSPEDNEQKQLFVEQHKHYLDEIIEQISEFSKRVILADANLDKVLSAYNKHRDKPIREQAENIIHLFTLTNLGAPAAFKYFDTTIDRKRYTSTKEVLDATLIHQSITGLYETRIDLSQLGGDGGGGSPAPEAAAKGGTLNIEDEHRLHETSKEPDVSLGSTWLSDFPQAWAETGGMGLAVRQAPLIIPLKATSTPVSIKQYPMSQEARLGIKPHIQRLLDQGILVPCQSPWNTPLLPVKKPGTNDYRPVQDLREVNKRVEDIHPTVPNPYNLLSGLPPSHQWYTVLDLKDAFFCLRLHPTSQPLFAFEWRDPEMGISGQLTWTRLPQGFKNSPTLFNEALHRDLADFRIQHPDLILLQYVDDLLLAATSELDCQQGTRALLQTLGNLGYRASAKKAQICQKQVKYLGYLLKEGQRWLTEARKETVMGQPTPKTPRQLREFLGKAGFCRLFIPGFAEMAAPLYPLTKPGTLFNWGPDQQKAYQEIKQALLTAPALGLPDLTKPFELFVDEKQGYAKGVLTQKLGPWRRPVAYLSKKLDPVAAGWPPCLRMVAAIAVLTKDAGKLTMGQPLVILAPHAVEALVKQPPDRWLSNARMTHYQALLLDTDRVQFGPVVALNPATLLPLPEEGLQHNCLDILAEAHGTRPDLTDQPLPDADHTWYTDGSSLLQEGQRKAGAAVTTETEVIWAKALPAGTSAQRAELIALTQALKMAEGKKLNVYTDSRYAFATAHIHGEIYRRRGWLTSEGKEIKNKDEILALLKALFLPKRLSIIHCPGHQKGHSAEARGNRMADQAARKAAITETPDTSTLLAGKRTADGSEFEKRTADGSEFESPKKKAKVE

SEQ ID NO: 2806 - protein, 2097 aa, synthetic construct
MPAAKRVKLDGGDKKYSIGLDIGTNSVGWAVITDEYKVPSKKFKVLGNTDRHSIKKNLIGALLFDSGETAEATRLKRTARRRYTRRKNRICYLQEIFSNEMAKVDDSFFHRLEESFLVEEDKKHERHPIFGNIVDEVAYHEKYPTIYHLRKKLVDSTDKADLRLIYLALAHMIKFRGHFLIEGDLNPDNSDVDKLFIQLVQTYNQLFEENPINASGVDAKAILSARLSKSRRLENLIAQLPGEKKNGLFGNLIALSLGLTPNFKSNFDLAEDAKLQLSKDTYDDDLDNLLAQIGDQYADLFLAAKNLSDAILLSDILRVNTEITKAPLSASMIKRYDEHHQDLTLLKALVRQQLPEKYKEIFFDQSKNGYAGYIDGGASQEEFYKFIKPILEKMDGTEELLVKLNREDLLRKQRTFDNGSIPHQIHLGELHAILRRQEDFYPFLKDNREKIEKILTFRIPYYVGPLARGNSRFAWMTRKSEETITPWNFEEVVDKGASAQSFIERMTNFDKNLPNEKVLPKHSLLYEYFTVYNELTKVKYVTEGMRKPAFLSGEQKKAIVDLLFKTNRKVTVKQLKEDYFKKIECFDSVEISGVEDRFNASLGTYHDLLKIIKDKDFLDNEENEDILEDIVLTLTLFEDREMIEERLKTYAHLFDDKVMKQLKRRRYTGWGRLSRKLINGIRDKQSGKTILDFLKSDGFANRNFMQLIHDDSLTFKEDIQKAQVSGQGDSLHEHIANLAGSPAIKKGILQTVKVVDELVKVMGRHKPENIVIEMARENQTTQKGQKNSRERMKRIEEGIKELGSQILKEHPVENTQLQNEKLYLYYLQNGRDMYVDQELDINRLSDYDVDHIVPQSFLKDDSIDNKVLTRSDKARGKSDNVPSEEVVKKMKNYWRQLLNAKLITQRKFDNLTKAERGGLSELDKAGFIKRQLVETRQITKHVAQILDSRMNTKYDENDKLIREVKVITLKSKLVSDFRKDFQFYKVREINNYHHAHDAYLNAVVGTALIKKYPKLESEFVYGDYKVYDVRKMIAKSEQEIGKATAKYFFYSNIMNFFKTEITLANGEIRKRPLIETNGETGEIVWDKGRDFATVRKVLSMPQVNIVKKTEVQTGGFSKESILPKRNSDKLIARKKDWDPKKYGGFDSPTVAYSVLVVAKVEKGKSKKLKSVKELLGITIMERSSFEKNPIDFLEAKGYKEVKKDLIIKLPKYSLFELENGRKRMLASAGELQKGNELALPSKYVNFLYLASHYEKLKGSPEDNEQKQLFVEQHKHYLDEIIEQISEFSKRVILADANLDKVLSAYNKHRDKPIREQAENIIHLFTLTNLGAPAAFKYFDTTIDRKRYTSTKEVLDATLIHQSITGLYETRIDLSQLGGDGGGSSGSSGSSGSSGGTLNIEDEHRLHETSKEPDVSLGSTWLSDFPQAWAETGGMGLAVRQAPLIIPLKATSTPVSIKQYPMSQEARLGIKPHIQRLLDQGILVPCQSPWNTPLLPVKKPGTNDYRPVQDLREVNKRVEDIHPTVPNPYNLLSGLPPSHQWYTVLDLKDAFFCLRLHPTSQPLFAFEWRDPEMGISGQLTWTRLPQGFKNSPTLFNEALHRDLADFRIQHPDLILLQYVDDLLLAATSELDCQQGTRALLQTLGNLGYRASAKKAQICQKQVKYLGYLLKEGQRWLTEARKETVMGQPTPKTPRQLREFLGKAGFCRLFIPGFAEMAAPLYPLTKPGTLFNWGPDQQKAYQEIKQALLTAPALGLPDLTKPFELFVDEKQGYAKGVLTQKLGPWRRPVAYLSKKLDPVAAGWPPCLRMVAAIAVLTKDAGKLTMGQPLVILAPHAVEALVKQPPDRWLSNARMTHYQALLLDTDRVQFGPVVALNPATLLPLPEEGLQHNCLDILAEAHGTRPDLTDQPLPDADHTWYTDGSSLLQEGQRKAGAAVTTETEVIWAKALPAGTSAQRAELIALTQALKMAEGKKLNVYTDSRYAFATAHIHGEIYRRRGWLTSEGKEIKNKDEILALLKALFLPKRLSIIHCPGHQKGHSAEARGNRMADQAARKAAITETPDTSTLLAGKRTADGSEFEKRTADGSEFESPKKKAKVE

SEQ ID NO: 2807 - protein, 2100 aa, synthetic construct
MPAAKRVKLDGGDKKYSIGLDIGTNSVGWAVITDEYKVPSKKFKVLGNTDRHSIKKNLIGALLFDSGETAEATRLKRTARRRYTRRKNRICYLQEIFSNEMAKVDDSFFHRLEESFLVEEDKKHERHPIFGNIVDEVAYHEKYPTIYHLRKKLVDSTDKADLRLIYLALAHMIKFRGHFLIEGDLNPDNSDVDKLFIQLVQTYNQLFEENPINASGVDAKAILSARLSKSRRLENLIAQLPGEKKNGLFGNLIALSLGLTPNFKSNFDLAEDAKLQLSKDTYDDDLDNLLAQIGDQYADLFLAAKNLSDAILLSDILRVNTEITKAPLSASMIKRYDEHHQDLTLLKALVRQQLPEKYKEIFFDQSKNGYAGYIDGGASQEEFYKFIKPILEKMDGTEELLVKLNREDLLRKQRTFDNGSIPHQIHLGELHAILRRQEDFYPFLKDNREKIEKILTFRIPYYVGPLARGNSRFAWMTRKSEETITPWNFEEVVDKGASAQSFIERMTNFDKNLPNEKVLPKHSLLYEYFTVYNELTKVKYVTEGMRKPAFLSGEQKKAIVDLLFKTNRKVTVKQLKEDYFKKIECFDSVEISGVEDRFNASLGTYHDLLKIIKDKDFLDNEENEDILEDIVLTLTLFEDREMIEERLKTYAHLFDDKVMKQLKRRRYTGWGRLSRKLINGIRDKQSGKTILDFLKSDGFANRNFMQLIHDDSLTFKEDIQKAQVSGQGDSLHEHIANLAGSPAIKKGILQTVKVVDELVKVMGRHKPENIVIEMARENQTTQKGQKNSRERMKRIEEGIKELGSQILKEHPVENTQLQNEKLYLYYLQNGRDMYVDQELDINRLSDYDVDHIVPQSFLKDDSIDNKVLTRSDKARGKSDNVPSEEVVKKMKNYWRQLLNAKLITQRKFDNLTKAERGGLSELDKAGFIKRQLVETRQITKHVAQILDSRMNTKYDENDKLIREVKVITLKSKLVSDFRKDFQFYKVREINNYHHAHDAYLNAVVGTALIKKYPKLESEFVYGDYKVYDVRKMIAKSEQEIGKATAKYFFYSNIMNFFKTEITLANGEIRKRPLIETNGETGEIVWDKGRDFATVRKVLSMPQVNIVKKTEVQTGGFSKESILPKRNSDKLIARKKDWDPKKYGGFDSPTVAYSVLVVAKVEKGKSKKLKSVKELLGITIMERSSFEKNPIDFLEAKGYKEVKKDLIIKLPKYSLFELENGRKRMLASAGELQKGNELALPSKYVNFLYLASHYEKLKGSPEDNEQKQLFVEQHKHYLDEIIEQISEFSKRVILADANLDKVLSAYNKHRDKPIREQAENIIHLFTLTNLGAPAAFKYFDTTIDRKRYTSTKEVLDATLIHQSITGLYETRIDLSQLGGDGGGGSGGSGGSGGSGGSGGTLNIEDEHRLHETSKEPDVSLGSTWLSDFPQAWAETGGMGLAVRQAPLIIPLKATSTPVSIKQYPMSQEARLGIKPHIQRLLDQGILVPCQSPWNTPLLPVKKPGTNDYRPVQDLREVNKRVEDIHPTVPNPYNLLSGLPPSHQWYTVLDLKDAFFCLRLHPTSQPLFAFEWRDPEMGISGQLTWTRLPQGFKNSPTLFNEALHRDLADFRIQHPDLILLQYVDDLLLAATSELDCQQGTRALLQTLGNLGYRASAKKAQICQKQVKYLGYLLKEGQRWLTEARKETVMGQPTPKTPRQLREFLGKAGFCRLFIPGFAEMAAPLYPLTKPGTLFNWGPDQQKAYQEIKQALLTAPALGLPDLTKPFELFVDEKQGYAKGVLTQKLGPWRRPVAYLSKKLDPVAAGWPPCLRMVAAIAVLTKDAGKLTMGQPLVILAPHAVEALVKQPPDRWLSNARMTHYQALLLDTDRVQFGPVVALNPATLLPLPEEGLQHNCLDILAEAHGTRPDLTDQPLPDADHTWYTDGSSLLQEGQRKAGAAVTTETEVIWAKALPAGTSAQRAELIALTQALKMAEGKKLNVYTDSRYAFATAHIHGEIYRRRGWLTSEGKEIKNKDEILALLKALFLPKRLSIIHCPGHQKGHSAEARGNRMADQAARKAAITETPDTSTLLAGKRTADGSEFEKRTADGSEFESPKKKAKVE

SEQ ID NO: 2808 - protein, 2091 aa, synthetic construct
MPAAKRVKLDGGDKKYSIGLDIGTNSVGWAVITDEYKVPSKKFKVLGNTDRHSIKKNLIGALLFDSGETAEATRLKRTARRRYTRRKNRICYLQEIFSNEMAKVDDSFFHRLEESFLVEEDKKHERHPIFGNIVDEVAYHEKYPTIYHLRKKLVDSTDKADLRLIYLALAHMIKFRGHFLIEGDLNPDNSDVDKLFIQLVQTYNQLFEENPINASGVDAKAILSARLSKSRRLENLIAQLPGEKKNGLFGNLIALSLGLTPNFKSNFDLAEDAKLQLSKDTYDDDLDNLLAQIGDQYADLFLAAKNLSDAILLSDILRVNTEITKAPLSASMIKRYDEHHQDLTLLKALVRQQLPEKYKEIFFDQSKNGYAGYIDGGASQEEFYKFIKPILEKMDGTEELLVKLNREDLLRKQRTFDNGSIPHQIHLGELHAILRRQEDFYPFLKDNREKIEKILTFRIPYYVGPLARGNSRFAWMTRKSEETITPWNFEEVVDKGASAQSFIERMTNFDKNLPNEKVLPKHSLLYEYFTVYNELTKVKYVTEGMRKPAFLSGEQKKAIVDLLFKTNRKVTVKQLKEDYFKKIECFDSVEISGVEDRFNASLGTYHDLLKIIKDKDFLDNEENEDILEDIVLTLTLFEDREMIEERLKTYAHLFDDKVMKQLKRRRYTGWGRLSRKLINGIRDKQSGKTILDFLKSDGFANRNFMQLIHDDSLTFKEDIQKAQVSGQGDSLHEHIANLAGSPAIKKGILQTVKVVDELVKVMGRHKPENIVIEMARENQTTQKGQKNSRERMKRIEEGIKELGSQILKEHPVENTQLQNEKLYLYYLQNGRDMYVDQELDINRLSDYDVDHIVPQSFLKDDSIDNKVLTRSDKARGKSDNVPSEEVVKKMKNYWRQLLNAKLITQRKFDNLTKAERGGLSELDKAGFIKRQLVETRQITKHVAQILDSRMNTKYDENDKLIREVKVITLKSKLVSDFRKDFQFYKVREINNYHHAHDAYLNAVVGTALIKKYPKLESEFVYGDYKVYDVRKMIAKSEQEIGKATAKYFFYSNIMNFFKTEITLANGEIRKRPLIETNGETGEIVWDKGRDFATVRKVLSMPQVNIVKKTEVQTGGFSKESILPKRNSDKLIARKKDWDPKKYGGFDSPTVAYSVLVVAKVEKGKSKKLKSVKELLGITIMERSSFEKNPIDFLEAKGYKEVKKDLIIKLPKYSLFELENGRKRMLASAGELQKGNELALPSKYVNFLYLASHYEKLKGSPEDNEQKQLFVEQHKHYLDEIIEQISEFSKRVILADANLDKVLSAYNKHRDKPIREQAENIIHLFTLTNLGAPAAFKYFDTTIDRKRYTSTKEVLDATLIHQSITGLYETRIDLSQLGGDGGGGSPAPGGTLNIEDEHRLHETSKEPDVSLGSTWLSDFPQAWAETGGMGLAVRQAPLIIPLKATSTPVSIKQYPMSQEARLGIKPHIQRLLDQGILVPCQSPWNTPLLPVKKPGTNDYRPVQDLREVNKRVEDIHPTVPNPYNLLSGLPPSHQWYTVLDLKDAFFCLRLHPTSQPLFAFEWRDPEMGISGQLTWTRLPQGFKNSPTLFNEALHRDLADFRIQHPDLILLQYVDDLLLAATSELDCQQGTRALLQTLGNLGYRASAKKAQICQKQVKYLGYLLKEGQRWLTEARKETVMGQPTPKTPRQLREFLGKAGFCRLFIPGFAEMAAPLYPLTKPGTLFNWGPDQQKAYQEIKQALLTAPALGLPDLTKPFELFVDEKQGYAKGVLTQKLGPWRRPVAYLSKKLDPVAAGWPPCLRMVAAIAVLTKDAGKLTMGQPLVILAPHAVEALVKQPPDRWLSNARMTHYQALLLDTDRVQFGPVVALNPATLLPLPEEGLQHNCLDILAEAHGTRPDLTDQPLPDADHTWYTDGSSLLQEGQRKAGAAVTTETEVIWAKALPAGTSAQRAELIALTQALKMAEGKKLNVYTDSRYAFATAHIHGEIYRRRGWLTSEGKEIKNKDEILALLKALFLPKRLSIIHCPGHQKGHSAEARGNRMADQAARKAAITETPDTSTLLAGKRTADGSEFEKRTADGSEFESPKKKAKVE

SEQ ID NO: 2809 - protein, 2094 aa, synthetic construct
MPAAKRVKLDGGDKKYSIGLDIGTNSVGWAVITDEYKVPSKKFKVLGNTDRHSIKKNLIGALLFDSGETAEATRLKRTARRRYTRRKNRICYLQEIFSNEMAKVDDSFFHRLEESFLVEEDKKHERHPIFGNIVDEVAYHEKYPTIYHLRKKLVDSTDKADLRLIYLALAHMIKFRGHFLIEGDLNPDNSDVDKLFIQLVQTYNQLFEENPINASGVDAKAILSARLSKSRRLENLIAQLPGEKKNGLFGNLIALSLGLTPNFKSNFDLAEDAKLQLSKDTYDDDLDNLLAQIGDQYADLFLAAKNLSDAILLSDILRVNTEITKAPLSASMIKRYDEHHQDLTLLKALVRQQLPEKYKEIFFDQSKNGYAGYIDGGASQEEFYKFIKPILEKMDGTEELLVKLNREDLLRKQRTFDNGSIPHQIHLGELHAILRRQEDFYPFLKDNREKIEKILTFRIPYYVGPLARGNSRFAWMTRKSEETITPWNFEEVVDKGASAQSFIERMTNFDKNLPNEKVLPKHSLLYEYFTVYNELTKVKYVTEGMRKPAFLSGEQKKAIVDLLFKTNRKVTVKQLKEDYFKKIECFDSVEISGVEDRFNASLGTYHDLLKIIKDKDFLDNEENEDILEDIVLTLTLFEDREMIEERLKTYAHLFDDKVMKQLKRRRYTGWGRLSRKLINGIRDKQSGKTILDFLKSDGFANRNFMQLIHDDSLTFKEDIQKAQVSGQGDSLHEHIANLAGSPAIKKGILQTVKVVDELVKVMGRHKPENIVIEMARENQTTQKGQKNSRERMKRIEEGIKELGSQILKEHPVENTQLQNEKLYLYYLQNGRDMYVDQELDINRLSDYDVDHIVPQSFLKDDSIDNKVLTRSDKARGKSDNVPSEEVVKKMKNYWRQLLNAKLITQRKFDNLTKAERGGLSELDKAGFIKRQLVETRQITKHVAQILDSRMNTKYDENDKLIREVKVITLKSKLVSDFRKDFQFYKVREINNYHHAHDAYLNAVVGTALIKKYPKLESEFVYGDYKVYDVRKMIAKSEQEIGKATAKYFFYSNIMNFFKTEITLANGEIRKRPLIETNGETGEIVWDKGRDFATVRKVLSMPQVNIVKKTEVQTGGFSKESILPKRNSDKLIARKKDWDPKKYGGFDSPTVAYSVLVVAKVEKGKSKKLKSVKELLGITIMERSSFEKNPIDFLEAKGYKEVKKDLIIKLPKYSLFELENGRKRMLASAGELQKGNELALPSKYVNFLYLASHYEKLKGSPEDNEQKQLFVEQHKHYLDEIIEQISEFSKRVILADANLDKVLSAYNKHRDKPIREQAENIIHLFTLTNLGAPAAFKYFDTTIDRKRYTSTKEVLDATLIHQSITGLYETRIDLSQLGGDGGGGSGGSGGSGGTLNIEDEHRLHETSKEPDVSLGSTWLSDFPQAWAETGGMGLAVRQAPLIIPLKATSTPVSIKQYPMSQEARLGIKPHIQRLLDQGILVPCQSPWNTPLLPVKKPGTNDYRPVQDLREVNKRVEDIHPTVPNPYNLLSGLPPSHQWYTVLDLKDAFFCLRLHPTSQPLFAFEWRDPEMGISGQLTWTRLPQGFKNSPTLFNEALHRDLADFRIQHPDLILLQYVDDLLLAATSELDCQQGTRALLQTLGNLGYRASAKKAQICQKQVKYLGYLLKEGQRWLTEARKETVMGQPTPKTPRQLREFLGKAGFCRLFIPGFAEMAAPLYPLTKPGTLFNWGPDQQKAYQEIKQALLTAPALGLPDLTKPFELFVDEKQGYAKGVLTQKLGPWRRPVAYLSKKLDPVAAGWPPCLRMVAAIAVLTKDAGKLTMGQPLVILAPHAVEALVKQPPDRWLSNARMTHYQALLLDTDRVQFGPVVALNPATLLPLPEEGLQHNCLDILAEAHGTRPDLTDQPLPDADHTWYTDGSSLLQEGQRKAGAAVTTETEVIWAKALPAGTSAQRAELIALTQALKMAEGKKLNVYTDSRYAFATAHIHGEIYRRRGWLTSEGKEIKNKDEILALLKALFLPKRLSIIHCPGHQKGHSAEARGNRMADQAARKAAITETPDTSTLLAGKRTADGSEFEKRTADGSEFESPKKKAKVE

SEQ ID NO: 2810 - protein, 2096 aa, synthetic construct
MPAAKRVKLDGGDKKYSIGLDIGTNSVGWAVITDEYKVPSKKFKVLGNTDRHSIKKNLIGALLFDSGETAEATRLKRTARRRYTRRKNRICYLQEIFSNEMAKVDDSFFHRLEESFLVEEDKKHERHPIFGNIVDEVAYHEKYPTIYHLRKKLVDSTDKADLRLIYLALAHMIKFRGHFLIEGDLNPDNSDVDKLFIQLVQTYNQLFEENPINASGVDAKAILSARLSKSRRLENLIAQLPGEKKNGLFGNLIALSLGLTPNFKSNFDLAEDAKLQLSKDTYDDDLDNLLAQIGDQYADLFLAAKNLSDAILLSDILRVNTEITKAPLSASMIKRYDEHHQDLTLLKALVRQQLPEKYKEIFFDQSKNGYAGYIDGGASQEEFYKFIKPILEKMDGTEELLVKLNREDLLRKQRTFDNGSIPHQIHLGELHAILRRQEDFYPFLKDNREKIEKILTFRIPYYVGPLARGNSRFAWMTRKSEETITPWNFEEVVDKGASAQSFIERMTNFDKNLPNEKVLPKHSLLYEYFTVYNELTKVKYVTEGMRKPAFLSGEQKKAIVDLLFKTNRKVTVKQLKEDYFKKIECFDSVEISGVEDRFNASLGTYHDLLKIIKDKDFLDNEENEDILEDIVLTLTLFEDREMIEERLKTYAHLFDDKVMKQLKRRRYTGWGRLSRKLINGIRDKQSGKTILDFLKSDGFANRNFMQLIHDDSLTFKEDIQKAQVSGQGDSLHEHIANLAGSPAIKKGILQTVKVVDELVKVMGRHKPENIVIEMARENQTTQKGQKNSRERMKRIEEGIKELGSQILKEHPVENTQLQNEKLYLYYLQNGRDMYVDQELDINRLSDYDVDHIVPQSFLKDDSIDNKVLTRSDKARGKSDNVPSEEVVKKMKNYWRQLLNAKLITQRKFDNLTKAERGGLSELDKAGFIKRQLVETRQITKHVAQILDSRMNTKYDENDKLIREVKVITLKSKLVSDFRKDFQFYKVREINNYHHAHDAYLNAVVGTALIKKYPKLESEFVYGDYKVYDVRKMIAKSEQEIGKATAKYFFYSNIMNFFKTEITLANGEIRKRPLIETNGETGEIVWDKGRDFATVRKVLSMPQVNIVKKTEVQTGGFSKESILPKRNSDKLIARKKDWDPKKYGGFDSPTVAYSVLVVAKVEKGKSKKLKSVKELLGITIMERSSFEKNPIDFLEAKGYKEVKKDLIIKLPKYSLFELENGRKRMLASAGELQKGNELALPSKYVNFLYLASHYEKLKGSPEDNEQKQLFVEQHKHYLDEIIEQISEFSKRVILADANLDKVLSAYNKHRDKPIREQAENIIHLFTLTNLGAPAAFKYFDTTIDRKRYTSTKEVLDATLIHQSITGLYETRIDLSQLGGDGGGSSGGGEAAAKGGTLNIEDEHRLHETSKEPDVSLGSTWLSDFPQAWAETGGMGLAVRQAPLIIPLKATSTPVSIKQYPMSQEARLGIKPHIQRLLDQGILVPCQSPWNTPLLPVKKPGTNDYRPVQDLREVNKRVEDIHPTVPNPYNLLSGLPPSHQWYTVLDLKDAFFCLRLHPTSQPLFAFEWRDPEMGISGQLTWTRLPQGFKNSPTLFNEALHRDLADFRIQHPDLILLQYVDDLLLAATSELDCQQGTRALLQTLGNLGYRASAKKAQICQKQVKYLGYLLKEGQRWLTEARKETVMGQPTPKTPRQLREFLGKAGFCRLFIPGFAEMAAPLYPLTKPGTLFNWGPDQQKAYQEIKQALLTAPALGLPDLTKPFELFVDEKQGYAKGVLTQKLGPWRRPVAYLSKKLDPVAAGWPPCLRMVAAIAVLTKDAGKLTMGQPLVILAPHAVEALVKQPPDRWLSNARMTHYQALLLDTDRVQFGPVVALNPATLLPLPEEGLQHNCLDILAEAHGTRPDLTDQPLPDADHTWYTDGSSLLQEGQRKAGAAVTTETEVIWAKALPAGTSAQRAELIALTQALKMAEGKKLNVYTDSRYAFATAHIHGEIYRRRGWLTSEGKEIKNKDEILALLKALFLPKRLSIIHCPGHQKGHSAEARGNRMADQAARKAAITETPDTSTLLAGKRTADGSEFEKRTADGSEFESPKKKAKVE

SEQ ID NO: 2811 - protein, 2094 aa, synthetic construct
MPAAKRVKLDGGDKKYSIGLDIGTNSVGWAVITDEYKVPSKKFKVLGNTDRHSIKKNLIGALLFDSGETAEATRLKRTARRRYTRRKNRICYLQEIFSNEMAKVDDSFFHRLEESFLVEEDKKHERHPIFGNIVDEVAYHEKYPTIYHLRKKLVDSTDKADLRLIYLALAHMIKFRGHFLIEGDLNPDNSDVDKLFIQLVQTYNQLFEENPINASGVDAKAILSARLSKSRRLENLIAQLPGEKKNGLFGNLIALSLGLTPNFKSNFDLAEDAKLQLSKDTYDDDLDNLLAQIGDQYADLFLAAKNLSDAILLSDILRVNTEITKAPLSASMIKRYDEHHQDLTLLKALVRQQLPEKYKEIFFDQSKNGYAGYIDGGASQEEFYKFIKPILEKMDGTEELLVKLNREDLLRKQRTFDNGSIPHQIHLGELHAILRRQEDFYPFLKDNREKIEKILTFRIPYYVGPLARGNSRFAWMTRKSEETITPWNFEEVVDKGASAQSFIERMTNFDKNLPNEKVLPKHSLLYEYFTVYNELTKVKYVTEGMRKPAFLSGEQKKAIVDLLFKTNRKVTVKQLKEDYFKKIECFDSVEISGVEDRFNASLGTYHDLLKIIKDKDFLDNEENEDILEDIVLTLTLFEDREMIEERLKTYAHLFDDKVMKQLKRRRYTGWGRLSRKLINGIRDKQSGKTILDFLKSDGFANRNFMQLIHDDSLTFKEDIQKAQVSGQGDSLHEHIANLAGSPAIKKGILQTVKVVDELVKVMGRHKPENIVIEMARENQTTQKGQKNSRERMKRIEEGIKELGSQILKEHPVENTQLQNEKLYLYYLQNGRDMYVDQELDINRLSDYDVDHIVPQSFLKDDSIDNKVLTRSDKARGKSDNVPSEEVVKKMKNYWRQLLNAKLITQRKFDNLTKAERGGLSELDKAGFIKRQLVETRQITKHVAQILDSRMNTKYDENDKLIREVKVITLKSKLVSDFRKDFQFYKVREINNYHHAHDAYLNAVVGTALIKKYPKLESEFVYGDYKVYDVRKMIAKSEQEIGKATAKYFFYSNIMNFFKTEITLANGEIRKRPLIETNGETGEIVWDKGRDFATVRKVLSMPQVNIVKKTEVQTGGFSKESILPKRNSDKLIARKKDWDPKKYGGFDSPTVAYSVLVVAKVEKGKSKKLKSVKELLGITIMERSSFEKNPIDFLEAKGYKEVKKDLIIKLPKYSLFELENGRKRMLASAGELQKGNELALPSKYVNFLYLASHYEKLKGSPEDNEQKQLFVEQHKHYLDEIIEQISEFSKRVILADANLDKVLSAYNKHRDKPIREQAENIIHLFTLTNLGAPAAFKYFDTTIDRKRYTSTKEVLDATLIHQSITGLYETRIDLSQLGGDGGGSSGSSGSSGGTLNIEDEHRLHETSKEPDVSLGSTWLSDFPQAWAETGGMGLAVRQAPLIIPLKATSTPVSIKQYPMSQEARLGIKPHIQRLLDQGILVPCQSPWNTPLLPVKKPGTNDYRPVQDLREVNKRVEDIHPTVPNPYNLLSGLPPSHQWYTVLDLKDAFFCLRLHPTSQPLFAFEWRDPEMGISGQLTWTRLPQGFKNSPTLFNEALHRDLADFRIQHPDLILLQYVDDLLLAATSELDCQQGTRALLQTLGNLGYRASAKKAQICQKQVKYLGYLLKEGQRWLTEARKETVMGQPTPKTPRQLREFLGKAGFCRLFIPGFAEMAAPLYPLTKPGTLFNWGPDQQKAYQEIKQALLTAPALGLPDLTKPFELFVDEKQGYAKGVLTQKLGPWRRPVAYLSKKLDPVAAGWPPCLRMVAAIAVLTKDAGKLTMGQPLVILAPHAVEALVKQPPDRWLSNARMTHYQALLLDTDRVQFGPVVALNPATLLPLPEEGLQHNCLDILAEAHGTRPDLTDQPLPDADHTWYTDGSSLLQEGQRKAGAAVTTETEVIWAKALPAGTSAQRAELIALTQALKMAEGKKLNVYTDSRYAFATAHIHGEIYRRRGWLTSEGKEIKNKDEILALLKALFLPKRLSIIHCPGHQKGHSAEARGNRMADQAARKAAITETPDTSTLLAGKRTADGSEFEKRTADGSEFESPKKKAKVE

SEQ ID NO: 2812 - protein, 2088 aa, synthetic construct
MPAAKRVKLDGGDKKYSIGLDIGTNSVGWAVITDEYKVPSKKFKVLGNTDRHSIKKNLIGALLFDSGETAEATRLKRTARRRYTRRKNRICYLQEIFSNEMAKVDDSFFHRLEESFLVEEDKKHERHPIFGNIVDEVAYHEKYPTIYHLRKKLVDSTDKADLRLIYLALAHMIKFRGHFLIEGDLNPDNSDVDKLFIQLVQTYNQLFEENPINASGVDAKAILSARLSKSRRLENLIAQLPGEKKNGLFGNLIALSLGLTPNFKSNFDLAEDAKLQLSKDTYDDDLDNLLAQIGDQYADLFLAAKNLSDAILLSDILRVNTEITKAPLSASMIKRYDEHHQDLTLLKALVRQQLPEKYKEIFFDQSKNGYAGYIDGGASQEEFYKFIKPILEKMDGTEELLVKLNREDLLRKQRTFDNGSIPHQIHLGELHAILRRQEDFYPFLKDNREKIEKILTFRIPYYVGPLARGNSRFAWMTRKSEETITPWNFEEVVDKGASAQSFIERMTNFDKNLPNEKVLPKHSLLYEYFTVYNELTKVKYVTEGMRKPAFLSGEQKKAIVDLLFKTNRKVTVKQLKEDYFKKIECFDSVEISGVEDRFNASLGTYHDLLKIIKDKDFLDNEENEDILEDIVLTLTLFEDREMIEERLKTYAHLFDDKVMKQLKRRRYTGWGRLSRKLINGIRDKQSGKTILDFLKSDGFANRNFMQLIHDDSLTFKEDIQKAQVSGQGDSLHEHIANLAGSPAIKKGILQTVKVVDELVKVMGRHKPENIVIEMARENQTTQKGQKNSRERMKRIEEGIKELGSQILKEHPVENTQLQNEKLYLYYLQNGRDMYVDQELDINRLSDYDVDHIVPQSFLKDDSIDNKVLTRSDKARGKSDNVPSEEVVKKMKNYWRQLLNAKLITQRKFDNLTKAERGGLSELDKAGFIKRQLVETRQITKHVAQILDSRMNTKYDENDKLIREVKVITLKSKLVSDFRKDFQFYKVREINNYHHAHDAYLNAVVGTALIKKYPKLESEFVYGDYKVYDVRKMIAKSEQEIGKATAKYFFYSNIMNFFKTEITLANGEIRKRPLIETNGETGEIVWDKGRDFATVRKVLSMPQVNIVKKTEVQTGGFSKESILPKRNSDKLIARKKDWDPKKYGGFDSPTVAYSVLVVAKVEKGKSKKLKSVKELLGITIMERSSFEKNPIDFLEAKGYKEVKKDLIIKLPKYSLFELENGRKRMLASAGELQKGNELALPSKYVNFLYLASHYEKLKGSPEDNEQKQLFVEQHKHYLDEIIEQISEFSKRVILADANLDKVLSAYNKHRDKPIREQAENIIHLFTLTNLGAPAAFKYFDTTIDRKRYTSTKEVLDATLIHQSITGLYETRIDLSQLGGDGGPAPGGTLNIEDEHRLHETSKEPDVSLGSTWLSDFPQAWAETGGMGLAVRQAPLIIPLKATSTPVSIKQYPMSQEARLGIKPHIQRLLDQGILVPCQSPWNTPLLPVKKPGTNDYRPVQDLREVNKRVEDIHPTVPNPYNLLSGLPPSHQWYTVLDLKDAFFCLRLHPTSQPLFAFEWRDPEMGISGQLTWTRLPQGFKNSPTLFNEALHRDLADFRIQHPDLILLQYVDDLLLAATSELDCQQGTRALLQTLGNLGYRASAKKAQICQKQVKYLGYLLKEGQRWLTEARKETVMGQPTPKTPRQLREFLGKAGFCRLFIPGFAEMAAPLYPLTKPGTLFNWGPDQQKAYQEIKQALLTAPALGLPDLTKPFELFVDEKQGYAKGVLTQKLGPWRRPVAYLSKKLDPVAAGWPPCLRMVAAIAVLTKDAGKLTMGQPLVILAPHAVEALVKQPPDRWLSNARMTHYQALLLDTDRVQFGPVVALNPATLLPLPEEGLQHNCLDILAEAHGTRPDLTDQPLPDADHTWYTDGSSLLQEGQRKAGAAVTTETEVIWAKALPAGTSAQRAELIALTQALKMAEGKKLNVYTDSRYAFATAHIHGEIYRRRGWLTSEGKEIKNKDEILALLKALFLPKRLSIIHCPGHQKGHSAEARGNRMADQAARKAAITETPDTSTLLAGKRTADGSEFEKRTADGSEFESPKKKAKVE

SEQ ID NO: 2813 - protein, 2115 aa, synthetic construct
MPAAKRVKLDGGDKKYSIGLDIGTNSVGWAVITDEYKVPSKKFKVLGNTDRHSIKKNLIGALLFDSGETAEATRLKRTARRRYTRRKNRICYLQEIFSNEMAKVDDSFFHRLEESFLVEEDKKHERHPIFGNIVDEVAYHEKYPTIYHLRKKLVDSTDKADLRLIYLALAHMIKFRGHFLIEGDLNPDNSDVDKLFIQLVQTYNQLFEENPINASGVDAKAILSARLSKSRRLENLIAQLPGEKKNGLFGNLIALSLGLTPNFKSNFDLAEDAKLQLSKDTYDDDLDNLLAQIGDQYADLFLAAKNLSDAILLSDILRVNTEITKAPLSASMIKRYDEHHQDLTLLKALVRQQLPEKYKEIFFDQSKNGYAGYIDGGASQEEFYKFIKPILEKMDGTEELLVKLNREDLLRKQRTFDNGSIPHQIHLGELHAILRRQEDFYPFLKDNREKIEKILTFRIPYYVGPLARGNSRFAWMTRKSEETITPWNFEEVVDKGASAQSFIERMTNFDKNLPNEKVLPKHSLLYEYFTVYNELTKVKYVTEGMRKPAFLSGEQKKAIVDLLFKTNRKVTVKQLKEDYFKKIECFDSVEISGVEDRFNASLGTYHDLLKIIKDKDFLDNEENEDILEDIVLTLTLFEDREMIEERLKTYAHLFDDKVMKQLKRRRYTGWGRLSRKLINGIRDKQSGKTILDFLKSDGFANRNFMQLIHDDSLTFKEDIQKAQVSGQGDSLHEHIANLAGSPAIKKGILQTVKVVDELVKVMGRHKPENIVIEMARENQTTQKGQKNSRERMKRIEEGIKELGSQILKEHPVENTQLQNEKLYLYYLQNGRDMYVDQELDINRLSDYDVDHIVPQSFLKDDSIDNKVLTRSDKARGKSDNVPSEEVVKKMKNYWRQLLNAKLITQRKFDNLTKAERGGLSELDKAGFIKRQLVETRQITKHVAQILDSRMNTKYDENDKLIREVKVITLKSKLVSDFRKDFQFYKVREINNYHHAHDAYLNAVVGTALIKKYPKLESEFVYGDYKVYDVRKMIAKSEQEIGKATAKYFFYSNIMNFFKTEITLANGEIRKRPLIETNGETGEIVWDKGRDFATVRKVLSMPQVNIVKKTEVQTGGFSKESILPKRNSDKLIARKKDWDPKKYGGFDSPTVAYSVLVVAKVEKGKSKKLKSVKELLGITIMERSSFEKNPIDFLEAKGYKEVKKDLIIKLPKYSLFELENGRKRMLASAGELQKGNELALPSKYVNFLYLASHYEKLKGSPEDNEQKQLFVEQHKHYLDEIIEQISEFSKRVILADANLDKVLSAYNKHRDKPIREQAENIIHLFTLTNLGAPAAFKYFDTTIDRKRYTSTKEVLDATLIHQSITGLYETRIDLSQLGGDGGEAAAKEAAAKEAAAKEAAAKEAAAKEAAAKGGTLNIEDEHRLHETSKEPDVSLGSTWLSDFPQAWAETGGMGLAVRQAPLIIPLKATSTPVSIKQYPMSQEARLGIKPHIQRLLDQGILVPCQSPWNTPLLPVKKPGTNDYRPVQDLREVNKRVEDIHPTVPNPYNLLSGLPPSHQWYTVLDLKDAFFCLRLHPTSQPLFAFEWRDPEMGISGQLTWTRLPQGFKNSPTLFNEALHRDLADFRIQHPDLILLQYVDDLLLAATSELDCQQGTRALLQTLGNLGYRASAKKAQICQKQVKYLGYLLKEGQRWLTEARKETVMGQPTPKTPRQLREFLGKAGFCRLFIPGFAEMAAPLYPLTKPGTLFNWGPDQQKAYQEIKQALLTAPALGLPDLTKPFELFVDEKQGYAKGVLTQKLGPWRRPVAYLSKKLDPVAAGWPPCLRMVAAIAVLTKDAGKLTMGQPLVILAPHAVEALVKQPPDRWLSNARMTHYQALLLDTDRVQFGPVVALNPATLLPLPEEGLQHNCLDILAEAHGTRPDLTDQPLPDADHTWYTDGSSLLQEGQRKAGAAVTTETEVIWAKALPAGTSAQRAELIALTQALKMAEGKKLNVYTDSRYAFATAHIHGEIYRRRGWLTSEGKEIKNKDEILALLKALFLPKRLSIIHCPGHQKGHSAEARGNRMADQAARKAAITETPDTSTLLAGKRTADGSEFEKRTADGSEFESPKKKAKVE

SEQ ID NO: 2814 - protein, 2097 aa, synthetic construct
MPAAKRVKLDGGDKKYSIGLDIGTNSVGWAVITDEYKVPSKKFKVLGNTDRHSIKKNLIGALLFDSGETAEATRLKRTARRRYTRRKNRICYLQEIFSNEMAKVDDSFFHRLEESFLVEEDKKHERHPIFGNIVDEVAYHEKYPTIYHLRKKLVDSTDKADLRLIYLALAHMIKFRGHFLIEGDLNPDNSDVDKLFIQLVQTYNQLFEENPINASGVDAKAILSARLSKSRRLENLIAQLPGEKKNGLFGNLIALSLGLTPNFKSNFDLAEDAKLQLSKDTYDDDLDNLLAQIGDQYADLFLAAKNLSDAILLSDILRVNTEITKAPLSASMIKRYDEHHQDLTLLKALVRQQLPEKYKEIFFDQSKNGYAGYIDGGASQEEFYKFIKPILEKMDGTEELLVKLNREDLLRKQRTFDNGSIPHQIHLGELHAILRRQEDFYPFLKDNREKIEKILTFRIPYYVGPLARGNSRFAWMTRKSEETITPWNFEEVVDKGASAQSFIERMTNFDKNLPNEKVLPKHSLLYEYFTVYNELTKVKYVTEGMRKPAFLSGEQKKAIVDLLFKTNRKVTVKQLKEDYFKKIECFDSVEISGVEDRFNASLGTYHDLLKIIKDKDFLDNEENEDILEDIVLTLTLFEDREMIEERLKTYAHLFDDKVMKQLKRRRYTGWGRLSRKLINGIRDKQSGKTILDFLKSDGFANRNFMQLIHDDSLTFKEDIQKAQVSGQGDSLHEHIANLAGSPAIKKGILQTVKVVDELVKVMGRHKPENIVIEMARENQTTQKGQKNSRERMKRIEEGIKELGSQILKEHPVENTQLQNEKLYLYYLQNGRDMYVDQELDINRLSDYDVDHIVPQSFLKDDSIDNKVLTRSDKARGKSDNVPSEEVVKKMKNYWRQLLNAKLITQRKFDNLTKAERGGLSELDKAGFIKRQLVETRQITKHVAQILDSRMNTKYDENDKLIREVKVITLKSKLVSDFRKDFQFYKVREINNYHHAHDAYLNAVVGTALIKKYPKLESEFVYGDYKVYDVRKMIAKSEQEIGKATAKYFFYSNIMNFFKTEITLANGEIRKRPLIETNGETGEIVWDKGRDFATVRKVLSMPQVNIVKKTEVQTGGFSKESILPKRNSDKLIARKKDWDPKKYGGFDSPTVAYSVLVVAKVEKGKSKKLKSVKELLGITIMERSSFEKNPIDFLEAKGYKEVKKDLIIKLPKYSLFELENGRKRMLASAGELQKGNELALPSKYVNFLYLASHYEKLKGSPEDNEQKQLFVEQHKHYLDEIIEQISEFSKRVILADANLDKVLSAYNKHRDKPIREQAENIIHLFTLTNLGAPAAFKYFDTTIDRKRYTSTKEVLDATLIHQSITGLYETRIDLSQLGGDGGGSAGSAAGSGEFGGTLNIEDEHRLHETSKEPDVSLGSTWLSDFPQAWAETGGMGLAVRQAPLIIPLKATSTPVSIKQYPMSQEARLGIKPHIQRLLDQGILVPCQSPWNTPLLPVKKPGTNDYRPVQDLREVNKRVEDIHPTVPNPYNLLSGLPPSHQWYTVLDLKDAFFCLRLHPTSQPLFAFEWRDPEMGISGQLTWTRLPQGFKNSPTLFNEALHRDLADFRIQHPDLILLQYVDDLLLAATSELDCQQGTRALLQTLGNLGYRASAKKAQICQKQVKYLGYLLKEGQRWLTEARKETVMGQPTPKTPRQLREFLGKAGFCRLFIPGFAEMAAPLYPLTKPGTLFNWGPDQQKAYQEIKQALLTAPALGLPDLTKPFELFVDEKQGYAKGVLTQKLGPWRRPVAYLSKKLDPVAAGWPPCLRMVAAIAVLTKDAGKLTMGQPLVILAPHAVEALVKQPPDRWLSNARMTHYQALLLDTDRVQFGPVVALNPATLLPLPEEGLQHNCLDILAEAHGTRPDLTDQPLPDADHTWYTDGSSLLQEGQRKAGAAVTTETEVIWAKALPAGTSAQRAELIALTQALKMAEGKKLNVYTDSRYAFATAHIHGEIYRRRGWLTSEGKEIKNKDEILALLKALFLPKRLSIIHCPGHQKGHSAEARGNRMADQAARKAAITETPDTSTLLAGKRTADGSEFEKRTADGSEFESPKKKAKVE

SEQ ID NO: 2815 - protein, 2096 aa, synthetic construct
MPAAKRVKLDGGDKKYSIGLDIGTNSVGWAVITDEYKVPSKKFKVLGNTDRHSIKKNLIGALLFDSGETAEATRLKRTARRRYTRRKNRICYLQEIFSNEMAKVDDSFFHRLEESFLVEEDKKHERHPIFGNIVDEVAYHEKYPTIYHLRKKLVDSTDKADLRLIYLALAHMIKFRGHFLIEGDLNPDNSDVDKLFIQLVQTYNQLFEENPINASGVDAKAILSARLSKSRRLENLIAQLPGEKKNGLFGNLIALSLGLTPNFKSNFDLAEDAKLQLSKDTYDDDLDNLLAQIGDQYADLFLAAKNLSDAILLSDILRVNTEITKAPLSASMIKRYDEHHQDLTLLKALVRQQLPEKYKEIFFDQSKNGYAGYIDGGASQEEFYKFIKPILEKMDGTEELLVKLNREDLLRKQRTFDNGSIPHQIHLGELHAILRRQEDFYPFLKDNREKIEKILTFRIPYYVGPLARGNSRFAWMTRKSEETITPWNFEEVVDKGASAQSFIERMTNFDKNLPNEKVLPKHSLLYEYFTVYNELTKVKYVTEGMRKPAFLSGEQKKAIVDLLFKTNRKVTVKQLKEDYFKKIECFDSVEISGVEDRFNASLGTYHDLLKIIKDKDFLDNEENEDILEDIVLTLTLFEDREMIEERLKTYAHLFDDKVMKQLKRRRYTGWGRLSRKLINGIRDKQSGKTILDFLKSDGFANRNFMQLIHDDSLTFKEDIQKAQVSGQGDSLHEHIANLAGSPAIKKGILQTVKVVDELVKVMGRHKPENIVIEMARENQTTQKGQKNSRERMKRIEEGIKELGSQILKEHPVENTQLQNEKLYLYYLQNGRDMYVDQELDINRLSDYDVDHIVPQSFLKDDSIDNKVLTRSDKARGKSDNVPSEEVVKKMKNYWRQLLNAKLITQRKFDNLTKAERGGLSELDKAGFIKRQLVETRQITKHVAQILDSRMNTKYDENDKLIREVKVITLKSKLVSDFRKDFQFYKVREINNYHHAHDAYLNAVVGTALIKKYPKLESEFVYGDYKVYDVRKMIAKSEQEIGKATAKYFFYSNIMNFFKTEITLANGEIRKRPLIETNGETGEIVWDKGRDFATVRKVLSMPQVNIVKKTEVQTGGFSKESILPKRNSDKLIARKKDWDPKKYGGFDSPTVAYSVLVVAKVEKGKSKKLKSVKELLGITIMERSSFEKNPIDFLEAKGYKEVKKDLIIKLPKYSLFELENGRKRMLASAGELQKGNELALPSKYVNFLYLASHYEKLKGSPEDNEQKQLFVEQHKHYLDEIIEQISEFSKRVILADANLDKVLSAYNKHRDKPIREQAENIIHLFTLTNLGAPAAFKYFDTTIDRKRYTSTKEVLDATLIHQSITGLYETRIDLSQLGGDGGEAAAKGGGGGSGGTLNIEDEHRLHETSKEPDVSLGSTWLSDFPQAWAETGGMGLAVRQAPLIIPLKATSTPVSIKQYPMSQEARLGIKPHIQRLLDQGILVPCQSPWNTPLLPVKKPGTNDYRPVQDLREVNKRVEDIHPTVPNPYNLLSGLPPSHQWYTVLDLKDAFFCLRLHPTSQPLFAFEWRDPEMGISGQLTWTRLPQGFKNSPTLFNEALHRDLADFRIQHPDLILLQYVDDLLLAATSELDCQQGTRALLQTLGNLGYRASAKKAQICQKQVKYLGYLLKEGQRWLTEARKETVMGQPTPKTPRQLREFLGKAGFCRLFIPGFAEMAAPLYPLTKPGTLFNWGPDQQKAYQEIKQALLTAPALGLPDLTKPFELFVDEKQGYAKGVLTQKLGPWRRPVAYLSKKLDPVAAGWPPCLRMVAAIAVLTKDAGKLTMGQPLVILAPHAVEALVKQPPDRWLSNARMTHYQALLLDTDRVQFGPVVALNPATLLPLPEEGLQHNCLDILAEAHGTRPDLTDQPLPDADHTWYTDGSSLLQEGQRKAGAAVTTETEVIWAKALPAGTSAQRAELIALTQALKMAEGKKLNVYTDSRYAFATAHIHGEIYRRRGWLTSEGKEIKNKDEILALLKALFLPKRLSIIHCPGHQKGHSAEARGNRMADQAARKAAITETPDTSTLLAGKRTADGSEFEKRTADGSEFESPKKKAKVE

SEQ ID NO: 2816 - protein, 2103 aa, synthetic construct
MPAAKRVKLDGGDKKYSIGLDIGTNSVGWAVITDEYKVPSKKFKVLGNTDRHSIKKNLIGALLFDSGETAEATRLKRTARRRYTRRKNRICYLQEIFSNEMAKVDDSFFHRLEESFLVEEDKKHERHPIFGNIVDEVAYHEKYPTIYHLRKKLVDSTDKADLRLIYLALAHMIKFRGHFLIEGDLNPDNSDVDKLFIQLVQTYNQLFEENPINASGVDAKAILSARLSKSRRLENLIAQLPGEKKNGLFGNLIALSLGLTPNFKSNFDLAEDAKLQLSKDTYDDDLDNLLAQIGDQYADLFLAAKNLSDAILLSDILRVNTEITKAPLSASMIKRYDEHHQDLTLLKALVRQQLPEKYKEIFFDQSKNGYAGYIDGGASQEEFYKFIKPILEKMDGTEELLVKLNREDLLRKQRTFDNGSIPHQIHLGELHAILRRQEDFYPFLKDNREKIEKILTFRIPYYVGPLARGNSRFAWMTRKSEETITPWNFEEVVDKGASAQSFIERMTNFDKNLPNEKVLPKHSLLYEYFTVYNELTKVKYVTEGMRKPAFLSGEQKKAIVDLLFKTNRKVTVKQLKEDYFKKIECFDSVEISGVEDRFNASLGTYHDLLKIIKDKDFLDNEENEDILEDIVLTLTLFEDREMIEERLKTYAHLFDDKVMKQLKRRRYTGWGRLSRKLINGIRDKQSGKTILDFLKSDGFANRNFMQLIHDDSLTFKEDIQKAQVSGQGDSLHEHIANLAGSPAIKKGILQTVKVVDELVKVMGRHKPENIVIEMARENQTTQKGQKNSRERMKRIEEGIKELGSQILKEHPVENTQLQNEKLYLYYLQNGRDMYVDQELDINRLSDYDVDHIVPQSFLKDDSIDNKVLTRSDKARGKSDNVPSEEVVKKMKNYWRQLLNAKLITQRKFDNLTKAERGGLSELDKAGFIKRQLVETRQITKHVAQILDSRMNTKYDENDKLIREVKVITLKSKLVSDFRKDFQFYKVREINNYHHAHDAYLNAVVGTALIKKYPKLESEFVYGDYKVYDVRKMIAKSEQEIGKATAKYFFYSNIMNFFKTEITLANGEIRKRPLIETNGETGEIVWDKGRDFATVRKVLSMPQVNIVKKTEVQTGGFSKESILPKRNSDKLIARKKDWDPKKYGGFDSPTVAYSVLVVAKVEKGKSKKLKSVKELLGITIMERSSFEKNPIDFLEAKGYKEVKKDLIIKLPKYSLFELENGRKRMLASAGELQKGNELALPSKYVNFLYLASHYEKLKGSPEDNEQKQLFVEQHKHYLDEIIEQISEFSKRVILADANLDKVLSAYNKHRDKPIREQAENIIHLFTLTNLGAPAAFKYFDTTIDRKRYTSTKEVLDATLIHQSITGLYETRIDLSQLGGDGGGSSGSSGSSGSSGSSGSSGGTLNIEDEHRLHETSKEPDVSLGSTWLSDFPQAWAETGGMGLAVRQAPLIIPLKATSTPVSIKQYPMSQEARLGIKPHIQRLLDQGILVPCQSPWNTPLLPVKKPGTNDYRPVQDLREVNKRVEDIHPTVPNPYNLLSGLPPSHQWYTVLDLKDAFFCLRLHPTSQPLFAFEWRDPEMGISGQLTWTRLPQGFKNSPTLFNEALHRDLADFRIQHPDLILLQYVDDLLLAATSELDCQQGTRALLQTLGNLGYRASAKKAQICQKQVKYLGYLLKEGQRWLTEARKETVMGQPTPKTPRQLREFLGKAGFCRLFIPGFAEMAAPLYPLTKPGTLFNWGPDQQKAYQEIKQALLTAPALGLPDLTKPFELFVDEKQGYAKGVLTQKLGPWRRPVAYLSKKLDPVAAGWPPCLRMVAAIAVLTKDAGKLTMGQPLVILAPHAVEALVKQPPDRWLSNARMTHYQALLLDTDRVQFGPVVALNPATLLPLPEEGLQHNCLDILAEAHGTRPDLTDQPLPDADHTWYTDGSSLLQEGQRKAGAAVTTETEVIWAKALPAGTSAQRAELIALTQALKMAEGKKLNVYTDSRYAFATAHIHGEIYRRRGWLTSEGKEIKNKDEILALLKALFLPKRLSIIHCPGHQKGHSAEARGNRMADQAARKAAITETPDTSTLLAGKRTADGSEFEKRTADGSEFESPKKKAKVE

SEQ ID NO: 2817 - protein, 2096 aa, synthetic construct
MPAAKRVKLDGGDKKYSIGLDIGTNSVGWAVITDEYKVPSKKFKVLGNTDRHSIKKNLIGALLFDSGETAEATRLKRTARRRYTRRKNRICYLQEIFSNEMAKVDDSFFHRLEESFLVEEDKKHERHPIFGNIVDEVAYHEKYPTIYHLRKKLVDSTDKADLRLIYLALAHMIKFRGHFLIEGDLNPDNSDVDKLFIQLVQTYNQLFEENPINASGVDAKAILSARLSKSRRLENLIAQLPGEKKNGLFGNLIALSLGLTPNFKSNFDLAEDAKLQLSKDTYDDDLDNLLAQIGDQYADLFLAAKNLSDAILLSDILRVNTEITKAPLSASMIKRYDEHHQDLTLLKALVRQQLPEKYKEIFFDQSKNGYAGYIDGGASQEEFYKFIKPILEKMDGTEELLVKLNREDLLRKQRTFDNGSIPHQIHLGELHAILRRQEDFYPFLKDNREKIEKILTFRIPYYVGPLARGNSRFAWMTRKSEETITPWNFEEVVDKGASAQSFIERMTNFDKNLPNEKVLPKHSLLYEYFTVYNELTKVKYVTEGMRKPAFLSGEQKKAIVDLLFKTNRKVTVKQLKEDYFKKIECFDSVEISGVEDRFNASLGTYHDLLKIIKDKDFLDNEENEDILEDIVLTLTLFEDREMIEERLKTYAHLFDDKVMKQLKRRRYTGWGRLSRKLINGIRDKQSGKTILDFLKSDGFANRNFMQLIHDDSLTFKEDIQKAQVSGQGDSLHEHIANLAGSPAIKKGILQTVKVVDELVKVMGRHKPENIVIEMARENQTTQKGQKNSRERMKRIEEGIKELGSQILKEHPVENTQLQNEKLYLYYLQNGRDMYVDQELDINRLSDYDVDHIVPQSFLKDDSIDNKVLTRSDKARGKSDNVPSEEVVKKMKNYWRQLLNAKLITQRKFDNLTKAERGGLSELDKAGFIKRQLVETRQITKHVAQILDSRMNTKYDENDKLIREVKVITLKSKLVSDFRKDFQFYKVREINNYHHAHDAYLNAVVGTALIKKYPKLESEFVYGDYKVYDVRKMIAKSEQEIGKATAKYFFYSNIMNFFKTEITLANGEIRKRPLIETNGETGEIVWDKGRDFATVRKVLSMPQVNIVKKTEVQTGGFSKESILPKRNSDKLIARKKDWDPKKYGGFDSPTVAYSVLVVAKVEKGKSKKLKSVKELLGITIMERSSFEKNPIDFLEAKGYKEVKKDLIIKLPKYSLFELENGRKRMLASAGELQKGNELALPSKYVNFLYLASHYEKLKGSPEDNEQKQLFVEQHKHYLDEIIEQISEFSKRVILADANLDKVLSAYNKHRDKPIREQAENIIHLFTLTNLGAPAAFKYFDTTIDRKRYTSTKEVLDATLIHQSITGLYETRIDLSQLGGDGGEAAAKGGSGSSGGTLNIEDEHRLHETSKEPDVSLGSTWLSDFPQAWAETGGMGLAVRQAPLIIPLKATSTPVSIKQYPMSQEARLGIKPHIQRLLDQGILVPCQSPWNTPLLPVKKPGTNDYRPVQDLREVNKRVEDIHPTVPNPYNLLSGLPPSHQWYTVLDLKDAFFCLRLHPTSQPLFAFEWRDPEMGISGQLTWTRLPQGFKNSPTLFNEALHRDLADFRIQHPDLILLQYVDDLLLAATSELDCQQGTRALLQTLGNLGYRASAKKAQICQKQVKYLGYLLKEGQRWLTEARKETVMGQPTPKTPRQLREFLGKAGFCRLFIPGFAEMAAPLYPLTKPGTLFNWGPDQQKAYQEIKQALLTAPALGLPDLTKPFELFVDEKQGYAKGVLTQKLGPWRRPVAYLSKKLDPVAAGWPPCLRMVAAIAVLTKDAGKLTMGQPLVILAPHAVEALVKQPPDRWLSNARMTHYQALLLDTDRVQFGPVVALNPATLLPLPEEGLQHNCLDILAEAHGTRPDLTDQPLPDADHTWYTDGSSLLQEGQRKAGAAVTTETEVIWAKALPAGTSAQRAELIALTQALKMAEGKKLNVYTDSRYAFATAHIHGEIYRRRGWLTSEGKEIKNKDEILALLKALFLPKRLSIIHCPGHQKGHSAEARGNRMADQAARKAAITETPDTSTLLAGKRTADGSEFEKRTADGSEFESPKKKAKVE

SEQ ID NO: 2818 - protein, 2094 aa, synthetic construct
MPAAKRVKLDGGDKKYSIGLDIGTNSVGWAVITDEYKVPSKKFKVLGNTDRHSIKKNLIGALLFDSGETAEATRLKRTARRRYTRRKNRICYLQEIFSNEMAKVDDSFFHRLEESFLVEEDKKHERHPIFGNIVDEVAYHEKYPTIYHLRKKLVDSTDKADLRLIYLALAHMIKFRGHFLIEGDLNPDNSDVDKLFIQLVQTYNQLFEENPINASGVDAKAILSARLSKSRRLENLIAQLPGEKKNGLFGNLIALSLGLTPNFKSNFDLAEDAKLQLSKDTYDDDLDNLLAQIGDQYADLFLAAKNLSDAILLSDILRVNTEITKAPLSASMIKRYDEHHQDLTLLKALVRQQLPEKYKEIFFDQSKNGYAGYIDGGASQEEFYKFIKPILEKMDGTEELLVKLNREDLLRKQRTFDNGSIPHQIHLGELHAILRRQEDFYPFLKDNREKIEKILTFRIPYYVGPLARGNSRFAWMTRKSEETITPWNFEEVVDKGASAQSFIERMTNFDKNLPNEKVLPKHSLLYEYFTVYNELTKVKYVTEGMRKPAFLSGEQKKAIVDLLFKTNRKVTVKQLKEDYFKKIECFDSVEISGVEDRFNASLGTYHDLLKIIKDKDFLDNEENEDILEDIVLTLTLFEDREMIEERLKTYAHLFDDKVMKQLKRRRYTGWGRLSRKLINGIRDKQSGKTILDFLKSDGFANRNFMQLIHDDSLTFKEDIQKAQVSGQGDSLHEHIANLAGSPAIKKGILQTVKVVDELVKVMGRHKPENIVIEMARENQTTQKGQKNSRERMKRIEEGIKELGSQILKEHPVENTQLQNEKLYLYYLQNGRDMYVDQELDINRLSDYDVDHIVPQSFLKDDSIDNKVLTRSDKARGKSDNVPSEEVVKKMKNYWRQLLNAKLITQRKFDNLTKAERGGLSELDKAGFIKRQLVETRQITKHVAQILDSRMNTKYDENDKLIREVKVITLKSKLVSDFRKDFQFYKVREINNYHHAHDAYLNAVVGTALIKKYPKLESEFVYGDYKVYDVRKMIAKSEQEIGKATAKYFFYSNIMNFFKTEITLANGEIRKRPLIETNGETGEIVWDKGRDFATVRKVLSMPQVNIVKKTEVQTGGFSKESILPKRNSDKLIARKKDWDPKKYGGFDSPTVAYSVLVVAKVEKGKSKKLKSVKELLGITIMERSSFEKNPIDFLEAKGYKEVKKDLIIKLPKYSLFELENGRKRMLASAGELQKGNELALPSKYVNFLYLASHYEKLKGSPEDNEQKQLFVEQHKHYLDEIIEQISEFSKRVILADANLDKVLSAYNKHRDKPIREQAENIIHLFTLTNLGAPAAFKYFDTTIDRKRYTSTKEVLDATLIHQSITGLYETRIDLSQLGGDGGGGSGSSGGGGGTLNIEDEHRLHETSKEPDVSLGSTWLSDFPQAWAETGGMGLAVRQAPLIIPLKATSTPVSIKQYPMSQEARLGIKPHIQRLLDQGILVPCQSPWNTPLLPVKKPGTNDYRPVQDLREVNKRVEDIHPTVPNPYNLLSGLPPSHQWYTVLDLKDAFFCLRLHPTSQPLFAFEWRDPEMGISGQLTWTRLPQGFKNSPTLFNEALHRDLADFRIQHPDLILLQYVDDLLLAATSELDCQQGTRALLQTLGNLGYRASAKKAQICQKQVKYLGYLLKEGQRWLTEARKETVMGQPTPKTPRQLREFLGKAGFCRLFIPGFAEMAAPLYPLTKPGTLFNWGPDQQKAYQEIKQALLTAPALGLPDLTKPFELFVDEKQGYAKGVLTQKLGPWRRPVAYLSKKLDPVAAGWPPCLRMVAAIAVLTKDAGKLTMGQPLVILAPHAVEALVKQPPDRWLSNARMTHYQALLLDTDRVQFGPVVALNPATLLPLPEEGLQHNCLDILAEAHGTRPDLTDQPLPDADHTWYTDGSSLLQEGQRKAGAAVTTETEVIWAKALPAGTSAQRAELIALTQALKMAEGKKLNVYTDSRYAFATAHIHGEIYRRRGWLTSEGKEIKNKDEILALLKALFLPKRLSIIHCPGHQKGHSAEARGNRMADQAARKAAITETPDTSTLLAGKRTADGSEFEKRTADGSEFESPKKKAKVE

SEQ ID NO: 2819 - protein, 2100 aa, synthetic construct
MPAAKRVKLDGGDKKYSIGLDIGTNSVGWAVITDEYKVPSKKFKVLGNTDRHSIKKNLIGALLFDSGETAEATRLKRTARRRYTRRKNRICYLQEIFSNEMAKVDDSFFHRLEESFLVEEDKKHERHPIFGNIVDEVAYHEKYPTIYHLRKKLVDSTDKADLRLIYLALAHMIKFRGHFLIEGDLNPDNSDVDKLFIQLVQTYNQLFEENPINASGVDAKAILSARLSKSRRLENLIAQLPGEKKNGLFGNLIALSLGLTPNFKSNFDLAEDAKLQLSKDTYDDDLDNLLAQIGDQYADLFLAAKNLSDAILLSDILRVNTEITKAPLSASMIKRYDEHHQDLTLLKALVRQQLPEKYKEIFFDQSKNGYAGYIDGGASQEEFYKFIKPILEKMDGTEELLVKLNREDLLRKQRTFDNGSIPHQIHLGELHAILRRQEDFYPFLKDNREKIEKILTFRIPYYVGPLARGNSRFAWMTRKSEETITPWNFEEVVDKGASAQSFIERMTNFDKNLPNEKVLPKHSLLYEYFTVYNELTKVKYVTEGMRKPAFLSGEQKKAIVDLLFKTNRKVTVKQLKEDYFKKIECFDSVEISGVEDRFNASLGTYHDLLKIIKDKDFLDNEENEDILEDIVLTLTLFEDREMIEERLKTYAHLFDDKVMKQLKRRRYTGWGRLSRKLINGIRDKQSGKTILDFLKSDGFANRNFMQLIHDDSLTFKEDIQKAQVSGQGDSLHEHIANLAGSPAIKKGILQTVKVVDELVKVMGRHKPENIVIEMARENQTTQKGQKNSRERMKRIEEGIKELGSQILKEHPVENTQLQNEKLYLYYLQNGRDMYVDQELDINRLSDYDVDHIVPQSFLKDDSIDNKVLTRSDKARGKSDNVPSEEVVKKMKNYWRQLLNAKLITQRKFDNLTKAERGGLSELDKAGFIKRQLVETRQITKHVAQILDSRMNTKYDENDKLIREVKVITLKSKLVSDFRKDFQFYKVREINNYHHAHDAYLNAVVGTALIKKYPKLESEFVYGDYKVYDVRKMIAKSEQEIGKATAKYFFYSNIMNFFKTEITLANGEIRKRPLIETNGETGEIVWDKGRDFATVRKVLSMPQVNIVKKTEVQTGGFSKESILPKRNSDKLIARKKDWDPKKYGGFDSPTVAYSVLVVAKVEKGKSKKLKSVKELLGITIMERSSFEKNPIDFLEAKGYKEVKKDLIIKLPKYSLFELENGRKRMLASAGELQKGNELALPSKYVNFLYLASHYEKLKGSPEDNEQKQLFVEQHKHYLDEIIEQISEFSKRVILADANLDKVLSAYNKHRDKPIREQAENIIHLFTLTNLGAPAAFKYFDTTIDRKRYTSTKEVLDATLIHQSITGLYETRIDLSQLGGDGGGGGGSGGGGSGGGGSGGTLNIEDEHRLHETSKEPDVSLGSTWLSDFPQAWAETGGMGLAVRQAPLIIPLKATSTPVSIKQYPMSQEARLGIKPHIQRLLDQGILVPCQSPWNTPLLPVKKPGTNDYRPVQDLREVNKRVEDIHPTVPNPYNLLSGLPPSHQWYTVLDLKDAFFCLRLHPTSQPLFAFEWRDPEMGISGQLTWTRLPQGFKNSPTLFNEALHRDLADFRIQHPDLILLQYVDDLLLAATSELDCQQGTRALLQTLGNLGYRASAKKAQICQKQVKYLGYLLKEGQRWLTEARKETVMGQPTPKTPRQLREFLGKAGFCRLFIPGFAEMAAPLYPLTKPGTLFNWGPDQQKAYQEIKQALLTAPALGLPDLTKPFELFVDEKQGYAKGVLTQKLGPWRRPVAYLSKKLDPVAAGWPPCLRMVAAIAVLTKDAGKLTMGQPLVILAPHAVEALVKQPPDRWLSNARMTHYQALLLDTDRVQFGPVVALNPATLLPLPEEGLQHNCLDILAEAHGTRPDLTDQPLPDADHTWYTDGSSLLQEGQRKAGAAVTTETEVIWAKALPAGTSAQRAELIALTQALKMAEGKKLNVYTDSRYAFATAHIHGEIYRRRGWLTSEGKEIKNKDEILALLKALFLPKRLSIIHCPGHQKGHSAEARGNRMADQAARKAAITETPDTSTLLAGKRTADGSEFEKRTADGSEFESPKKKAKVE

SEQ ID NO: 2820 - protein, 2091 aa, synthetic construct
MPAAKRVKLDGGDKKYSIGLDIGTNSVGWAVITDEYKVPSKKFKVLGNTDRHSIKKNLIGALLFDSGETAEATRLKRTARRRYTRRKNRICYLQEIFSNEMAKVDDSFFHRLEESFLVEEDKKHERHPIFGNIVDEVAYHEKYPTIYHLRKKLVDSTDKADLRLIYLALAHMIKFRGHFLIEGDLNPDNSDVDKLFIQLVQTYNQLFEENPINASGVDAKAILSARLSKSRRLENLIAQLPGEKKNGLFGNLIALSLGLTPNFKSNFDLAEDAKLQLSKDTYDDDLDNLLAQIGDQYADLFLAAKNLSDAILLSDILRVNTEITKAPLSASMIKRYDEHHQDLTLLKALVRQQLPEKYKEIFFDQSKNGYAGYIDGGASQEEFYKFIKPILEKMDGTEELLVKLNREDLLRKQRTFDNGSIPHQIHLGELHAILRRQEDFYPFLKDNREKIEKILTFRIPYYVGPLARGNSRFAWMTRKSEETITPWNFEEVVDKGASAQSFIERMTNFDKNLPNEKVLPKHSLLYEYFTVYNELTKVKYVTEGMRKPAFLSGEQKKAIVDLLFKTNRKVTVKQLKEDYFKKIECFDSVEISGVEDRFNASLGTYHDLLKIIKDKDFLDNEENEDILEDIVLTLTLFEDREMIEERLKTYAHLFDDKVMKQLKRRRYTGWGRLSRKLINGIRDKQSGKTILDFLKSDGFANRNFMQLIHDDSLTFKEDIQKAQVSGQGDSLHEHIANLAGSPAIKKGILQTVKVVDELVKVMGRHKPENIVIEMARENQTTQKGQKNSRERMKRIEEGIKELGSQILKEHPVENTQLQNEKLYLYYLQNGRDMYVDQELDINRLSDYDVDHIVPQSFLKDDSIDNKVLTRSDKARGKSDNVPSEEVVKKMKNYWRQLLNAKLITQRKFDNLTKAERGGLSELDKAGFIKRQLVETRQITKHVAQILDSRMNTKYDENDKLIREVKVITLKSKLVSDFRKDFQFYKVREINNYHHAHDAYLNAVVGTALIKKYPKLESEFVYGDYKVYDVRKMIAKSEQEIGKATAKYFFYSNIMNFFKTEITLANGEIRKRPLIETNGETGEIVWDKGRDFATVRKVLSMPQVNIVKKTEVQTGGFSKESILPKRNSDKLIARKKDWDPKKYGGFDSPTVAYSVLVVAKVEKGKSKKLKSVKELLGITIMERSSFEKNPIDFLEAKGYKEVKKDLIIKLPKYSLFELENGRKRMLASAGELQKGNELALPSKYVNFLYLASHYEKLKGSPEDNEQKQLFVEQHKHYLDEIIEQISEFSKRVILADANLDKVLSAYNKHRDKPIREQAENIIHLFTLTNLGAPAAFKYFDTTIDRKRYTSTKEVLDATLIHQSITGLYETRIDLSQLGGDGGGGGGSSGGTLNIEDEHRLHETSKEPDVSLGSTWLSDFPQAWAETGGMGLAVRQAPLIIPLKATSTPVSIKQYPMSQEARLGIKPHIQRLLDQGILVPCQSPWNTPLLPVKKPGTNDYRPVQDLREVNKRVEDIHPTVPNPYNLLSGLPPSHQWYTVLDLKDAFFCLRLHPTSQPLFAFEWRDPEMGISGQLTWTRLPQGFKNSPTLFNEALHRDLADFRIQHPDLILLQYVDDLLLAATSELDCQQGTRALLQTLGNLGYRASAKKAQICQKQVKYLGYLLKEGQRWLTEARKETVMGQPTPKTPRQLREFLGKAGFCRLFIPGFAEMAAPLYPLTKPGTLFNWGPDQQKAYQEIKQALLTAPALGLPDLTKPFELFVDEKQGYAKGVLTQKLGPWRRPVAYLSKKLDPVAAGWPPCLRMVAAIAVLTKDAGKLTMGQPLVILAPHAVEALVKQPPDRWLSNARMTHYQALLLDTDRVQFGPVVALNPATLLPLPEEGLQHNCLDILAEAHGTRPDLTDQPLPDADHTWYTDGSSLLQEGQRKAGAAVTTETEVIWAKALPAGTSAQRAELIALTQALKMAEGKKLNVYTDSRYAFATAHIHGEIYRRRGWLTSEGKEIKNKDEILALLKALFLPKRLSIIHCPGHQKGHSAEARGNRMADQAARKAAITETPDTSTLLAGKRTADGSEFEKRTADGSEFESPKKKAKVE

SEQ ID NO: 2821 - protein, 2093 aa, synthetic construct
MPAAKRVKLDGGDKKYSIGLDIGTNSVGWAVITDEYKVPSKKFKVLGNTDRHSIKKNLIGALLFDSGETAEATRLKRTARRRYTRRKNRICYLQEIFSNEMAKVDDSFFHRLEESFLVEEDKKHERHPIFGNIVDEVAYHEKYPTIYHLRKKLVDSTDKADLRLIYLALAHMIKFRGHFLIEGDLNPDNSDVDKLFIQLVQTYNQLFEENPINASGVDAKAILSARLSKSRRLENLIAQLPGEKKNGLFGNLIALSLGLTPNFKSNFDLAEDAKLQLSKDTYDDDLDNLLAQIGDQYADLFLAAKNLSDAILLSDILRVNTEITKAPLSASMIKRYDEHHQDLTLLKALVRQQLPEKYKEIFFDQSKNGYAGYIDGGASQEEFYKFIKPILEKMDGTEELLVKLNREDLLRKQRTFDNGSIPHQIHLGELHAILRRQEDFYPFLKDNREKIEKILTFRIPYYVGPLARGNSRFAWMTRKSEETITPWNFEEVVDKGASAQSFIERMTNFDKNLPNEKVLPKHSLLYEYFTVYNELTKVKYVTEGMRKPAFLSGEQKKAIVDLLFKTNRKVTVKQLKEDYFKKIECFDSVEISGVEDRFNASLGTYHDLLKIIKDKDFLDNEENEDILEDIVLTLTLFEDREMIEERLKTYAHLFDDKVMKQLKRRRYTGWGRLSRKLINGIRDKQSGKTILDFLKSDGFANRNFMQLIHDDSLTFKEDIQKAQVSGQGDSLHEHIANLAGSPAIKKGILQTVKVVDELVKVMGRHKPENIVIEMARENQTTQKGQKNSRERMKRIEEGIKELGSQILKEHPVENTQLQNEKLYLYYLQNGRDMYVDQELDINRLSDYDVDHIVPQSFLKDDSIDNKVLTRSDKARGKSDNVPSEEVVKKMKNYWRQLLNAKLITQRKFDNLTKAERGGLSELDKAGFIKRQLVETRQITKHVAQILDSRMNTKYDENDKLIREVKVITLKSKLVSDFRKDFQFYKVREINNYHHAHDAYLNAVVGTALIKKYPKLESEFVYGDYKVYDVRKMIAKSEQEIGKATAKYFFYSNIMNFFKTEITLANGEIRKRPLIETNGETGEIVWDKGRDFATVRKVLSMPQVNIVKKTEVQTGGFSKESILPKRNSDKLIARKKDWDPKKYGGFDSPTVAYSVLVVAKVEKGKSKKLKSVKELLGITIMERSSFEKNPIDFLEAKGYKEVKKDLIIKLPKYSLFELENGRKRMLASAGELQKGNELALPSKYVNFLYLASHYEKLKGSPEDNEQKQLFVEQHKHYLDEIIEQISEFSKRVILADANLDKVLSAYNKHRDKPIREQAENIIHLFTLTNLGAPAAFKYFDTTIDRKRYTSTKEVLDATLIHQSITGLYETRIDLSQLGGDGGEAAAKGSSGGTLNIEDEHRLHETSKEPDVSLGSTWLSDFPQAWAETGGMGLAVRQAPLIIPLKATSTPVSIKQYPMSQEARLGIKPHIQRLLDQGILVPCQSPWNTPLLPVKKPGTNDYRPVQDLREVNKRVEDIHPTVPNPYNLLSGLPPSHQWYTVLDLKDAFFCLRLHPTSQPLFAFEWRDPEMGISGQLTWTRLPQGFKNSPTLFNEALHRDLADFRIQHPDLILLQYVDDLLLAATSELDCQQGTRALLQTLGNLGYRASAKKAQICQKQVKYLGYLLKEGQRWLTEARKETVMGQPTPKTPRQLREFLGKAGFCRLFIPGFAEMAAPLYPLTKPGTLFNWGPDQQKAYQEIKQALLTAPALGLPDLTKPFELFVDEKQGYAKGVLTQKLGPWRRPVAYLSKKLDPVAAGWPPCLRMVAAIAVLTKDAGKLTMGQPLVILAPHAVEALVKQPPDRWLSNARMTHYQALLLDTDRVQFGPVVALNPATLLPLPEEGLQHNCLDILAEAHGTRPDLTDQPLPDADHTWYTDGSSLLQEGQRKAGAAVTTETEVIWAKALPAGTSAQRAELIALTQALKMAEGKKLNVYTDSRYAFATAHIHGEIYRRRGWLTSEGKEIKNKDEILALLKALFLPKRLSIIHCPGHQKGHSAEARGNRMADQAARKAAITETPDTSTLLAGKRTADGSEFEKRTADGSEFESPKKKAKVE

SEQ ID NO: 2822 - protein, 2096 aa, synthetic construct
MPAAKRVKLDGGDKKYSIGLDIGTNSVGWAVITDEYKVPSKKFKVLGNTDRHSIKKNLIGALLFDSGETAEATRLKRTARRRYTRRKNRICYLQEIFSNEMAKVDDSFFHRLEESFLVEEDKKHERHPIFGNIVDEVAYHEKYPTIYHLRKKLVDSTDKADLRLIYLALAHMIKFRGHFLIEGDLNPDNSDVDKLFIQLVQTYNQLFEENPINASGVDAKAILSARLSKSRRLENLIAQLPGEKKNGLFGNLIALSLGLTPNFKSNFDLAEDAKLQLSKDTYDDDLDNLLAQIGDQYADLFLAAKNLSDAILLSDILRVNTEITKAPLSASMIKRYDEHHQDLTLLKALVRQQLPEKYKEIFFDQSKNGYAGYIDGGASQEEFYKFIKPILEKMDGTEELLVKLNREDLLRKQRTFDNGSIPHQIHLGELHAILRRQEDFYPFLKDNREKIEKILTFRIPYYVGPLARGNSRFAWMTRKSEETITPWNFEEVVDKGASAQSFIERMTNFDKNLPNEKVLPKHSLLYEYFTVYNELTKVKYVTEGMRKPAFLSGEQKKAIVDLLFKTNRKVTVKQLKEDYFKKIECFDSVEISGVEDRFNASLGTYHDLLKIIKDKDFLDNEENEDILEDIVLTLTLFEDREMIEERLKTYAHLFDDKVMKQLKRRRYTGWGRLSRKLINGIRDKQSGKTILDFLKSDGFANRNFMQLIHDDSLTFKEDIQKAQVSGQGDSLHEHIANLAGSPAIKKGILQTVKVVDELVKVMGRHKPENIVIEMARENQTTQKGQKNSRERMKRIEEGIKELGSQILKEHPVENTQLQNEKLYLYYLQNGRDMYVDQELDINRLSDYDVDHIVPQSFLKDDSIDNKVLTRSDKARGKSDNVPSEEVVKKMKNYWRQLLNAKLITQRKFDNLTKAERGGLSELDKAGFIKRQLVETRQITKHVAQILDSRMNTKYDENDKLIREVKVITLKSKLVSDFRKDFQFYKVREINNYHHAHDAYLNAVVGTALIKKYPKLESEFVYGDYKVYDVRKMIAKSEQEIGKATAKYFFYSNIMNFFKTEITLANGEIRKRPLIETNGETGEIVWDKGRDFATVRKVLSMPQVNIVKKTEVQTGGFSKESILPKRNSDKLIARKKDWDPKKYGGFDSPTVAYSVLVVAKVEKGKSKKLKSVKELLGITIMERSSFEKNPIDFLEAKGYKEVKKDLIIKLPKYSLFELENGRKRMLASAGELQKGNELALPSKYVNFLYLASHYEKLKGSPEDNEQKQLFVEQHKHYLDEIIEQISEFSKRVILADANLDKVLSAYNKHRDKPIREQAENIIHLFTLTNLGAPAAFKYFDTTIDRKRYTSTKEVLDATLIHQSITGLYETRIDLSQLGGDGGPAPGGGEAAAKGGTLNIEDEHRLHETSKEPDVSLGSTWLSDFPQAWAETGGMGLAVRQAPLIIPLKATSTPVSIKQYPMSQEARLGIKPHIQRLLDQGILVPCQSPWNTPLLPVKKPGTNDYRPVQDLREVNKRVEDIHPTVPNPYNLLSGLPPSHQWYTVLDLKDAFFCLRLHPTSQPLFAFEWRDPEMGISGQLTWTRLPQGFKNSPTLFNEALHRDLADFRIQHPDLILLQYVDDLLLAATSELDCQQGTRALLQTLGNLGYRASAKKAQICQKQVKYLGYLLKEGQRWLTEARKETVMGQPTPKTPRQLREFLGKAGFCRLFIPGFAEMAAPLYPLTKPGTLFNWGPDQQKAYQEIKQALLTAPALGLPDLTKPFELFVDEKQGYAKGVLTQKLGPWRRPVAYLSKKLDPVAAGWPPCLRMVAAIAVLTKDAGKLTMGQPLVILAPHAVEALVKQPPDRWLSNARMTHYQALLLDTDRVQFGPVVALNPATLLPLPEEGLQHNCLDILAEAHGTRPDLTDQPLPDADHTWYTDGSSLLQEGQRKAGAAVTTETEVIWAKALPAGTSAQRAELIALTQALKMAEGKKLNVYTDSRYAFATAHIHGEIYRRRGWLTSEGKEIKNKDEILALLKALFLPKRLSIIHCPGHQKGHSAEARGNRMADQAARKAAITETPDTSTLLAGKRTADGSEFEKRTADGSEFESPKKKAKVE

SEQ ID NO: 2823 - protein, 2090 aa, synthetic construct
MPAAKRVKLDGGDKKYSIGLDIGTNSVGWAVITDEYKVPSKKFKVLGNTDRHSIKKNLIGALLFDSGETAEATRLKRTARRRYTRRKNRICYLQEIFSNEMAKVDDSFFHRLEESFLVEEDKKHERHPIFGNIVDEVAYHEKYPTIYHLRKKLVDSTDKADLRLIYLALAHMIKFRGHFLIEGDLNPDNSDVDKLFIQLVQTYNQLFEENPINASGVDAKAILSARLSKSRRLENLIAQLPGEKKNGLFGNLIALSLGLTPNFKSNFDLAEDAKLQLSKDTYDDDLDNLLAQIGDQYADLFLAAKNLSDAILLSDILRVNTEITKAPLSASMIKRYDEHHQDLTLLKALVRQQLPEKYKEIFFDQSKNGYAGYIDGGASQEEFYKFIKPILEKMDGTEELLVKLNREDLLRKQRTFDNGSIPHQIHLGELHAILRRQEDFYPFLKDNREKIEKILTFRIPYYVGPLARGNSRFAWMTRKSEETITPWNFEEVVDKGASAQSFIERMTNFDKNLPNEKVLPKHSLLYEYFTVYNELTKVKYVTEGMRKPAFLSGEQKKAIVDLLFKTNRKVTVKQLKEDYFKKIECFDSVEISGVEDRFNASLGTYHDLLKIIKDKDFLDNEENEDILEDIVLTLTLFEDREMIEERLKTYAHLFDDKVMKQLKRRRYTGWGRLSRKLINGIRDKQSGKTILDFLKSDGFANRNFMQLIHDDSLTFKEDIQKAQVSGQGDSLHEHIANLAGSPAIKKGILQTVKVVDELVKVMGRHKPENIVIEMARENQTTQKGQKNSRERMKRIEEGIKELGSQILKEHPVENTQLQNEKLYLYYLQNGRDMYVDQELDINRLSDYDVDHIVPQSFLKDDSIDNKVLTRSDKARGKSDNVPSEEVVKKMKNYWRQLLNAKLITQRKFDNLTKAERGGLSELDKAGFIKRQLVETRQITKHVAQILDSRMNTKYDENDKLIREVKVITLKSKLVSDFRKDFQFYKVREINNYHHAHDAYLNAVVGTALIKKYPKLESEFVYGDYKVYDVRKMIAKSEQEIGKATAKYFFYSNIMNFFKTEITLANGEIRKRPLIETNGETGEIVWDKGRDFATVRKVLSMPQVNIVKKTEVQTGGFSKESILPKRNSDKLIARKKDWDPKKYGGFDSPTVAYSVLVVAKVEKGKSKKLKSVKELLGITIMERSSFEKNPIDFLEAKGYKEVKKDLIIKLPKYSLFELENGRKRMLASAGELQKGNELALPSKYVNFLYLASHYEKLKGSPEDNEQKQLFVEQHKHYLDEIIEQISEFSKRVILADANLDKVLSAYNKHRDKPIREQAENIIHLFTLTNLGAPAAFKYFDTTIDRKRYTSTKEVLDATLIHQSITGLYETRIDLSQLGGDGGEAAAKGGTLNIEDEHRLHETSKEPDVSLGSTWLSDFPQAWAETGGMGLAVRQAPLIIPLKATSTPVSIKQYPMSQEARLGIKPHIQRLLDQGILVPCQSPWNTPLLPVKKPGTNDYRPVQDLREVNKRVEDIHPTVPNPYNLLSGLPPSHQWYTVLDLKDAFFCLRLHPTSQPLFAFEWRDPEMGISGQLTWTRLPQGFKNSPTLFNEALHRDLADFRIQHPDLILLQYVDDLLLAATSELDCQQGTRALLQTLGNLGYRASAKKAQICQKQVKYLGYLLKEGQRWLTEARKETVMGQPTPKTPRQLREFLGKAGFCRLFIPGFAEMAAPLYPLTKPGTLFNWGPDQQKAYQEIKQALLTAPALGLPDLTKPFELFVDEKQGYAKGVLTQKLGPWRRPVAYLSKKLDPVAAGWPPCLRMVAAIAVLTKDAGKLTMGQPLVILAPHAVEALVKQPPDRWLSNARMTHYQALLLDTDRVQFGPVVALNPATLLPLPEEGLQHNCLDILAEAHGTRPDLTDQPLPDADHTWYTDGSSLLQEGQRKAGAAVTTETEVIWAKALPAGTSAQRAELIALTQALKMAEGKKLNVYTDSRYAFATAHIHGEIYRRRGWLTSEGKEIKNKDEILALLKALFLPKRLSIIHCPGHQKGHSAEARGNRMADQAARKAAITETPDTSTLLAGKRTADGSEFEKRTADGSEFESPKKKAKVE

SEQ ID NO: 2824 - protein, 2088 aa, synthetic construct
MPAAKRVKLDGGDKKYSIGLDIGTNSVGWAVITDEYKVPSKKFKVLGNTDRHSIKKNLIGALLFDSGETAEATRLKRTARRRYTRRKNRICYLQEIFSNEMAKVDDSFFHRLEESFLVEEDKKHERHPIFGNIVDEVAYHEKYPTIYHLRKKLVDSTDKADLRLIYLALAHMIKFRGHFLIEGDLNPDNSDVDKLFIQLVQTYNQLFEENPINASGVDAKAILSARLSKSRRLENLIAQLPGEKKNGLFGNLIALSLGLTPNFKSNFDLAEDAKLQLSKDTYDDDLDNLLAQIGDQYADLFLAAKNLSDAILLSDILRVNTEITKAPLSASMIKRYDEHHQDLTLLKALVRQQLPEKYKEIFFDQSKNGYAGYIDGGASQEEFYKFIKPILEKMDGTEELLVKLNREDLLRKQRTFDNGSIPHQIHLGELHAILRRQEDFYPFLKDNREKIEKILTFRIPYYVGPLARGNSRFAWMTRKSEETITPWNFEEVVDKGASAQSFIERMTNFDKNLPNEKVLPKHSLLYEYFTVYNELTKVKYVTEGMRKPAFLSGEQKKAIVDLLFKTNRKVTVKQLKEDYFKKIECFDSVEISGVEDRFNASLGTYHDLLKIIKDKDFLDNEENEDILEDIVLTLTLFEDREMIEERLKTYAHLFDDKVMKQLKRRRYTGWGRLSRKLINGIRDKQSGKTILDFLKSDGFANRNFMQLIHDDSLTFKEDIQKAQVSGQGDSLHEHIANLAGSPAIKKGILQTVKVVDELVKVMGRHKPENIVIEMARENQTTQKGQKNSRERMKRIEEGIKELGSQILKEHPVENTQLQNEKLYLYYLQNGRDMYVDQELDINRLSDYDVDHIVPQSFLKDDSIDNKVLTRSDKARGKSDNVPSEEVVKKMKNYWRQLLNAKLITQRKFDNLTKAERGGLSELDKAGFIKRQLVETRQITKHVAQILDSRMNTKYDENDKLIREVKVITLKSKLVSDFRKDFQFYKVREINNYHHAHDAYLNAVVGTALIKKYPKLESEFVYGDYKVYDVRKMIAKSEQEIGKATAKYFFYSNIMNFFKTEITLANGEIRKRPLIETNGETGEIVWDKGRDFATVRKVLSMPQVNIVKKTEVQTGGFSKESILPKRNSDKLIARKKDWDPKKYGGFDSPTVAYSVLVVAKVEKGKSKKLKSVKELLGITIMERSSFEKNPIDFLEAKGYKEVKKDLIIKLPKYSLFELENGRKRMLASAGELQKGNELALPSKYVNFLYLASHYEKLKGSPEDNEQKQLFVEQHKHYLDEIIEQISEFSKRVILADANLDKVLSAYNKHRDKPIREQAENIIHLFTLTNLGAPAAFKYFDTTIDRKRYTSTKEVLDATLIHQSITGLYETRIDLSQLGGDGGGGGGGTLNIEDEHRLHETSKEPDVSLGSTWLSDFPQAWAETGGMGLAVRQAPLIIPLKATSTPVSIKQYPMSQEARLGIKPHIQRLLDQGILVPCQSPWNTPLLPVKKPGTNDYRPVQDLREVNKRVEDIHPTVPNPYNLLSGLPPSHQWYTVLDLKDAFFCLRLHPTSQPLFAFEWRDPEMGISGQLTWTRLPQGFKNSPTLFNEALHRDLADFRIQHPDLILLQYVDDLLLAATSELDCQQGTRALLQTLGNLGYRASAKKAQICQKQVKYLGYLLKEGQRWLTEARKETVMGQPTPKTPRQLREFLGKAGFCRLFIPGFAEMAAPLYPLTKPGTLFNWGPDQQKAYQEIKQALLTAPALGLPDLTKPFELFVDEKQGYAKGVLTQKLGPWRRPVAYLSKKLDPVAAGWPPCLRMVAAIAVLTKDAGKLTMGQPLVILAPHAVEALVKQPPDRWLSNARMTHYQALLLDTDRVQFGPVVALNPATLLPLPEEGLQHNCLDILAEAHGTRPDLTDQPLPDADHTWYTDGSSLLQEGQRKAGAAVTTETEVIWAKALPAGTSAQRAELIALTQALKMAEGKKLNVYTDSRYAFATAHIHGEIYRRRGWLTSEGKEIKNKDEILALLKALFLPKRLSIIHCPGHQKGHSAEARGNRMADQAARKAAITETPDTSTLLAGKRTADGSEFEKRTADGSEFESPKKKAKVE

SEQ ID NO: 2825 - protein, 2090 aa, synthetic construct
MPAAKRVKLDGGDKKYSIGLDIGTNSVGWAVITDEYKVPSKKFKVLGNTDRHSIKKNLIGALLFDSGETAEATRLKRTARRRYTRRKNRICYLQEIFSNEMAKVDDSFFHRLEESFLVEEDKKHERHPIFGNIVDEVAYHEKYPTIYHLRKKLVDSTDKADLRLIYLALAHMIKFRGHFLIEGDLNPDNSDVDKLFIQLVQTYNQLFEENPINASGVDAKAILSARLSKSRRLENLIAQLPGEKKNGLFGNLIALSLGLTPNFKSNFDLAEDAKLQLSKDTYDDDLDNLLAQIGDQYADLFLAAKNLSDAILLSDILRVNTEITKAPLSASMIKRYDEHHQDLTLLKALVRQQLPEKYKEIFFDQSKNGYAGYIDGGASQEEFYKFIKPILEKMDGTEELLVKLNREDLLRKQRTFDNGSIPHQIHLGELHAILRRQEDFYPFLKDNREKIEKILTFRIPYYVGPLARGNSRFAWMTRKSEETITPWNFEEVVDKGASAQSFIERMTNFDKNLPNEKVLPKHSLLYEYFTVYNELTKVKYVTEGMRKPAFLSGEQKKAIVDLLFKTNRKVTVKQLKEDYFKKIECFDSVEISGVEDRFNASLGTYHDLLKIIKDKDFLDNEENEDILEDIVLTLTLFEDREMIEERLKTYAHLFDDKVMKQLKRRRYTGWGRLSRKLINGIRDKQSGKTILDFLKSDGFANRNFMQLIHDDSLTFKEDIQKAQVSGQGDSLHEHIANLAGSPAIKKGILQTVKVVDELVKVMGRHKPENIVIEMARENQTTQKGQKNSRERMKRIEEGIKELGSQILKEHPVENTQLQNEKLYLYYLQNGRDMYVDQELDINRLSDYDVDHIVPQSFLKDDSIDNKVLTRSDKARGKSDNVPSEEVVKKMKNYWRQLLNAKLITQRKFDNLTKAERGGLSELDKAGFIKRQLVETRQITKHVAQILDSRMNTKYDENDKLIREVKVITLKSKLVSDFRKDFQFYKVREINNYHHAHDAYLNAVVGTALIKKYPKLESEFVYGDYKVYDVRKMIAKSEQEIGKATAKYFFYSNIMNFFKTEITLANGEIRKRPLIETNGETGEIVWDKGRDFATVRKVLSMPQVNIVKKTEVQTGGFSKESILPKRNSDKLIARKKDWDPKKYGGFDSPTVAYSVLVVAKVEKGKSKKLKSVKELLGITIMERSSFEKNPIDFLEAKGYKEVKKDLIIKLPKYSLFELENGRKRMLASAGELQKGNELALPSKYVNFLYLASHYEKLKGSPEDNEQKQLFVEQHKHYLDEIIEQISEFSKRVILADANLDKVLSAYNKHRDKPIREQAENIIHLFTLTNLGAPAAFKYFDTTIDRKRYTSTKEVLDATLIHQSITGLYETRIDLSQLGGDGGGGGGSGGTLNIEDEHRLHETSKEPDVSLGSTWLSDFPQAWAETGGMGLAVRQAPLIIPLKATSTPVSIKQYPMSQEARLGIKPHIQRLLDQGILVPCQSPWNTPLLPVKKPGTNDYRPVQDLREVNKRVEDIHPTVPNPYNLLSGLPPSHQWYTVLDLKDAFFCLRLHPTSQPLFAFEWRDPEMGISGQLTWTRLPQGFKNSPTLFNEALHRDLADFRIQHPDLILLQYVDDLLLAATSELDCQQGTRALLQTLGNLGYRASAKKAQICQKQVKYLGYLLKEGQRWLTEARKETVMGQPTPKTPRQLREFLGKAGFCRLFIPGFAEMAAPLYPLTKPGTLFNWGPDQQKAYQEIKQALLTAPALGLPDLTKPFELFVDEKQGYAKGVLTQKLGPWRRPVAYLSKKLDPVAAGWPPCLRMVAAIAVLTKDAGKLTMGQPLVILAPHAVEALVKQPPDRWLSNARMTHYQALLLDTDRVQFGPVVALNPATLLPLPEEGLQHNCLDILAEAHGTRPDLTDQPLPDADHTWYTDGSSLLQEGQRKAGAAVTTETEVIWAKALPAGTSAQRAELIALTQALKMAEGKKLNVYTDSRYAFATAHIHGEIYRRRGWLTSEGKEIKNKDEILALLKALFLPKRLSIIHCPGHQKGHSAEARGNRMADQAARKAAITETPDTSTLLAGKRTADGSEFEKRTADGSEFESPKKKAKVE

SEQ ID NO: 2826 - protein, 2096 aa, synthetic construct
MPAAKRVKLDGGDKKYSIGLDIGTNSVGWAVITDEYKVPSKKFKVLGNTDRHSIKKNLIGALLFDSGETAEATRLKRTARRRYTRRKNRICYLQEIFSNEMAKVDDSFFHRLEESFLVEEDKKHERHPIFGNIVDEVAYHEKYPTIYHLRKKLVDSTDKADLRLIYLALAHMIKFRGHFLIEGDLNPDNSDVDKLFIQLVQTYNQLFEENPINASGVDAKAILSARLSKSRRLENLIAQLPGEKKNGLFGNLIALSLGLTPNFKSNFDLAEDAKLQLSKDTYDDDLDNLLAQIGDQYADLFLAAKNLSDAILLSDILRVNTEITKAPLSASMIKRYDEHHQDLTLLKALVRQQLPEKYKEIFFDQSKNGYAGYIDGGASQEEFYKFIKPILEKMDGTEELLVKLNREDLLRKQRTFDNGSIPHQIHLGELHAILRRQEDFYPFLKDNREKIEKILTFRIPYYVGPLARGNSRFAWMTRKSEETITPWNFEEVVDKGASAQSFIERMTNFDKNLPNEKVLPKHSLLYEYFTVYNELTKVKYVTEGMRKPAFLSGEQKKAIVDLLFKTNRKVTVKQLKEDYFKKIECFDSVEISGVEDRFNASLGTYHDLLKIIKDKDFLDNEENEDILEDIVLTLTLFEDREMIEERLKTYAHLFDDKVMKQLKRRRYTGWGRLSRKLINGIRDKQSGKTILDFLKSDGFANRNFMQLIHDDSLTFKEDIQKAQVSGQGDSLHEHIANLAGSPAIKKGILQTVKVVDELVKVMGRHKPENIVIEMARENQTTQKGQKNSRERMKRIEEGIKELGSQILKEHPVENTQLQNEKLYLYYLQNGRDMYVDQELDINRLSDYDVDHIVPQSFLKDDSIDNKVLTRSDKARGKSDNVPSEEVVKKMKNYWRQLLNAKLITQRKFDNLTKAERGGLSELDKAGFIKRQLVETRQITKHVAQILDSRMNTKYDENDKLIREVKVITLKSKLVSDFRKDFQFYKVREINNYHHAHDAYLNAVVGTALIKKYPKLESEFVYGDYKVYDVRKMIAKSEQEIGKATAKYFFYSNIMNFFKTEITLANGEIRKRPLIETNGETGEIVWDKGRDFATVRKVLSMPQVNIVKKTEVQTGGFSKESILPKRNSDKLIARKKDWDPKKYGGFDSPTVAYSVLVVAKVEKGKSKKLKSVKELLGITIMERSSFEKNPIDFLEAKGYKEVKKDLIIKLPKYSLFELENGRKRMLASAGELQKGNELALPSKYVNFLYLASHYEKLKGSPEDNEQKQLFVEQHKHYLDEIIEQISEFSKRVILADANLDKVLSAYNKHRDKPIREQAENIIHLFTLTNLGAPAAFKYFDTTIDRKRYTSTKEVLDATLIHQSITGLYETRIDLSQLGGDGGGGSEAAAKGSSGGTLNIEDEHRLHETSKEPDVSLGSTWLSDFPQAWAETGGMGLAVRQAPLIIPLKATSTPVSIKQYPMSQEARLGIKPHIQRLLDQGILVPCQSPWNTPLLPVKKPGTNDYRPVQDLREVNKRVEDIHPTVPNPYNLLSGLPPSHQWYTVLDLKDAFFCLRLHPTSQPLFAFEWRDPEMGISGQLTWTRLPQGFKNSPTLFNEALHRDLADFRIQHPDLILLQYVDDLLLAATSELDCQQGTRALLQTLGNLGYRASAKKAQICQKQVKYLGYLLKEGQRWLTEARKETVMGQPTPKTPRQLREFLGKAGFCRLFIPGFAEMAAPLYPLTKPGTLFNWGPDQQKAYQEIKQALLTAPALGLPDLTKPFELFVDEKQGYAKGVLTQKLGPWRRPVAYLSKKLDPVAAGWPPCLRMVAAIAVLTKDAGKLTMGQPLVILAPHAVEALVKQPPDRWLSNARMTHYQALLLDTDRVQFGPVVALNPATLLPLPEEGLQHNCLDILAEAHGTRPDLTDQPLPDADHTWYTDGSSLLQEGQRKAGAAVTTETEVIWAKALPAGTSAQRAELIALTQALKMAEGKKLNVYTDSRYAFATAHIHGEIYRRRGWLTSEGKEIKNKDEILALLKALFLPKRLSIIHCPGHQKGHSAEARGNRMADQAARKAAITETPDTSTLLAGKRTADGSEFEKRTADGSEFESPKKKAKVE

SEQ ID NO: 2827 - protein, 2115 aa, synthetic construct
MPAAKRVKLDGGDKKYSIGLDIGTNSVGWAVITDEYKVPSKKFKVLGNTDRHSIKKNLIGALLFDSGETAEATRLKRTARRRYTRRKNRICYLQEIFSNEMAKVDDSFFHRLEESFLVEEDKKHERHPIFGNIVDEVAYHEKYPTIYHLRKKLVDSTDKADLRLIYLALAHMIKFRGHFLIEGDLNPDNSDVDKLFIQLVQTYNQLFEENPINASGVDAKAILSARLSKSRRLENLIAQLPGEKKNGLFGNLIALSLGLTPNFKSNFDLAEDAKLQLSKDTYDDDLDNLLAQIGDQYADLFLAAKNLSDAILLSDILRVNTEITKAPLSASMIKRYDEHHQDLTLLKALVRQQLPEKYKEIFFDQSKNGYAGYIDGGASQEEFYKFIKPILEKMDGTEELLVKLNREDLLRKQRTFDNGSIPHQIHLGELHAILRRQEDFYPFLKDNREKIEKILTFRIPYYVGPLARGNSRFAWMTRKSEETITPWNFEEVVDKGASAQSFIERMTNFDKNLPNEKVLPKHSLLYEYFTVYNELTKVKYVTEGMRKPAFLSGEQKKAIVDLLFKTNRKVTVKQLKEDYFKKIECFDSVEISGVEDRFNASLGTYHDLLKIIKDKDFLDNEENEDILEDIVLTLTLFEDREMIEERLKTYAHLFDDKVMKQLKRRRYTGWGRLSRKLINGIRDKQSGKTILDFLKSDGFANRNFMQLIHDDSLTFKEDIQKAQVSGQGDSLHEHIANLAGSPAIKKGILQTVKVVDELVKVMGRHKPENIVIEMARENQTTQKGQKNSRERMKRIEEGIKELGSQILKEHPVENTQLQNEKLYLYYLQNGRDMYVDQELDINRLSDYDVDHIVPQSFLKDDSIDNKVLTRSDKARGKSDNVPSEEVVKKMKNYWRQLLNAKLITQRKFDNLTKAERGGLSELDKAGFIKRQLVETRQITKHVAQILDSRMNTKYDENDKLIREVKVITLKSKLVSDFRKDFQFYKVREINNYHHAHDAYLNAVVGTALIKKYPKLESEFVYGDYKVYDVRKMIAKSEQEIGKATAKYFFYSNIMNFFKTEITLANGEIRKRPLIETNGETGEIVWDKGRDFATVRKVLSMPQVNIVKKTEVQTGGFSKESILPKRNSDKLIARKKDWDPKKYGGFDSPTVAYSVLVVAKVEKGKSKKLKSVKELLGITIMERSSFEKNPIDFLEAKGYKEVKKDLIIKLPKYSLFELENGRKRMLASAGELQKGNELALPSKYVNFLYLASHYEKLKGSPEDNEQKQLFVEQHKHYLDEIIEQISEFSKRVILADANLDKVLSAYNKHRDKPIREQAENIIHLFTLTNLGAPAAFKYFDTTIDRKRYTSTKEVLDATLIHQSITGLYETRIDLSQLGGDGGGGGGSGGGGSGGGGSGGGGSGGGGSGGGGSGGTLNIEDEHRLHETSKEPDVSLGSTWLSDFPQAWAETGGMGLAVRQAPLIIPLKATSTPVSIKQYPMSQEARLGIKPHIQRLLDQGILVPCQSPWNTPLLPVKKPGTNDYRPVQDLREVNKRVEDIHPTVPNPYNLLSGLPPSHQWYTVLDLKDAFFCLRLHPTSQPLFAFEWRDPEMGISGQLTWTRLPQGFKNSPTLFNEALHRDLADFRIQHPDLILLQYVDDLLLAATSELDCQQGTRALLQTLGNLGYRASAKKAQICQKQVKYLGYLLKEGQRWLTEARKETVMGQPTPKTPRQLREFLGKAGFCRLFIPGFAEMAAPLYPLTKPGTLFNWGPDQQKAYQEIKQALLTAPALGLPDLTKPFELFVDEKQGYAKGVLTQKLGPWRRPVAYLSKKLDPVAAGWPPCLRMVAAIAVLTKDAGKLTMGQPLVILAPHAVEALVKQPPDRWLSNARMTHYQALLLDTDRVQFGPVVALNPATLLPLPEEGLQHNCLDILAEAHGTRPDLTDQPLPDADHTWYTDGSSLLQEGQRKAGAAVTTETEVIWAKALPAGTSAQRAELIALTQALKMAEGKKLNVYTDSRYAFATAHIHGEIYRRRGWLTSEGKEIKNKDEILALLKALFLPKRLSIIHCPGHQKGHSAEARGNRMADQAARKAAITETPDTSTLLAGKRTADGSEFEKRTADGSEFESPKKKAKVE

SEQ ID NO: 2828 - protein, 2093 aa, synthetic construct
MPAAKRVKLDGGDKKYSIGLDIGTNSVGWAVITDEYKVPSKKFKVLGNTDRHSIKKNLIGALLFDSGETAEATRLKRTARRRYTRRKNRICYLQEIFSNEMAKVDDSFFHRLEESFLVEEDKKHERHPIFGNIVDEVAYHEKYPTIYHLRKKLVDSTDKADLRLIYLALAHMIKFRGHFLIEGDLNPDNSDVDKLFIQLVQTYNQLFEENPINASGVDAKAILSARLSKSRRLENLIAQLPGEKKNGLFGNLIALSLGLTPNFKSNFDLAEDAKLQLSKDTYDDDLDNLLAQIGDQYADLFLAAKNLSDAILLSDILRVNTEITKAPLSASMIKRYDEHHQDLTLLKALVRQQLPEKYKEIFFDQSKNGYAGYIDGGASQEEFYKFIKPILEKMDGTEELLVKLNREDLLRKQRTFDNGSIPHQIHLGELHAILRRQEDFYPFLKDNREKIEKILTFRIPYYVGPLARGNSRFAWMTRKSEETITPWNFEEVVDKGASAQSFIERMTNFDKNLPNEKVLPKHSLLYEYFTVYNELTKVKYVTEGMRKPAFLSGEQKKAIVDLLFKTNRKVTVKQLKEDYFKKIECFDSVEISGVEDRFNASLGTYHDLLKIIKDKDFLDNEENEDILEDIVLTLTLFEDREMIEERLKTYAHLFDDKVMKQLKRRRYTGWGRLSRKLINGIRDKQSGKTILDFLKSDGFANRNFMQLIHDDSLTFKEDIQKAQVSGQGDSLHEHIANLAGSPAIKKGILQTVKVVDELVKVMGRHKPENIVIEMARENQTTQKGQKNSRERMKRIEEGIKELGSQILKEHPVENTQLQNEKLYLYYLQNGRDMYVDQELDINRLSDYDVDHIVPQSFLKDDSIDNKVLTRSDKARGKSDNVPSEEVVKKMKNYWRQLLNAKLITQRKFDNLTKAERGGLSELDKAGFIKRQLVETRQITKHVAQILDSRMNTKYDENDKLIREVKVITLKSKLVSDFRKDFQFYKVREINNYHHAHDAYLNAVVGTALIKKYPKLESEFVYGDYKVYDVRKMIAKSEQEIGKATAKYFFYSNIMNFFKTEITLANGEIRKRPLIETNGETGEIVWDKGRDFATVRKVLSMPQVNIVKKTEVQTGGFSKESILPKRNSDKLIARKKDWDPKKYGGFDSPTVAYSVLVVAKVEKGKSKKLKSVKELLGITIMERSSFEKNPIDFLEAKGYKEVKKDLIIKLPKYSLFELENGRKRMLASAGELQKGNELALPSKYVNFLYLASHYEKLKGSPEDNEQKQLFVEQHKHYLDEIIEQISEFSKRVILADANLDKVLSAYNKHRDKPIREQAENIIHLFTLTNLGAPAAFKYFDTTIDRKRYTSTKEVLDATLIHQSITGLYETRIDLSQLGGDGGGSSEAAAKGGTLNIEDEHRLHETSKEPDVSLGSTWLSDFPQAWAETGGMGLAVRQAPLIIPLKATSTPVSIKQYPMSQEARLGIKPHIQRLLDQGILVPCQSPWNTPLLPVKKPGTNDYRPVQDLREVNKRVEDIHPTVPNPYNLLSGLPPSHQWYTVLDLKDAFFCLRLHPTSQPLFAFEWRDPEMGISGQLTWTRLPQGFKNSPTLFNEALHRDLADFRIQHPDLILLQYVDDLLLAATSELDCQQGTRALLQTLGNLGYRASAKKAQICQKQVKYLGYLLKEGQRWLTEARKETVMGQPTPKTPRQLREFLGKAGFCRLFIPGFAEMAAPLYPLTKPGTLFNWGPDQQKAYQEIKQALLTAPALGLPDLTKPFELFVDEKQGYAKGVLTQKLGPWRRPVAYLSKKLDPVAAGWPPCLRMVAAIAVLTKDAGKLTMGQPLVILAPHAVEALVKQPPDRWLSNARMTHYQALLLDTDRVQFGPVVALNPATLLPLPEEGLQHNCLDILAEAHGTRPDLTDQPLPDADHTWYTDGSSLLQEGQRKAGAAVTTETEVIWAKALPAGTSAQRAELIALTQALKMAEGKKLNVYTDSRYAFATAHIHGEIYRRRGWLTSEGKEIKNKDEILALLKALFLPKRLSIIHCPGHQKGHSAEARGNRMADQAARKAAITETPDTSTLLAGKRTADGSEFEKRTADGSEFESPKKKAKVE

SEQ ID NO: 2829 - protein, 2096 aa, synthetic construct
MPAAKRVKLDGGDKKYSIGLDIGTNSVGWAVITDEYKVPSKKFKVLGNTDRHSIKKNLIGALLFDSGETAEATRLKRTARRRYTRRKNRICYLQEIFSNEMAKVDDSFFHRLEESFLVEEDKKHERHPIFGNIVDEVAYHEKYPTIYHLRKKLVDSTDKADLRLIYLALAHMIKFRGHFLIEGDLNPDNSDVDKLFIQLVQTYNQLFEENPINASGVDAKAILSARLSKSRRLENLIAQLPGEKKNGLFGNLIALSLGLTPNFKSNFDLAEDAKLQLSKDTYDDDLDNLLAQIGDQYADLFLAAKNLSDAILLSDILRVNTEITKAPLSASMIKRYDEHHQDLTLLKALVRQQLPEKYKEIFFDQSKNGYAGYIDGGASQEEFYKFIKPILEKMDGTEELLVKLNREDLLRKQRTFDNGSIPHQIHLGELHAILRRQEDFYPFLKDNREKIEKILTFRIPYYVGPLARGNSRFAWMTRKSEETITPWNFEEVVDKGASAQSFIERMTNFDKNLPNEKVLPKHSLLYEYFTVYNELTKVKYVTEGMRKPAFLSGEQKKAIVDLLFKTNRKVTVKQLKEDYFKKIECFDSVEISGVEDRFNASLGTYHDLLKIIKDKDFLDNEENEDILEDIVLTLTLFEDREMIEERLKTYAHLFDDKVMKQLKRRRYTGWGRLSRKLINGIRDKQSGKTILDFLKSDGFANRNFMQLIHDDSLTFKEDIQKAQVSGQGDSLHEHIANLAGSPAIKKGILQTVKVVDELVKVMGRHKPENIVIEMARENQTTQKGQKNSRERMKRIEEGIKELGSQILKEHPVENTQLQNEKLYLYYLQNGRDMYVDQELDINRLSDYDVDHIVPQSFLKDDSIDNKVLTRSDKARGKSDNVPSEEVVKKMKNYWRQLLNAKLITQRKFDNLTKAERGGLSELDKAGFIKRQLVETRQITKHVAQILDSRMNTKYDENDKLIREVKVITLKSKLVSDFRKDFQFYKVREINNYHHAHDAYLNAVVGTALIKKYPKLESEFVYGDYKVYDVRKMIAKSEQEIGKATAKYFFYSNIMNFFKTEITLANGEIRKRPLIETNGETGEIVWDKGRDFATVRKVLSMPQVNIVKKTEVQTGGFSKESILPKRNSDKLIARKKDWDPKKYGGFDSPTVAYSVLVVAKVEKGKSKKLKSVKELLGITIMERSSFEKNPIDFLEAKGYKEVKKDLIIKLPKYSLFELENGRKRMLASAGELQKGNELALPSKYVNFLYLASHYEKLKGSPEDNEQKQLFVEQHKHYLDEIIEQISEFSKRVILADANLDKVLSAYNKHRDKPIREQAENIIHLFTLTNLGAPAAFKYFDTTIDRKRYTSTKEVLDATLIHQSITGLYETRIDLSQLGGDGGPAPEAAAKGGSGGTLNIEDEHRLHETSKEPDVSLGSTWLSDFPQAWAETGGMGLAVRQAPLIIPLKATSTPVSIKQYPMSQEARLGIKPHIQRLLDQGILVPCQSPWNTPLLPVKKPGTNDYRPVQDLREVNKRVEDIHPTVPNPYNLLSGLPPSHQWYTVLDLKDAFFCLRLHPTSQPLFAFEWRDPEMGISGQLTWTRLPQGFKNSPTLFNEALHRDLADFRIQHPDLILLQYVDDLLLAATSELDCQQGTRALLQTLGNLGYRASAKKAQICQKQVKYLGYLLKEGQRWLTEARKETVMGQPTPKTPRQLREFLGKAGFCRLFIPGFAEMAAPLYPLTKPGTLFNWGPDQQKAYQEIKQALLTAPALGLPDLTKPFELFVDEKQGYAKGVLTQKLGPWRRPVAYLSKKLDPVAAGWPPCLRMVAAIAVLTKDAGKLTMGQPLVILAPHAVEALVKQPPDRWLSNARMTHYQALLLDTDRVQFGPVVALNPATLLPLPEEGLQHNCLDILAEAHGTRPDLTDQPLPDADHTWYTDGSSLLQEGQRKAGAAVTTETEVIWAKALPAGTSAQRAELIALTQALKMAEGKKLNVYTDSRYAFATAHIHGEIYRRRGWLTSEGKEIKNKDEILALLKALFLPKRLSIIHCPGHQKGHSAEARGNRMADQAARKAAITETPDTSTLLAGKRTADGSEFEKRTADGSEFESPKKKAKVE

SEQ ID NO: 2830 - protein, 2096 aa, synthetic construct
MPAAKRVKLDGGDKKYSIGLDIGTNSVGWAVITDEYKVPSKKFKVLGNTDRHSIKKNLIGALLFDSGETAEATRLKRTARRRYTRRKNRICYLQEIFSNEMAKVDDSFFHRLEESFLVEEDKKHERHPIFGNIVDEVAYHEKYPTIYHLRKKLVDSTDKADLRLIYLALAHMIKFRGHFLIEGDLNPDNSDVDKLFIQLVQTYNQLFEENPINASGVDAKAILSARLSKSRRLENLIAQLPGEKKNGLFGNLIALSLGLTPNFKSNFDLAEDAKLQLSKDTYDDDLDNLLAQIGDQYADLFLAAKNLSDAILLSDILRVNTEITKAPLSASMIKRYDEHHQDLTLLKALVRQQLPEKYKEIFFDQSKNGYAGYIDGGASQEEFYKFIKPILEKMDGTEELLVKLNREDLLRKQRTFDNGSIPHQIHLGELHAILRRQEDFYPFLKDNREKIEKILTFRIPYYVGPLARGNSRFAWMTRKSEETITPWNFEEVVDKGASAQSFIERMTNFDKNLPNEKVLPKHSLLYEYFTVYNELTKVKYVTEGMRKPAFLSGEQKKAIVDLLFKTNRKVTVKQLKEDYFKKIECFDSVEISGVEDRFNASLGTYHDLLKIIKDKDFLDNEENEDILEDIVLTLTLFEDREMIEERLKTYAHLFDDKVMKQLKRRRYTGWGRLSRKLINGIRDKQSGKTILDFLKSDGFANRNFMQLIHDDSLTFKEDIQKAQVSGQGDSLHEHIANLAGSPAIKKGILQTVKVVDELVKVMGRHKPENIVIEMARENQTTQKGQKNSRERMKRIEEGIKELGSQILKEHPVENTQLQNEKLYLYYLQNGRDMYVDQELDINRLSDYDVDHIVPQSFLKDDSIDNKVLTRSDKARGKSDNVPSEEVVKKMKNYWRQLLNAKLITQRKFDNLTKAERGGLSELDKAGFIKRQLVETRQITKHVAQILDSRMNTKYDENDKLIREVKVITLKSKLVSDFRKDFQFYKVREINNYHHAHDAYLNAVVGTALIKKYPKLESEFVYGDYKVYDVRKMIAKSEQEIGKATAKYFFYSNIMNFFKTEITLANGEIRKRPLIETNGETGEIVWDKGRDFATVRKVLSMPQVNIVKKTEVQTGGFSKESILPKRNSDKLIARKKDWDPKKYGGFDSPTVAYSVLVVAKVEKGKSKKLKSVKELLGITIMERSSFEKNPIDFLEAKGYKEVKKDLIIKLPKYSLFELENGRKRMLASAGELQKGNELALPSKYVNFLYLASHYEKLKGSPEDNEQKQLFVEQHKHYLDEIIEQISEFSKRVILADANLDKVLSAYNKHRDKPIREQAENIIHLFTLTNLGAPAAFKYFDTTIDRKRYTSTKEVLDATLIHQSITGLYETRIDLSQLGGDGGGGGEAAAKPAPGGTLNIEDEHRLHETSKEPDVSLGSTWLSDFPQAWAETGGMGLAVRQAPLIIPLKATSTPVSIKQYPMSQEARLGIKPHIQRLLDQGILVPCQSPWNTPLLPVKKPGTNDYRPVQDLREVNKRVEDIHPTVPNPYNLLSGLPPSHQWYTVLDLKDAFFCLRLHPTSQPLFAFEWRDPEMGISGQLTWTRLPQGFKNSPTLFNEALHRDLADFRIQHPDLILLQYVDDLLLAATSELDCQQGTRALLQTLGNLGYRASAKKAQICQKQVKYLGYLLKEGQRWLTEARKETVMGQPTPKTPRQLREFLGKAGFCRLFIPGFAEMAAPLYPLTKPGTLFNWGPDQQKAYQEIKQALLTAPALGLPDLTKPFELFVDEKQGYAKGVLTQKLGPWRRPVAYLSKKLDPVAAGWPPCLRMVAAIAVLTKDAGKLTMGQPLVILAPHAVEALVKQPPDRWLSNARMTHYQALLLDTDRVQFGPVVALNPATLLPLPEEGLQHNCLDILAEAHGTRPDLTDQPLPDADHTWYTDGSSLLQEGQRKAGAAVTTETEVIWAKALPAGTSAQRAELIALTQALKMAEGKKLNVYTDSRYAFATAHIHGEIYRRRGWLTSEGKEIKNKDEILALLKALFLPKRLSIIHCPGHQKGHSAEARGNRMADQAARKAAITETPDTSTLLAGKRTADGSEFEKRTADGSEFESPKKKAKVE

SEQ ID NO: 2831 - protein, 2096 aa, synthetic construct
MPAAKRVKLDGGDKKYSIGLDIGTNSVGWAVITDEYKVPSKKFKVLGNTDRHSIKKNLIGALLFDSGETAEATRLKRTARRRYTRRKNRICYLQEIFSNEMAKVDDSFFHRLEESFLVEEDKKHERHPIFGNIVDEVAYHEKYPTIYHLRKKLVDSTDKADLRLIYLALAHMIKFRGHFLIEGDLNPDNSDVDKLFIQLVQTYNQLFEENPINASGVDAKAILSARLSKSRRLENLIAQLPGEKKNGLFGNLIALSLGLTPNFKSNFDLAEDAKLQLSKDTYDDDLDNLLAQIGDQYADLFLAAKNLSDAILLSDILRVNTEITKAPLSASMIKRYDEHHQDLTLLKALVRQQLPEKYKEIFFDQSKNGYAGYIDGGASQEEFYKFIKPILEKMDGTEELLVKLNREDLLRKQRTFDNGSIPHQIHLGELHAILRRQEDFYPFLKDNREKIEKILTFRIPYYVGPLARGNSRFAWMTRKSEETITPWNFEEVVDKGASAQSFIERMTNFDKNLPNEKVLPKHSLLYEYFTVYNELTKVKYVTEGMRKPAFLSGEQKKAIVDLLFKTNRKVTVKQLKEDYFKKIECFDSVEISGVEDRFNASLGTYHDLLKIIKDKDFLDNEENEDILEDIVLTLTLFEDREMIEERLKTYAHLFDDKVMKQLKRRRYTGWGRLSRKLINGIRDKQSGKTILDFLKSDGFANRNFMQLIHDDSLTFKEDIQKAQVSGQGDSLHEHIANLAGSPAIKKGILQTVKVVDELVKVMGRHKPENIVIEMARENQTTQKGQKNSRERMKRIEEGIKELGSQILKEHPVENTQLQNEKLYLYYLQNGRDMYVDQELDINRLSDYDVDHIVPQSFLKDDSIDNKVLTRSDKARGKSDNVPSEEVVKKMKNYWRQLLNAKLITQRKFDNLTKAERGGLSELDKAGFIKRQLVETRQITKHVAQILDSRMNTKYDENDKLIREVKVITLKSKLVSDFRKDFQFYKVREINNYHHAHDAYLNAVVGTALIKKYPKLESEFVYGDYKVYDVRKMIAKSEQEIGKATAKYFFYSNIMNFFKTEITLANGEIRKRPLIETNGETGEIVWDKGRDFATVRKVLSMPQVNIVKKTEVQTGGFSKESILPKRNSDKLIARKKDWDPKKYGGFDSPTVAYSVLVVAKVEKGKSKKLKSVKELLGITIMERSSFEKNPIDFLEAKGYKEVKKDLIIKLPKYSLFELENGRKRMLASAGELQKGNELALPSKYVNFLYLASHYEKLKGSPEDNEQKQLFVEQHKHYLDEIIEQISEFSKRVILADANLDKVLSAYNKHRDKPIREQAENIIHLFTLTNLGAPAAFKYFDTTIDRKRYTSTKEVLDATLIHQSITGLYETRIDLSQLGGDGGGGGGSSEAAAKGGTLNIEDEHRLHETSKEPDVSLGSTWLSDFPQAWAETGGMGLAVRQAPLIIPLKATSTPVSIKQYPMSQEARLGIKPHIQRLLDQGILVPCQSPWNTPLLPVKKPGTNDYRPVQDLREVNKRVEDIHPTVPNPYNLLSGLPPSHQWYTVLDLKDAFFCLRLHPTSQPLFAFEWRDPEMGISGQLTWTRLPQGFKNSPTLFNEALHRDLADFRIQHPDLILLQYVDDLLLAATSELDCQQGTRALLQTLGNLGYRASAKKAQICQKQVKYLGYLLKEGQRWLTEARKETVMGQPTPKTPRQLREFLGKAGFCRLFIPGFAEMAAPLYPLTKPGTLFNWGPDQQKAYQEIKQALLTAPALGLPDLTKPFELFVDEKQGYAKGVLTQKLGPWRRPVAYLSKKLDPVAAGWPPCLRMVAAIAVLTKDAGKLTMGQPLVILAPHAVEALVKQPPDRWLSNARMTHYQALLLDTDRVQFGPVVALNPATLLPLPEEGLQHNCLDILAEAHGTRPDLTDQPLPDADHTWYTDGSSLLQEGQRKAGAAVTTETEVIWAKALPAGTSAQRAELIALTQALKMAEGKKLNVYTDSRYAFATAHIHGEIYRRRGWLTSEGKEIKNKDEILALLKALFLPKRLSIIHCPGHQKGHSAEARGNRMADQAARKAAITETPDTSTLLAGKRTADGSEFEKRTADGSEFESPKKKAKVE

SEQ ID NO: 2832 - protein, 2091 aa, synthetic construct
MPAAKRVKLDGGDKKYSIGLDIGTNSVGWAVITDEYKVPSKKFKVLGNTDRHSIKKNLIGALLFDSGETAEATRLKRTARRRYTRRKNRICYLQEIFSNEMAKVDDSFFHRLEESFLVEEDKKHERHPIFGNIVDEVAYHEKYPTIYHLRKKLVDSTDKADLRLIYLALAHMIKFRGHFLIEGDLNPDNSDVDKLFIQLVQTYNQLFEENPINASGVDAKAILSARLSKSRRLENLIAQLPGEKKNGLFGNLIALSLGLTPNFKSNFDLAEDAKLQLSKDTYDDDLDNLLAQIGDQYADLFLAAKNLSDAILLSDILRVNTEITKAPLSASMIKRYDEHHQDLTLLKALVRQQLPEKYKEIFFDQSKNGYAGYIDGGASQEEFYKFIKPILEKMDGTEELLVKLNREDLLRKQRTFDNGSIPHQIHLGELHAILRRQEDFYPFLKDNREKIEKILTFRIPYYVGPLARGNSRFAWMTRKSEETITPWNFEEVVDKGASAQSFIERMTNFDKNLPNEKVLPKHSLLYEYFTVYNELTKVKYVTEGMRKPAFLSGEQKKAIVDLLFKTNRKVTVKQLKEDYFKKIECFDSVEISGVEDRFNASLGTYHDLLKIIKDKDFLDNEENEDILEDIVLTLTLFEDREMIEERLKTYAHLFDDKVMKQLKRRRYTGWGRLSRKLINGIRDKQSGKTILDFLKSDGFANRNFMQLIHDDSLTFKEDIQKAQVSGQGDSLHEHIANLAGSPAIKKGILQTVKVVDELVKVMGRHKPENIVIEMARENQTTQKGQKNSRERMKRIEEGIKELGSQILKEHPVENTQLQNEKLYLYYLQNGRDMYVDQELDINRLSDYDVDHIVPQSFLKDDSIDNKVLTRSDKARGKSDNVPSEEVVKKMKNYWRQLLNAKLITQRKFDNLTKAERGGLSELDKAGFIKRQLVETRQITKHVAQILDSRMNTKYDENDKLIREVKVITLKSKLVSDFRKDFQFYKVREINNYHHAHDAYLNAVVGTALIKKYPKLESEFVYGDYKVYDVRKMIAKSEQEIGKATAKYFFYSNIMNFFKTEITLANGEIRKRPLIETNGETGEIVWDKGRDFATVRKVLSMPQVNIVKKTEVQTGGFSKESILPKRNSDKLIARKKDWDPKKYGGFDSPTVAYSVLVVAKVEKGKSKKLKSVKELLGITIMERSSFEKNPIDFLEAKGYKEVKKDLIIKLPKYSLFELENGRKRMLASAGELQKGNELALPSKYVNFLYLASHYEKLKGSPEDNEQKQLFVEQHKHYLDEIIEQISEFSKRVILADANLDKVLSAYNKHRDKPIREQAENIIHLFTLTNLGAPAAFKYFDTTIDRKRYTSTKEVLDATLIHQSITGLYETRIDLSQLGGDGGGSSGSSGGTLNIEDEHRLHETSKEPDVSLGSTWLSDFPQAWAETGGMGLAVRQAPLIIPLKATSTPVSIKQYPMSQEARLGIKPHIQRLLDQGILVPCQSPWNTPLLPVKKPGTNDYRPVQDLREVNKRVEDIHPTVPNPYNLLSGLPPSHQWYTVLDLKDAFFCLRLHPTSQPLFAFEWRDPEMGISGQLTWTRLPQGFKNSPTLFNEALHRDLADFRIQHPDLILLQYVDDLLLAATSELDCQQGTRALLQTLGNLGYRASAKKAQICQKQVKYLGYLLKEGQRWLTEARKETVMGQPTPKTPRQLREFLGKAGFCRLFIPGFAEMAAPLYPLTKPGTLFNWGPDQQKAYQEIKQALLTAPALGLPDLTKPFELFVDEKQGYAKGVLTQKLGPWRRPVAYLSKKLDPVAAGWPPCLRMVAAIAVLTKDAGKLTMGQPLVILAPHAVEALVKQPPDRWLSNARMTHYQALLLDTDRVQFGPVVALNPATLLPLPEEGLQHNCLDILAEAHGTRPDLTDQPLPDADHTWYTDGSSLLQEGQRKAGAAVTTETEVIWAKALPAGTSAQRAELIALTQALKMAEGKKLNVYTDSRYAFATAHIHGEIYRRRGWLTSEGKEIKNKDEILALLKALFLPKRLSIIHCPGHQKGHSAEARGNRMADQAARKAAITETPDTSTLLAGKRTADGSEFEKRTADGSEFESPKKKAKVE

SEQ ID NO: 2833 - protein, 2094 aa, synthetic construct
MPAAKRVKLDGGDKKYSIGLDIGTNSVGWAVITDEYKVPSKKFKVLGNTDRHSIKKNLIGALLFDSGETAEATRLKRTARRRYTRRKNRICYLQEIFSNEMAKVDDSFFHRLEESFLVEEDKKHERHPIFGNIVDEVAYHEKYPTIYHLRKKLVDSTDKADLRLIYLALAHMIKFRGHFLIEGDLNPDNSDVDKLFIQLVQTYNQLFEENPINASGVDAKAILSARLSKSRRLENLIAQLPGEKKNGLFGNLIALSLGLTPNFKSNFDLAEDAKLQLSKDTYDDDLDNLLAQIGDQYADLFLAAKNLSDAILLSDILRVNTEITKAPLSASMIKRYDEHHQDLTLLKALVRQQLPEKYKEIFFDQSKNGYAGYIDGGASQEEFYKFIKPILEKMDGTEELLVKLNREDLLRKQRTFDNGSIPHQIHLGELHAILRRQEDFYPFLKDNREKIEKILTFRIPYYVGPLARGNSRFAWMTRKSEETITPWNFEEVVDKGASAQSFIERMTNFDKNLPNEKVLPKHSLLYEYFTVYNELTKVKYVTEGMRKPAFLSGEQKKAIVDLLFKTNRKVTVKQLKEDYFKKIECFDSVEISGVEDRFNASLGTYHDLLKIIKDKDFLDNEENEDILEDIVLTLTLFEDREMIEERLKTYAHLFDDKVMKQLKRRRYTGWGRLSRKLINGIRDKQSGKTILDFLKSDGFANRNFMQLIHDDSLTFKEDIQKAQVSGQGDSLHEHIANLAGSPAIKKGILQTVKVVDELVKVMGRHKPENIVIEMARENQTTQKGQKNSRERMKRIEEGIKELGSQILKEHPVENTQLQNEKLYLYYLQNGRDMYVDQELDINRLSDYDVDHIVPQSFLKDDSIDNKVLTRSDKARGKSDNVPSEEVVKKMKNYWRQLLNAKLITQRKFDNLTKAERGGLSELDKAGFIKRQLVETRQITKHVAQILDSRMNTKYDENDKLIREVKVITLKSKLVSDFRKDFQFYKVREINNYHHAHDAYLNAVVGTALIKKYPKLESEFVYGDYKVYDVRKMIAKSEQEIGKATAKYFFYSNIMNFFKTEITLANGEIRKRPLIETNGETGEIVWDKGRDFATVRKVLSMPQVNIVKKTEVQTGGFSKESILPKRNSDKLIARKKDWDPKKYGGFDSPTVAYSVLVVAKVEKGKSKKLKSVKELLGITIMERSSFEKNPIDFLEAKGYKEVKKDLIIKLPKYSLFELENGRKRMLASAGELQKGNELALPSKYVNFLYLASHYEKLKGSPEDNEQKQLFVEQHKHYLDEIIEQISEFSKRVILADANLDKVLSAYNKHRDKPIREQAENIIHLFTLTNLGAPAAFKYFDTTIDRKRYTSTKEVLDATLIHQSITGLYETRIDLSQLGGDGGPAPGGSGGGGGTLNIEDEHRLHETSKEPDVSLGSTWLSDFPQAWAETGGMGLAVRQAPLIIPLKATSTPVSIKQYPMSQEARLGIKPHIQRLLDQGILVPCQSPWNTPLLPVKKPGTNDYRPVQDLREVNKRVEDIHPTVPNPYNLLSGLPPSHQWYTVLDLKDAFFCLRLHPTSQPLFAFEWRDPEMGISGQLTWTRLPQGFKNSPTLFNEALHRDLADFRIQHPDLILLQYVDDLLLAATSELDCQQGTRALLQTLGNLGYRASAKKAQICQKQVKYLGYLLKEGQRWLTEARKETVMGQPTPKTPRQLREFLGKAGFCRLFIPGFAEMAAPLYPLTKPGTLFNWGPDQQKAYQEIKQALLTAPALGLPDLTKPFELFVDEKQGYAKGVLTQKLGPWRRPVAYLSKKLDPVAAGWPPCLRMVAAIAVLTKDAGKLTMGQPLVILAPHAVEALVKQPPDRWLSNARMTHYQALLLDTDRVQFGPVVALNPATLLPLPEEGLQHNCLDILAEAHGTRPDLTDQPLPDADHTWYTDGSSLLQEGQRKAGAAVTTETEVIWAKALPAGTSAQRAELIALTQALKMAEGKKLNVYTDSRYAFATAHIHGEIYRRRGWLTSEGKEIKNKDEILALLKALFLPKRLSIIHCPGHQKGHSAEARGNRMADQAARKAAITETPDTSTLLAGKRTADGSEFEKRTADGSEFESPKKKAKVE

SEQ ID NO: 2834 - protein, 2090 aa, synthetic construct
MPAAKRVKLDGGDKKYSIGLDIGTNSVGWAVITDEYKVPSKKFKVLGNTDRHSIKKNLIGALLFDSGETAEATRLKRTARRRYTRRKNRICYLQEIFSNEMAKVDDSFFHRLEESFLVEEDKKHERHPIFGNIVDEVAYHEKYPTIYHLRKKLVDSTDKADLRLIYLALAHMIKFRGHFLIEGDLNPDNSDVDKLFIQLVQTYNQLFEENPINASGVDAKAILSARLSKSRRLENLIAQLPGEKKNGLFGNLIALSLGLTPNFKSNFDLAEDAKLQLSKDTYDDDLDNLLAQIGDQYADLFLAAKNLSDAILLSDILRVNTEITKAPLSASMIKRYDEHHQDLTLLKALVRQQLPEKYKEIFFDQSKNGYAGYIDGGASQEEFYKFIKPILEKMDGTEELLVKLNREDLLRKQRTFDNGSIPHQIHLGELHAILRRQEDFYPFLKDNREKIEKILTFRIPYYVGPLARGNSRFAWMTRKSEETITPWNFEEVVDKGASAQSFIERMTNFDKNLPNEKVLPKHSLLYEYFTVYNELTKVKYVTEGMRKPAFLSGEQKKAIVDLLFKTNRKVTVKQLKEDYFKKIECFDSVEISGVEDRFNASLGTYHDLLKIIKDKDFLDNEENEDILEDIVLTLTLFEDREMIEERLKTYAHLFDDKVMKQLKRRRYTGWGRLSRKLINGIRDKQSGKTILDFLKSDGFANRNFMQLIHDDSLTFKEDIQKAQVSGQGDSLHEHIANLAGSPAIKKGILQTVKVVDELVKVMGRHKPENIVIEMARENQTTQKGQKNSRERMKRIEEGIKELGSQILKEHPVENTQLQNEKLYLYYLQNGRDMYVDQELDINRLSDYDVDHIVPQSFLKDDSIDNKVLTRSDKARGKSDNVPSEEVVKKMKNYWRQLLNAKLITQRKFDNLTKAERGGLSELDKAGFIKRQLVETRQITKHVAQILDSRMNTKYDENDKLIREVKVITLKSKLVSDFRKDFQFYKVREINNYHHAHDAYLNAVVGTALIKKYPKLESEFVYGDYKVYDVRKMIAKSEQEIGKATAKYFFYSNIMNFFKTEITLANGEIRKRPLIETNGETGEIVWDKGRDFATVRKVLSMPQVNIVKKTEVQTGGFSKESILPKRNSDKLIARKKDWDPKKYGGFDSPTVAYSVLVVAKVEKGKSKKLKSVKELLGITIMERSSFEKNPIDFLEAKGYKEVKKDLIIKLPKYSLFELENGRKRMLASAGELQKGNELALPSKYVNFLYLASHYEKLKGSPEDNEQKQLFVEQHKHYLDEIIEQISEFSKRVILADANLDKVLSAYNKHRDKPIREQAENIIHLFTLTNLGAPAAFKYFDTTIDRKRYTSTKEVLDATLIHQSITGLYETRIDLSQLGGDGGGGGGGGGTLNIEDEHRLHETSKEPDVSLGSTWLSDFPQAWAETGGMGLAVRQAPLIIPLKATSTPVSIKQYPMSQEARLGIKPHIQRLLDQGILVPCQSPWNTPLLPVKKPGTNDYRPVQDLREVNKRVEDIHPTVPNPYNLLSGLPPSHQWYTVLDLKDAFFCLRLHPTSQPLFAFEWRDPEMGISGQLTWTRLPQGFKNSPTLFNEALHRDLADFRIQHPDLILLQYVDDLLLAATSELDCQQGTRALLQTLGNLGYRASAKKAQICQKQVKYLGYLLKEGQRWLTEARKETVMGQPTPKTPRQLREFLGKAGFCRLFIPGFAEMAAPLYPLTKPGTLFNWGPDQQKAYQEIKQALLTAPALGLPDLTKPFELFVDEKQGYAKGVLTQKLGPWRRPVAYLSKKLDPVAAGWPPCLRMVAAIAVLTKDAGKLTMGQPLVILAPHAVEALVKQPPDRWLSNARMTHYQALLLDTDRVQFGPVVALNPATLLPLPEEGLQHNCLDILAEAHGTRPDLTDQPLPDADHTWYTDGSSLLQEGQRKAGAAVTTETEVIWAKALPAGTSAQRAELIALTQALKMAEGKKLNVYTDSRYAFATAHIHGEIYRRRGWLTSEGKEIKNKDEILALLKALFLPKRLSIIHCPGHQKGHSAEARGNRMADQAARKAAITETPDTSTLLAGKRTADGSEFEKRTADGSEFESPKKKAKVE

SEQ ID NO: 2835 - protein, 2094 aa, synthetic construct
MPAAKRVKLDGGDKKYSIGLDIGTNSVGWAVITDEYKVPSKKFKVLGNTDRHSIKKNLIGALLFDSGETAEATRLKRTARRRYTRRKNRICYLQEIFSNEMAKVDDSFFHRLEESFLVEEDKKHERHPIFGNIVDEVAYHEKYPTIYHLRKKLVDSTDKADLRLIYLALAHMIKFRGHFLIEGDLNPDNSDVDKLFIQLVQTYNQLFEENPINASGVDAKAILSARLSKSRRLENLIAQLPGEKKNGLFGNLIALSLGLTPNFKSNFDLAEDAKLQLSKDTYDDDLDNLLAQIGDQYADLFLAAKNLSDAILLSDILRVNTEITKAPLSASMIKRYDEHHQDLTLLKALVRQQLPEKYKEIFFDQSKNGYAGYIDGGASQEEFYKFIKPILEKMDGTEELLVKLNREDLLRKQRTFDNGSIPHQIHLGELHAILRRQEDFYPFLKDNREKIEKILTFRIPYYVGPLARGNSRFAWMTRKSEETITPWNFEEVVDKGASAQSFIERMTNFDKNLPNEKVLPKHSLLYEYFTVYNELTKVKYVTEGMRKPAFLSGEQKKAIVDLLFKTNRKVTVKQLKEDYFKKIECFDSVEISGVEDRFNASLGTYHDLLKIIKDKDFLDNEENEDILEDIVLTLTLFEDREMIEERLKTYAHLFDDKVMKQLKRRRYTGWGRLSRKLINGIRDKQSGKTILDFLKSDGFANRNFMQLIHDDSLTFKEDIQKAQVSGQGDSLHEHIANLAGSPAIKKGILQTVKVVDELVKVMGRHKPENIVIEMARENQTTQKGQKNSRERMKRIEEGIKELGSQILKEHPVENTQLQNEKLYLYYLQNGRDMYVDQELDINRLSDYDVDHIVPQSFLKDDSIDNKVLTRSDKARGKSDNVPSEEVVKKMKNYWRQLLNAKLITQRKFDNLTKAERGGLSELDKAGFIKRQLVETRQITKHVAQILDSRMNTKYDENDKLIREVKVITLKSKLVSDFRKDFQFYKVREINNYHHAHDAYLNAVVGTALIKKYPKLESEFVYGDYKVYDVRKMIAKSEQEIGKATAKYFFYSNIMNFFKTEITLANGEIRKRPLIETNGETGEIVWDKGRDFATVRKVLSMPQVNIVKKTEVQTGGFSKESILPKRNSDKLIARKKDWDPKKYGGFDSPTVAYSVLVVAKVEKGKSKKLKSVKELLGITIMERSSFEKNPIDFLEAKGYKEVKKDLIIKLPKYSLFELENGRKRMLASAGELQKGNELALPSKYVNFLYLASHYEKLKGSPEDNEQKQLFVEQHKHYLDEIIEQISEFSKRVILADANLDKVLSAYNKHRDKPIREQAENIIHLFTLTNLGAPAAFKYFDTTIDRKRYTSTKEVLDATLIHQSITGLYETRIDLSQLGGDGGGSSPAPGGGGGTLNIEDEHRLHETSKEPDVSLGSTWLSDFPQAWAETGGMGLAVRQAPLIIPLKATSTPVSIKQYPMSQEARLGIKPHIQRLLDQGILVPCQSPWNTPLLPVKKPGTNDYRPVQDLREVNKRVEDIHPTVPNPYNLLSGLPPSHQWYTVLDLKDAFFCLRLHPTSQPLFAFEWRDPEMGISGQLTWTRLPQGFKNSPTLFNEALHRDLADFRIQHPDLILLQYVDDLLLAATSELDCQQGTRALLQTLGNLGYRASAKKAQICQKQVKYLGYLLKEGQRWLTEARKETVMGQPTPKTPRQLREFLGKAGFCRLFIPGFAEMAAPLYPLTKPGTLFNWGPDQQKAYQEIKQALLTAPALGLPDLTKPFELFVDEKQGYAKGVLTQKLGPWRRPVAYLSKKLDPVAAGWPPCLRMVAAIAVLTKDAGKLTMGQPLVILAPHAVEALVKQPPDRWLSNARMTHYQALLLDTDRVQFGPVVALNPATLLPLPEEGLQHNCLDILAEAHGTRPDLTDQPLPDADHTWYTDGSSLLQEGQRKAGAAVTTETEVIWAKALPAGTSAQRAELIALTQALKMAEGKKLNVYTDSRYAFATAHIHGEIYRRRGWLTSEGKEIKNKDEILALLKALFLPKRLSIIHCPGHQKGHSAEARGNRMADQAARKAAITETPDTSTLLAGKRTADGSEFEKRTADGSEFESPKKKAKVE

SEQ ID NO: 2836 - protein, 2100 aa, synthetic construct
MPAAKRVKLDGGDKKYSIGLDIGTNSVGWAVITDEYKVPSKKFKVLGNTDRHSIKKNLIGALLFDSGETAEATRLKRTARRRYTRRKNRICYLQEIFSNEMAKVDDSFFHRLEESFLVEEDKKHERHPIFGNIVDEVAYHEKYPTIYHLRKKLVDSTDKADLRLIYLALAHMIKFRGHFLIEGDLNPDNSDVDKLFIQLVQTYNQLFEENPINASGVDAKAILSARLSKSRRLENLIAQLPGEKKNGLFGNLIALSLGLTPNFKSNFDLAEDAKLQLSKDTYDDDLDNLLAQIGDQYADLFLAAKNLSDAILLSDILRVNTEITKAPLSASMIKRYDEHHQDLTLLKALVRQQLPEKYKEIFFDQSKNGYAGYIDGGASQEEFYKFIKPILEKMDGTEELLVKLNREDLLRKQRTFDNGSIPHQIHLGELHAILRRQEDFYPFLKDNREKIEKILTFRIPYYVGPLARGNSRFAWMTRKSEETITPWNFEEVVDKGASAQSFIERMTNFDKNLPNEKVLPKHSLLYEYFTVYNELTKVKYVTEGMRKPAFLSGEQKKAIVDLLFKTNRKVTVKQLKEDYFKKIECFDSVEISGVEDRFNASLGTYHDLLKIIKDKDFLDNEENEDILEDIVLTLTLFEDREMIEERLKTYAHLFDDKVMKQLKRRRYTGWGRLSRKLINGIRDKQSGKTILDFLKSDGFANRNFMQLIHDDSLTFKEDIQKAQVSGQGDSLHEHIANLAGSPAIKKGILQTVKVVDELVKVMGRHKPENIVIEMARENQTTQKGQKNSRERMKRIEEGIKELGSQILKEHPVENTQLQNEKLYLYYLQNGRDMYVDQELDINRLSDYDVDHIVPQSFLKDDSIDNKVLTRSDKARGKSDNVPSEEVVKKMKNYWRQLLNAKLITQRKFDNLTKAERGGLSELDKAGFIKRQLVETRQITKHVAQILDSRMNTKYDENDKLIREVKVITLKSKLVSDFRKDFQFYKVREINNYHHAHDAYLNAVVGTALIKKYPKLESEFVYGDYKVYDVRKMIAKSEQEIGKATAKYFFYSNIMNFFKTEITLANGEIRKRPLIETNGETGEIVWDKGRDFATVRKVLSMPQVNIVKKTEVQTGGFSKESILPKRNSDKLIARKKDWDPKKYGGFDSPTVAYSVLVVAKVEKGKSKKLKSVKELLGITIMERSSFEKNPIDFLEAKGYKEVKKDLIIKLPKYSLFELENGRKRMLASAGELQKGNELALPSKYVNFLYLASHYEKLKGSPEDNEQKQLFVEQHKHYLDEIIEQISEFSKRVILADANLDKVLSAYNKHRDKPIREQAENIIHLFTLTNLGAPAAFKYFDTTIDRKRYTSTKEVLDATLIHQSITGLYETRIDLSQLGGDGGGGGGSEAAAKGGGGSGGTLNIEDEHRLHETSKEPDVSLGSTWLSDFPQAWAETGGMGLAVRQAPLIIPLKATSTPVSIKQYPMSQEARLGIKPHIQRLLDQGILVPCQSPWNTPLLPVKKPGTNDYRPVQDLREVNKRVEDIHPTVPNPYNLLSGLPPSHQWYTVLDLKDAFFCLRLHPTSQPLFAFEWRDPEMGISGQLTWTRLPQGFKNSPTLFNEALHRDLADFRIQHPDLILLQYVDDLLLAATSELDCQQGTRALLQTLGNLGYRASAKKAQICQKQVKYLGYLLKEGQRWLTEARKETVMGQPTPKTPRQLREFLGKAGFCRLFIPGFAEMAAPLYPLTKPGTLFNWGPDQQKAYQEIKQALLTAPALGLPDLTKPFELFVDEKQGYAKGVLTQKLGPWRRPVAYLSKKLDPVAAGWPPCLRMVAAIAVLTKDAGKLTMGQPLVILAPHAVEALVKQPPDRWLSNARMTHYQALLLDTDRVQFGPVVALNPATLLPLPEEGLQHNCLDILAEAHGTRPDLTDQPLPDADHTWYTDGSSLLQEGQRKAGAAVTTETEVIWAKALPAGTSAQRAELIALTQALKMAEGKKLNVYTDSRYAFATAHIHGEIYRRRGWLTSEGKEIKNKDEILALLKALFLPKRLSIIHCPGHQKGHSAEARGNRMADQAARKAAITETPDTSTLLAGKRTADGSEFEKRTADGSEFESPKKKAKVE

SEQ ID NO: 2837 - protein, 2091 aa, synthetic construct
MPAAKRVKLDGGDKKYSIGLDIGTNSVGWAVITDEYKVPSKKFKVLGNTDRHSIKKNLIGALLFDSGETAEATRLKRTARRRYTRRKNRICYLQEIFSNEMAKVDDSFFHRLEESFLVEEDKKHERHPIFGNIVDEVAYHEKYPTIYHLRKKLVDSTDKADLRLIYLALAHMIKFRGHFLIEGDLNPDNSDVDKLFIQLVQTYNQLFEENPINASGVDAKAILSARLSKSRRLENLIAQLPGEKKNGLFGNLIALSLGLTPNFKSNFDLAEDAKLQLSKDTYDDDLDNLLAQIGDQYADLFLAAKNLSDAILLSDILRVNTEITKAPLSASMIKRYDEHHQDLTLLKALVRQQLPEKYKEIFFDQSKNGYAGYIDGGASQEEFYKFIKPILEKMDGTEELLVKLNREDLLRKQRTFDNGSIPHQIHLGELHAILRRQEDFYPFLKDNREKIEKILTFRIPYYVGPLARGNSRFAWMTRKSEETITPWNFEEVVDKGASAQSFIERMTNFDKNLPNEKVLPKHSLLYEYFTVYNELTKVKYVTEGMRKPAFLSGEQKKAIVDLLFKTNRKVTVKQLKEDYFKKIECFDSVEISGVEDRFNASLGTYHDLLKIIKDKDFLDNEENEDILEDIVLTLTLFEDREMIEERLKTYAHLFDDKVMKQLKRRRYTGWGRLSRKLINGIRDKQSGKTILDFLKSDGFANRNFMQLIHDDSLTFKEDIQKAQVSGQGDSLHEHIANLAGSPAIKKGILQTVKVVDELVKVMGRHKPENIVIEMARENQTTQKGQKNSRERMKRIEEGIKELGSQILKEHPVENTQLQNEKLYLYYLQNGRDMYVDQELDINRLSDYDVDHIVPQSFLKDDSIDNKVLTRSDKARGKSDNVPSEEVVKKMKNYWRQLLNAKLITQRKFDNLTKAERGGLSELDKAGFIKRQLVETRQITKHVAQILDSRMNTKYDENDKLIREVKVITLKSKLVSDFRKDFQFYKVREINNYHHAHDAYLNAVVGTALIKKYPKLESEFVYGDYKVYDVRKMIAKSEQEIGKATAKYFFYSNIMNFFKTEITLANGEIRKRPLIETNGETGEIVWDKGRDFATVRKVLSMPQVNIVKKTEVQTGGFSKESILPKRNSDKLIARKKDWDPKKYGGFDSPTVAYSVLVVAKVEKGKSKKLKSVKELLGITIMERSSFEKNPIDFLEAKGYKEVKKDLIIKLPKYSLFELENGRKRMLASAGELQKGNELALPSKYVNFLYLASHYEKLKGSPEDNEQKQLFVEQHKHYLDEIIEQISEFSKRVILADANLDKVLSAYNKHRDKPIREQAENIIHLFTLTNLGAPAAFKYFDTTIDRKRYTSTKEVLDATLIHQSITGLYETRIDLSQLGGDGGPAPGGGGGTLNIEDEHRLHETSKEPDVSLGSTWLSDFPQAWAETGGMGLAVRQAPLIIPLKATSTPVSIKQYPMSQEARLGIKPHIQRLLDQGILVPCQSPWNTPLLPVKKPGTNDYRPVQDLREVNKRVEDIHPTVPNPYNLLSGLPPSHQWYTVLDLKDAFFCLRLHPTSQPLFAFEWRDPEMGISGQLTWTRLPQGFKNSPTLFNEALHRDLADFRIQHPDLILLQYVDDLLLAATSELDCQQGTRALLQTLGNLGYRASAKKAQICQKQVKYLGYLLKEGQRWLTEARKETVMGQPTPKTPRQLREFLGKAGFCRLFIPGFAEMAAPLYPLTKPGTLFNWGPDQQKAYQEIKQALLTAPALGLPDLTKPFELFVDEKQGYAKGVLTQKLGPWRRPVAYLSKKLDPVAAGWPPCLRMVAAIAVLTKDAGKLTMGQPLVILAPHAVEALVKQPPDRWLSNARMTHYQALLLDTDRVQFGPVVALNPATLLPLPEEGLQHNCLDILAEAHGTRPDLTDQPLPDADHTWYTDGSSLLQEGQRKAGAAVTTETEVIWAKALPAGTSAQRAELIALTQALKMAEGKKLNVYTDSRYAFATAHIHGEIYRRRGWLTSEGKEIKNKDEILALLKALFLPKRLSIIHCPGHQKGHSAEARGNRMADQAARKAAITETPDTSTLLAGKRTADGSEFEKRTADGSEFESPKKKAKVE

SEQ ID NO: 2838 - protein, 2096 aa, synthetic construct
MPAAKRVKLDGGDKKYSIGLDIGTNSVGWAVITDEYKVPSKKFKVLGNTDRHSIKKNLIGALLFDSGETAEATRLKRTARRRYTRRKNRICYLQEIFSNEMAKVDDSFFHRLEESFLVEEDKKHERHPIFGNIVDEVAYHEKYPTIYHLRKKLVDSTDKADLRLIYLALAHMIKFRGHFLIEGDLNPDNSDVDKLFIQLVQTYNQLFEENPINASGVDAKAILSARLSKSRRLENLIAQLPGEKKNGLFGNLIALSLGLTPNFKSNFDLAEDAKLQLSKDTYDDDLDNLLAQIGDQYADLFLAAKNLSDAILLSDILRVNTEITKAPLSASMIKRYDEHHQDLTLLKALVRQQLPEKYKEIFFDQSKNGYAGYIDGGASQEEFYKFIKPILEKMDGTEELLVKLNREDLLRKQRTFDNGSIPHQIHLGELHAILRRQEDFYPFLKDNREKIEKILTFRIPYYVGPLARGNSRFAWMTRKSEETITPWNFEEVVDKGASAQSFIERMTNFDKNLPNEKVLPKHSLLYEYFTVYNELTKVKYVTEGMRKPAFLSGEQKKAIVDLLFKTNRKVTVKQLKEDYFKKIECFDSVEISGVEDRFNASLGTYHDLLKIIKDKDFLDNEENEDILEDIVLTLTLFEDREMIEERLKTYAHLFDDKVMKQLKRRRYTGWGRLSRKLINGIRDKQSGKTILDFLKSDGFANRNFMQLIHDDSLTFKEDIQKAQVSGQGDSLHEHIANLAGSPAIKKGILQTVKVVDELVKVMGRHKPENIVIEMARENQTTQKGQKNSRERMKRIEEGIKELGSQILKEHPVENTQLQNEKLYLYYLQNGRDMYVDQELDINRLSDYDVDHIVPQSFLKDDSIDNKVLTRSDKARGKSDNVPSEEVVKKMKNYWRQLLNAKLITQRKFDNLTKAERGGLSELDKAGFIKRQLVETRQITKHVAQILDSRMNTKYDENDKLIREVKVITLKSKLVSDFRKDFQFYKVREINNYHHAHDAYLNAVVGTALIKKYPKLESEFVYGDYKVYDVRKMIAKSEQEIGKATAKYFFYSNIMNFFKTEITLANGEIRKRPLIETNGETGEIVWDKGRDFATVRKVLSMPQVNIVKKTEVQTGGFSKESILPKRNSDKLIARKKDWDPKKYGGFDSPTVAYSVLVVAKVEKGKSKKLKSVKELLGITIMERSSFEKNPIDFLEAKGYKEVKKDLIIKLPKYSLFELENGRKRMLASAGELQKGNELALPSKYVNFLYLASHYEKLKGSPEDNEQKQLFVEQHKHYLDEIIEQISEFSKRVILADANLDKVLSAYNKHRDKPIREQAENIIHLFTLTNLGAPAAFKYFDTTIDRKRYTSTKEVLDATLIHQSITGLYETRIDLSQLGGDGGEAAAKPAPGGGGGTLNIEDEHRLHETSKEPDVSLGSTWLSDFPQAWAETGGMGLAVRQAPLIIPLKATSTPVSIKQYPMSQEARLGIKPHIQRLLDQGILVPCQSPWNTPLLPVKKPGTNDYRPVQDLREVNKRVEDIHPTVPNPYNLLSGLPPSHQWYTVLDLKDAFFCLRLHPTSQPLFAFEWRDPEMGISGQLTWTRLPQGFKNSPTLFNEALHRDLADFRIQHPDLILLQYVDDLLLAATSELDCQQGTRALLQTLGNLGYRASAKKAQICQKQVKYLGYLLKEGQRWLTEARKETVMGQPTPKTPRQLREFLGKAGFCRLFIPGFAEMAAPLYPLTKPGTLFNWGPDQQKAYQEIKQALLTAPALGLPDLTKPFELFVDEKQGYAKGVLTQKLGPWRRPVAYLSKKLDPVAAGWPPCLRMVAAIAVLTKDAGKLTMGQPLVILAPHAVEALVKQPPDRWLSNARMTHYQALLLDTDRVQFGPVVALNPATLLPLPEEGLQHNCLDILAEAHGTRPDLTDQPLPDADHTWYTDGSSLLQEGQRKAGAAVTTETEVIWAKALPAGTSAQRAELIALTQALKMAEGKKLNVYTDSRYAFATAHIHGEIYRRRGWLTSEGKEIKNKDEILALLKALFLPKRLSIIHCPGHQKGHSAEARGNRMADQAARKAAITETPDTSTLLAGKRTADGSEFEKRTADGSEFESPKKKAKVE

SEQ ID NO: 2839 - protein, 2096 aa, synthetic construct
MPAAKRVKLDGGDKKYSIGLDIGTNSVGWAVITDEYKVPSKKFKVLGNTDRHSIKKNLIGALLFDSGETAEATRLKRTARRRYTRRKNRICYLQEIFSNEMAKVDDSFFHRLEESFLVEEDKKHERHPIFGNIVDEVAYHEKYPTIYHLRKKLVDSTDKADLRLIYLALAHMIKFRGHFLIEGDLNPDNSDVDKLFIQLVQTYNQLFEENPINASGVDAKAILSARLSKSRRLENLIAQLPGEKKNGLFGNLIALSLGLTPNFKSNFDLAEDAKLQLSKDTYDDDLDNLLAQIGDQYADLFLAAKNLSDAILLSDILRVNTEITKAPLSASMIKRYDEHHQDLTLLKALVRQQLPEKYKEIFFDQSKNGYAGYIDGGASQEEFYKFIKPILEKMDGTEELLVKLNREDLLRKQRTFDNGSIPHQIHLGELHAILRRQEDFYPFLKDNREKIEKILTFRIPYYVGPLARGNSRFAWMTRKSEETITPWNFEEVVDKGASAQSFIERMTNFDKNLPNEKVLPKHSLLYEYFTVYNELTKVKYVTEGMRKPAFLSGEQKKAIVDLLFKTNRKVTVKQLKEDYFKKIECFDSVEISGVEDRFNASLGTYHDLLKIIKDKDFLDNEENEDILEDIVLTLTLFEDREMIEERLKTYAHLFDDKVMKQLKRRRYTGWGRLSRKLINGIRDKQSGKTILDFLKSDGFANRNFMQLIHDDSLTFKEDIQKAQVSGQGDSLHEHIANLAGSPAIKKGILQTVKVVDELVKVMGRHKPENIVIEMARENQTTQKGQKNSRERMKRIEEGIKELGSQILKEHPVENTQLQNEKLYLYYLQNGRDMYVDQELDINRLSDYDVDHIVPQSFLKDDSIDNKVLTRSDKARGKSDNVPSEEVVKKMKNYWRQLLNAKLITQRKFDNLTKAERGGLSELDKAGFIKRQLVETRQITKHVAQILDSRMNTKYDENDKLIREVKVITLKSKLVSDFRKDFQFYKVREINNYHHAHDAYLNAVVGTALIKKYPKLESEFVYGDYKVYDVRKMIAKSEQEIGKATAKYFFYSNIMNFFKTEITLANGEIRKRPLIETNGETGEIVWDKGRDFATVRKVLSMPQVNIVKKTEVQTGGFSKESILPKRNSDKLIARKKDWDPKKYGGFDSPTVAYSVLVVAKVEKGKSKKLKSVKELLGITIMERSSFEKNPIDFLEAKGYKEVKKDLIIKLPKYSLFELENGRKRMLASAGELQKGNELALPSKYVNFLYLASHYEKLKGSPEDNEQKQLFVEQHKHYLDEIIEQISEFSKRVILADANLDKVLSAYNKHRDKPIREQAENIIHLFTLTNLGAPAAFKYFDTTIDRKRYTSTKEVLDATLIHQSITGLYETRIDLSQLGGDGGGSSPAPEAAAKGGTLNIEDEHRLHETSKEPDVSLGSTWLSDFPQAWAETGGMGLAVRQAPLIIPLKATSTPVSIKQYPMSQEARLGIKPHIQRLLDQGILVPCQSPWNTPLLPVKKPGTNDYRPVQDLREVNKRVEDIHPTVPNPYNLLSGLPPSHQWYTVLDLKDAFFCLRLHPTSQPLFAFEWRDPEMGISGQLTWTRLPQGFKNSPTLFNEALHRDLADFRIQHPDLILLQYVDDLLLAATSELDCQQGTRALLQTLGNLGYRASAKKAQICQKQVKYLGYLLKEGQRWLTEARKETVMGQPTPKTPRQLREFLGKAGFCRLFIPGFAEMAAPLYPLTKPGTLFNWGPDQQKAYQEIKQALLTAPALGLPDLTKPFELFVDEKQGYAKGVLTQKLGPWRRPVAYLSKKLDPVAAGWPPCLRMVAAIAVLTKDAGKLTMGQPLVILAPHAVEALVKQPPDRWLSNARMTHYQALLLDTDRVQFGPVVALNPATLLPLPEEGLQHNCLDILAEAHGTRPDLTDQPLPDADHTWYTDGSSLLQEGQRKAGAAVTTETEVIWAKALPAGTSAQRAELIALTQALKMAEGKKLNVYTDSRYAFATAHIHGEIYRRRGWLTSEGKEIKNKDEILALLKALFLPKRLSIIHCPGHQKGHSAEARGNRMADQAARKAAITETPDTSTLLAGKRTADGSEFEKRTADGSEFESPKKKAKVE

SEQ ID NO: 2840 - protein, 2094 aa, synthetic construct
MPAAKRVKLDGGDKKYSIGLDIGTNSVGWAVITDEYKVPSKKFKVLGNTDRHSIKKNLIGALLFDSGETAEATRLKRTARRRYTRRKNRICYLQEIFSNEMAKVDDSFFHRLEESFLVEEDKKHERHPIFGNIVDEVAYHEKYPTIYHLRKKLVDSTDKADLRLIYLALAHMIKFRGHFLIEGDLNPDNSDVDKLFIQLVQTYNQLFEENPINASGVDAKAILSARLSKSRRLENLIAQLPGEKKNGLFGNLIALSLGLTPNFKSNFDLAEDAKLQLSKDTYDDDLDNLLAQIGDQYADLFLAAKNLSDAILLSDILRVNTEITKAPLSASMIKRYDEHHQDLTLLKALVRQQLPEKYKEIFFDQSKNGYAGYIDGGASQEEFYKFIKPILEKMDGTEELLVKLNREDLLRKQRTFDNGSIPHQIHLGELHAILRRQEDFYPFLKDNREKIEKILTFRIPYYVGPLARGNSRFAWMTRKSEETITPWNFEEVVDKGASAQSFIERMTNFDKNLPNEKVLPKHSLLYEYFTVYNELTKVKYVTEGMRKPAFLSGEQKKAIVDLLFKTNRKVTVKQLKEDYFKKIECFDSVEISGVEDRFNASLGTYHDLLKIIKDKDFLDNEENEDILEDIVLTLTLFEDREMIEERLKTYAHLFDDKVMKQLKRRRYTGWGRLSRKLINGIRDKQSGKTILDFLKSDGFANRNFMQLIHDDSLTFKEDIQKAQVSGQGDSLHEHIANLAGSPAIKKGILQTVKVVDELVKVMGRHKPENIVIEMARENQTTQKGQKNSRERMKRIEEGIKELGSQILKEHPVENTQLQNEKLYLYYLQNGRDMYVDQELDINRLSDYDVDHIVPQSFLKDDSIDNKVLTRSDKARGKSDNVPSEEVVKKMKNYWRQLLNAKLITQRKFDNLTKAERGGLSELDKAGFIKRQLVETRQITKHVAQILDSRMNTKYDENDKLIREVKVITLKSKLVSDFRKDFQFYKVREINNYHHAHDAYLNAVVGTALIKKYPKLESEFVYGDYKVYDVRKMIAKSEQEIGKATAKYFFYSNIMNFFKTEITLANGEIRKRPLIETNGETGEIVWDKGRDFATVRKVLSMPQVNIVKKTEVQTGGFSKESILPKRNSDKLIARKKDWDPKKYGGFDSPTVAYSVLVVAKVEKGKSKKLKSVKELLGITIMERSSFEKNPIDFLEAKGYKEVKKDLIIKLPKYSLFELENGRKRMLASAGELQKGNELALPSKYVNFLYLASHYEKLKGSPEDNEQKQLFVEQHKHYLDEIIEQISEFSKRVILADANLDKVLSAYNKHRDKPIREQAENIIHLFTLTNLGAPAAFKYFDTTIDRKRYTSTKEVLDATLIHQSITGLYETRIDLSQLGGDGGGGGGGSPAPGGTLNIEDEHRLHETSKEPDVSLGSTWLSDFPQAWAETGGMGLAVRQAPLIIPLKATSTPVSIKQYPMSQEARLGIKPHIQRLLDQGILVPCQSPWNTPLLPVKKPGTNDYRPVQDLREVNKRVEDIHPTVPNPYNLLSGLPPSHQWYTVLDLKDAFFCLRLHPTSQPLFAFEWRDPEMGISGQLTWTRLPQGFKNSPTLFNEALHRDLADFRIQHPDLILLQYVDDLLLAATSELDCQQGTRALLQTLGNLGYRASAKKAQICQKQVKYLGYLLKEGQRWLTEARKETVMGQPTPKTPRQLREFLGKAGFCRLFIPGFAEMAAPLYPLTKPGTLFNWGPDQQKAYQEIKQALLTAPALGLPDLTKPFELFVDEKQGYAKGVLTQKLGPWRRPVAYLSKKLDPVAAGWPPCLRMVAAIAVLTKDAGKLTMGQPLVILAPHAVEALVKQPPDRWLSNARMTHYQALLLDTDRVQFGPVVALNPATLLPLPEEGLQHNCLDILAEAHGTRPDLTDQPLPDADHTWYTDGSSLLQEGQRKAGAAVTTETEVIWAKALPAGTSAQRAELIALTQALKMAEGKKLNVYTDSRYAFATAHIHGEIYRRRGWLTSEGKEIKNKDEILALLKALFLPKRLSIIHCPGHQKGHSAEARGNRMADQAARKAAITETPDTSTLLAGKRTADGSEFEKRTADGSEFESPKKKAKVE

SEQ ID NO: 2841 - protein, 2094 aa, synthetic construct
MPAAKRVKLDGGDKKYSIGLDIGTNSVGWAVITDEYKVPSKKFKVLGNTDRHSIKKNLIGALLFDSGETAEATRLKRTARRRYTRRKNRICYLQEIFSNEMAKVDDSFFHRLEESFLVEEDKKHERHPIFGNIVDEVAYHEKYPTIYHLRKKLVDSTDKADLRLIYLALAHMIKFRGHFLIEGDLNPDNSDVDKLFIQLVQTYNQLFEENPINASGVDAKAILSARLSKSRRLENLIAQLPGEKKNGLFGNLIALSLGLTPNFKSNFDLAEDAKLQLSKDTYDDDLDNLLAQIGDQYADLFLAAKNLSDAILLSDILRVNTEITKAPLSASMIKRYDEHHQDLTLLKALVRQQLPEKYKEIFFDQSKNGYAGYIDGGASQEEFYKFIKPILEKMDGTEELLVKLNREDLLRKQRTFDNGSIPHQIHLGELHAILRRQEDFYPFLKDNREKIEKILTFRIPYYVGPLARGNSRFAWMTRKSEETITPWNFEEVVDKGASAQSFIERMTNFDKNLPNEKVLPKHSLLYEYFTVYNELTKVKYVTEGMRKPAFLSGEQKKAIVDLLFKTNRKVTVKQLKEDYFKKIECFDSVEISGVEDRFNASLGTYHDLLKIIKDKDFLDNEENEDILEDIVLTLTLFEDREMIEERLKTYAHLFDDKVMKQLKRRRYTGWGRLSRKLINGIRDKQSGKTILDFLKSDGFANRNFMQLIHDDSLTFKEDIQKAQVSGQGDSLHEHIANLAGSPAIKKGILQTVKVVDELVKVMGRHKPENIVIEMARENQTTQKGQKNSRERMKRIEEGIKELGSQILKEHPVENTQLQNEKLYLYYLQNGRDMYVDQELDINRLSDYDVDHIVPQSFLKDDSIDNKVLTRSDKARGKSDNVPSEEVVKKMKNYWRQLLNAKLITQRKFDNLTKAERGGLSELDKAGFIKRQLVETRQITKHVAQILDSRMNTKYDENDKLIREVKVITLKSKLVSDFRKDFQFYKVREINNYHHAHDAYLNAVVGTALIKKYPKLESEFVYGDYKVYDVRKMIAKSEQEIGKATAKYFFYSNIMNFFKTEITLANGEIRKRPLIETNGETGEIVWDKGRDFATVRKVLSMPQVNIVKKTEVQTGGFSKESILPKRNSDKLIARKKDWDPKKYGGFDSPTVAYSVLVVAKVEKGKSKKLKSVKELLGITIMERSSFEKNPIDFLEAKGYKEVKKDLIIKLPKYSLFELENGRKRMLASAGELQKGNELALPSKYVNFLYLASHYEKLKGSPEDNEQKQLFVEQHKHYLDEIIEQISEFSKRVILADANLDKVLSAYNKHRDKPIREQAENIIHLFTLTNLGAPAAFKYFDTTIDRKRYTSTKEVLDATLIHQSITGLYETRIDLSQLGGDGGGGGPAPGSSGGTLNIEDEHRLHETSKEPDVSLGSTWLSDFPQAWAETGGMGLAVRQAPLIIPLKATSTPVSIKQYPMSQEARLGIKPHIQRLLDQGILVPCQSPWNTPLLPVKKPGTNDYRPVQDLREVNKRVEDIHPTVPNPYNLLSGLPPSHQWYTVLDLKDAFFCLRLHPTSQPLFAFEWRDPEMGISGQLTWTRLPQGFKNSPTLFNEALHRDLADFRIQHPDLILLQYVDDLLLAATSELDCQQGTRALLQTLGNLGYRASAKKAQICQKQVKYLGYLLKEGQRWLTEARKETVMGQPTPKTPRQLREFLGKAGFCRLFIPGFAEMAAPLYPLTKPGTLFNWGPDQQKAYQEIKQALLTAPALGLPDLTKPFELFVDEKQGYAKGVLTQKLGPWRRPVAYLSKKLDPVAAGWPPCLRMVAAIAVLTKDAGKLTMGQPLVILAPHAVEALVKQPPDRWLSNARMTHYQALLLDTDRVQFGPVVALNPATLLPLPEEGLQHNCLDILAEAHGTRPDLTDQPLPDADHTWYTDGSSLLQEGQRKAGAAVTTETEVIWAKALPAGTSAQRAELIALTQALKMAEGKKLNVYTDSRYAFATAHIHGEIYRRRGWLTSEGKEIKNKDEILALLKALFLPKRLSIIHCPGHQKGHSAEARGNRMADQAARKAAITETPDTSTLLAGKRTADGSEFEKRTADGSEFESPKKKAKVE

SEQ ID NO: 2842 - protein, 2096 aa, synthetic construct
MPAAKRVKLDGGDKKYSIGLDIGTNSVGWAVITDEYKVPSKKFKVLGNTDRHSIKKNLIGALLFDSGETAEATRLKRTARRRYTRRKNRICYLQEIFSNEMAKVDDSFFHRLEESFLVEEDKKHERHPIFGNIVDEVAYHEKYPTIYHLRKKLVDSTDKADLRLIYLALAHMIKFRGHFLIEGDLNPDNSDVDKLFIQLVQTYNQLFEENPINASGVDAKAILSARLSKSRRLENLIAQLPGEKKNGLFGNLIALSLGLTPNFKSNFDLAEDAKLQLSKDTYDDDLDNLLAQIGDQYADLFLAAKNLSDAILLSDILRVNTEITKAPLSASMIKRYDEHHQDLTLLKALVRQQLPEKYKEIFFDQSKNGYAGYIDGGASQEEFYKFIKPILEKMDGTEELLVKLNREDLLRKQRTFDNGSIPHQIHLGELHAILRRQEDFYPFLKDNREKIEKILTFRIPYYVGPLARGNSRFAWMTRKSEETITPWNFEEVVDKGASAQSFIERMTNFDKNLPNEKVLPKHSLLYEYFTVYNELTKVKYVTEGMRKPAFLSGEQKKAIVDLLFKTNRKVTVKQLKEDYFKKIECFDSVEISGVEDRFNASLGTYHDLLKIIKDKDFLDNEENEDILEDIVLTLTLFEDREMIEERLKTYAHLFDDKVMKQLKRRRYTGWGRLSRKLINGIRDKQSGKTILDFLKSDGFANRNFMQLIHDDSLTFKEDIQKAQVSGQGDSLHEHIANLAGSPAIKKGILQTVKVVDELVKVMGRHKPENIVIEMARENQTTQKGQKNSRERMKRIEEGIKELGSQILKEHPVENTQLQNEKLYLYYLQNGRDMYVDQELDINRLSDYDVDHIVPQSFLKDDSIDNKVLTRSDKARGKSDNVPSEEVVKKMKNYWRQLLNAKLITQRKFDNLTKAERGGLSELDKAGFIKRQLVETRQITKHVAQILDSRMNTKYDENDKLIREVKVITLKSKLVSDFRKDFQFYKVREINNYHHAHDAYLNAVVGTALIKKYPKLESEFVYGDYKVYDVRKMIAKSEQEIGKATAKYFFYSNIMNFFKTEITLANGEIRKRPLIETNGETGEIVWDKGRDFATVRKVLSMPQVNIVKKTEVQTGGFSKESILPKRNSDKLIARKKDWDPKKYGGFDSPTVAYSVLVVAKVEKGKSKKLKSVKELLGITIMERSSFEKNPIDFLEAKGYKEVKKDLIIKLPKYSLFELENGRKRMLASAGELQKGNELALPSKYVNFLYLASHYEKLKGSPEDNEQKQLFVEQHKHYLDEIIEQISEFSKRVILADANLDKVLSAYNKHRDKPIREQAENIIHLFTLTNLGAPAAFKYFDTTIDRKRYTSTKEVLDATLIHQSITGLYETRIDLSQLGGDGGGGSGSSEAAAKGGTLNIEDEHRLHETSKEPDVSLGSTWLSDFPQAWAETGGMGLAVRQAPLIIPLKATSTPVSIKQYPMSQEARLGIKPHIQRLLDQGILVPCQSPWNTPLLPVKKPGTNDYRPVQDLREVNKRVEDIHPTVPNPYNLLSGLPPSHQWYTVLDLKDAFFCLRLHPTSQPLFAFEWRDPEMGISGQLTWTRLPQGFKNSPTLFNEALHRDLADFRIQHPDLILLQYVDDLLLAATSELDCQQGTRALLQTLGNLGYRASAKKAQICQKQVKYLGYLLKEGQRWLTEARKETVMGQPTPKTPRQLREFLGKAGFCRLFIPGFAEMAAPLYPLTKPGTLFNWGPDQQKAYQEIKQALLTAPALGLPDLTKPFELFVDEKQGYAKGVLTQKLGPWRRPVAYLSKKLDPVAAGWPPCLRMVAAIAVLTKDAGKLTMGQPLVILAPHAVEALVKQPPDRWLSNARMTHYQALLLDTDRVQFGPVVALNPATLLPLPEEGLQHNCLDILAEAHGTRPDLTDQPLPDADHTWYTDGSSLLQEGQRKAGAAVTTETEVIWAKALPAGTSAQRAELIALTQALKMAEGKKLNVYTDSRYAFATAHIHGEIYRRRGWLTSEGKEIKNKDEILALLKALFLPKRLSIIHCPGHQKGHSAEARGNRMADQAARKAAITETPDTSTLLAGKRTADGSEFEKRTADGSEFESPKKKAKVE

SEQ ID NO: 2843 - protein, 2096 aa, synthetic construct
MPAAKRVKLDGGDKKYSIGLDIGTNSVGWAVITDEYKVPSKKFKVLGNTDRHSIKKNLIGALLFDSGETAEATRLKRTARRRYTRRKNRICYLQEIFSNEMAKVDDSFFHRLEESFLVEEDKKHERHPIFGNIVDEVAYHEKYPTIYHLRKKLVDSTDKADLRLIYLALAHMIKFRGHFLIEGDLNPDNSDVDKLFIQLVQTYNQLFEENPINASGVDAKAILSARLSKSRRLENLIAQLPGEKKNGLFGNLIALSLGLTPNFKSNFDLAEDAKLQLSKDTYDDDLDNLLAQIGDQYADLFLAAKNLSDAILLSDILRVNTEITKAPLSASMIKRYDEHHQDLTLLKALVRQQLPEKYKEIFFDQSKNGYAGYIDGGASQEEFYKFIKPILEKMDGTEELLVKLNREDLLRKQRTFDNGSIPHQIHLGELHAILRRQEDFYPFLKDNREKIEKILTFRIPYYVGPLARGNSRFAWMTRKSEETITPWNFEEVVDKGASAQSFIERMTNFDKNLPNEKVLPKHSLLYEYFTVYNELTKVKYVTEGMRKPAFLSGEQKKAIVDLLFKTNRKVTVKQLKEDYFKKIECFDSVEISGVEDRFNASLGTYHDLLKIIKDKDFLDNEENEDILEDIVLTLTLFEDREMIEERLKTYAHLFDDKVMKQLKRRRYTGWGRLSRKLINGIRDKQSGKTILDFLKSDGFANRNFMQLIHDDSLTFKEDIQKAQVSGQGDSLHEHIANLAGSPAIKKGILQTVKVVDELVKVMGRHKPENIVIEMARENQTTQKGQKNSRERMKRIEEGIKELGSQILKEHPVENTQLQNEKLYLYYLQNGRDMYVDQELDINRLSDYDVDHIVPQSFLKDDSIDNKVLTRSDKARGKSDNVPSEEVVKKMKNYWRQLLNAKLITQRKFDNLTKAERGGLSELDKAGFIKRQLVETRQITKHVAQILDSRMNTKYDENDKLIREVKVITLKSKLVSDFRKDFQFYKVREINNYHHAHDAYLNAVVGTALIKKYPKLESEFVYGDYKVYDVRKMIAKSEQEIGKATAKYFFYSNIMNFFKTEITLANGEIRKRPLIETNGETGEIVWDKGRDFATVRKVLSMPQVNIVKKTEVQTGGFSKESILPKRNSDKLIARKKDWDPKKYGGFDSPTVAYSVLVVAKVEKGKSKKLKSVKELLGITIMERSSFEKNPIDFLEAKGYKEVKKDLIIKLPKYSLFELENGRKRMLASAGELQKGNELALPSKYVNFLYLASHYEKLKGSPEDNEQKQLFVEQHKHYLDEIIEQISEFSKRVILADANLDKVLSAYNKHRDKPIREQAENIIHLFTLTNLGAPAAFKYFDTTIDRKRYTSTKEVLDATLIHQSITGLYETRIDLSQLGGDGGEAAAKGGGPAPGGTLNIEDEHRLHETSKEPDVSLGSTWLSDFPQAWAETGGMGLAVRQAPLIIPLKATSTPVSIKQYPMSQEARLGIKPHIQRLLDQGILVPCQSPWNTPLLPVKKPGTNDYRPVQDLREVNKRVEDIHPTVPNPYNLLSGLPPSHQWYTVLDLKDAFFCLRLHPTSQPLFAFEWRDPEMGISGQLTWTRLPQGFKNSPTLFNEALHRDLADFRIQHPDLILLQYVDDLLLAATSELDCQQGTRALLQTLGNLGYRASAKKAQICQKQVKYLGYLLKEGQRWLTEARKETVMGQPTPKTPRQLREFLGKAGFCRLFIPGFAEMAAPLYPLTKPGTLFNWGPDQQKAYQEIKQALLTAPALGLPDLTKPFELFVDEKQGYAKGVLTQKLGPWRRPVAYLSKKLDPVAAGWPPCLRMVAAIAVLTKDAGKLTMGQPLVILAPHAVEALVKQPPDRWLSNARMTHYQALLLDTDRVQFGPVVALNPATLLPLPEEGLQHNCLDILAEAHGTRPDLTDQPLPDADHTWYTDGSSLLQEGQRKAGAAVTTETEVIWAKALPAGTSAQRAELIALTQALKMAEGKKLNVYTDSRYAFATAHIHGEIYRRRGWLTSEGKEIKNKDEILALLKALFLPKRLSIIHCPGHQKGHSAEARGNRMADQAARKAAITETPDTSTLLAGKRTADGSEFEKRTADGSEFESPKKKAKVE

SEQ ID NO: 2844 - protein, 2105 aa, synthetic construct
MPAAKRVKLDGGDKKYSIGLDIGTNSVGWAVITDEYKVPSKKFKVLGNTDRHSIKKNLIGALLFDSGETAEATRLKRTARRRYTRRKNRICYLQEIFSNEMAKVDDSFFHRLEESFLVEEDKKHERHPIFGNIVDEVAYHEKYPTIYHLRKKLVDSTDKADLRLIYLALAHMIKFRGHFLIEGDLNPDNSDVDKLFIQLVQTYNQLFEENPINASGVDAKAILSARLSKSRRLENLIAQLPGEKKNGLFGNLIALSLGLTPNFKSNFDLAEDAKLQLSKDTYDDDLDNLLAQIGDQYADLFLAAKNLSDAILLSDILRVNTEITKAPLSASMIKRYDEHHQDLTLLKALVRQQLPEKYKEIFFDQSKNGYAGYIDGGASQEEFYKFIKPILEKMDGTEELLVKLNREDLLRKQRTFDNGSIPHQIHLGELHAILRRQEDFYPFLKDNREKIEKILTFRIPYYVGPLARGNSRFAWMTRKSEETITPWNFEEVVDKGASAQSFIERMTNFDKNLPNEKVLPKHSLLYEYFTVYNELTKVKYVTEGMRKPAFLSGEQKKAIVDLLFKTNRKVTVKQLKEDYFKKIECFDSVEISGVEDRFNASLGTYHDLLKIIKDKDFLDNEENEDILEDIVLTLTLFEDREMIEERLKTYAHLFDDKVMKQLKRRRYTGWGRLSRKLINGIRDKQSGKTILDFLKSDGFANRNFMQLIHDDSLTFKEDIQKAQVSGQGDSLHEHIANLAGSPAIKKGILQTVKVVDELVKVMGRHKPENIVIEMARENQTTQKGQKNSRERMKRIEEGIKELGSQILKEHPVENTQLQNEKLYLYYLQNGRDMYVDQELDINRLSDYDVDHIVPQSFLKDDSIDNKVLTRSDKARGKSDNVPSEEVVKKMKNYWRQLLNAKLITQRKFDNLTKAERGGLSELDKAGFIKRQLVETRQITKHVAQILDSRMNTKYDENDKLIREVKVITLKSKLVSDFRKDFQFYKVREINNYHHAHDAYLNAVVGTALIKKYPKLESEFVYGDYKVYDVRKMIAKSEQEIGKATAKYFFYSNIMNFFKTEITLANGEIRKRPLIETNGETGEIVWDKGRDFATVRKVLSMPQVNIVKKTEVQTGGFSKESILPKRNSDKLIARKKDWDPKKYGGFDSPTVAYSVLVVAKVEKGKSKKLKSVKELLGITIMERSSFEKNPIDFLEAKGYKEVKKDLIIKLPKYSLFELENGRKRMLASAGELQKGNELALPSKYVNFLYLASHYEKLKGSPEDNEQKQLFVEQHKHYLDEIIEQISEFSKRVILADANLDKVLSAYNKHRDKPIREQAENIIHLFTLTNLGAPAAFKYFDTTIDRKRYTSTKEVLDATLIHQSITGLYETRIDLSQLGGDGGEAAAKEAAAKEAAAKEAAAKGGTLNIEDEHRLHETSKEPDVSLGSTWLSDFPQAWAETGGMGLAVRQAPLIIPLKATSTPVSIKQYPMSQEARLGIKPHIQRLLDQGILVPCQSPWNTPLLPVKKPGTNDYRPVQDLREVNKRVEDIHPTVPNPYNLLSGLPPSHQWYTVLDLKDAFFCLRLHPTSQPLFAFEWRDPEMGISGQLTWTRLPQGFKNSPTLFNEALHRDLADFRIQHPDLILLQYVDDLLLAATSELDCQQGTRALLQTLGNLGYRASAKKAQICQKQVKYLGYLLKEGQRWLTEARKETVMGQPTPKTPRQLREFLGKAGFCRLFIPGFAEMAAPLYPLTKPGTLFNWGPDQQKAYQEIKQALLTAPALGLPDLTKPFELFVDEKQGYAKGVLTQKLGPWRRPVAYLSKKLDPVAAGWPPCLRMVAAIAVLTKDAGKLTMGQPLVILAPHAVEALVKQPPDRWLSNARMTHYQALLLDTDRVQFGPVVALNPATLLPLPEEGLQHNCLDILAEAHGTRPDLTDQPLPDADHTWYTDGSSLLQEGQRKAGAAVTTETEVIWAKALPAGTSAQRAELIALTQALKMAEGKKLNVYTDSRYAFATAHIHGEIYRRRGWLTSEGKEIKNKDEILALLKALFLPKRLSIIHCPGHQKGHSAEARGNRMADQAARKAAITETPDTSTLLAGKRTADGSEFEKRTADGSEFESPKKKAKVE

SEQ ID NO: 2845 - protein, 2095 aa, synthetic construct
MPAAKRVKLDGGDKKYSIGLDIGTNSVGWAVITDEYKVPSKKFKVLGNTDRHSIKKNLIGALLFDSGETAEATRLKRTARRRYTRRKNRICYLQEIFSNEMAKVDDSFFHRLEESFLVEEDKKHERHPIFGNIVDEVAYHEKYPTIYHLRKKLVDSTDKADLRLIYLALAHMIKFRGHFLIEGDLNPDNSDVDKLFIQLVQTYNQLFEENPINASGVDAKAILSARLSKSRRLENLIAQLPGEKKNGLFGNLIALSLGLTPNFKSNFDLAEDAKLQLSKDTYDDDLDNLLAQIGDQYADLFLAAKNLSDAILLSDILRVNTEITKAPLSASMIKRYDEHHQDLTLLKALVRQQLPEKYKEIFFDQSKNGYAGYIDGGASQEEFYKFIKPILEKMDGTEELLVKLNREDLLRKQRTFDNGSIPHQIHLGELHAILRRQEDFYPFLKDNREKIEKILTFRIPYYVGPLARGNSRFAWMTRKSEETITPWNFEEVVDKGASAQSFIERMTNFDKNLPNEKVLPKHSLLYEYFTVYNELTKVKYVTEGMRKPAFLSGEQKKAIVDLLFKTNRKVTVKQLKEDYFKKIECFDSVEISGVEDRFNASLGTYHDLLKIIKDKDFLDNEENEDILEDIVLTLTLFEDREMIEERLKTYAHLFDDKVMKQLKRRRYTGWGRLSRKLINGIRDKQSGKTILDFLKSDGFANRNFMQLIHDDSLTFKEDIQKAQVSGQGDSLHEHIANLAGSPAIKKGILQTVKVVDELVKVMGRHKPENIVIEMARENQTTQKGQKNSRERMKRIEEGIKELGSQILKEHPVENTQLQNEKLYLYYLQNGRDMYVDQELDINRLSDYDVDHIVPQSFLKDDSIDNKVLTRSDKARGKSDNVPSEEVVKKMKNYWRQLLNAKLITQRKFDNLTKAERGGLSELDKAGFIKRQLVETRQITKHVAQILDSRMNTKYDENDKLIREVKVITLKSKLVSDFRKDFQFYKVREINNYHHAHDAYLNAVVGTALIKKYPKLESEFVYGDYKVYDVRKMIAKSEQEIGKATAKYFFYSNIMNFFKTEITLANGEIRKRPLIETNGETGEIVWDKGRDFATVRKVLSMPQVNIVKKTEVQTGGFSKESILPKRNSDKLIARKKDWDPKKYGGFDSPTVAYSVLVVAKVEKGKSKKLKSVKELLGITIMERSSFEKNPIDFLEAKGYKEVKKDLIIKLPKYSLFELENGRKRMLASAGELQKGNELALPSKYVNFLYLASHYEKLKGSPEDNEQKQLFVEQHKHYLDEIIEQISEFSKRVILADANLDKVLSAYNKHRDKPIREQAENIIHLFTLTNLGAPAAFKYFDTTIDRKRYTSTKEVLDATLIHQSITGLYETRIDLSQLGGDGGEAAAKEAAAKGGTLNIEDEHRLHETSKEPDVSLGSTWLSDFPQAWAETGGMGLAVRQAPLIIPLKATSTPVSIKQYPMSQEARLGIKPHIQRLLDQGILVPCQSPWNTPLLPVKKPGTNDYRPVQDLREVNKRVEDIHPTVPNPYNLLSGLPPSHQWYTVLDLKDAFFCLRLHPTSQPLFAFEWRDPEMGISGQLTWTRLPQGFKNSPTLFNEALHRDLADFRIQHPDLILLQYVDDLLLAATSELDCQQGTRALLQTLGNLGYRASAKKAQICQKQVKYLGYLLKEGQRWLTEARKETVMGQPTPKTPRQLREFLGKAGFCRLFIPGFAEMAAPLYPLTKPGTLFNWGPDQQKAYQEIKQALLTAPALGLPDLTKPFELFVDEKQGYAKGVLTQKLGPWRRPVAYLSKKLDPVAAGWPPCLRMVAAIAVLTKDAGKLTMGQPLVILAPHAVEALVKQPPDRWLSNARMTHYQALLLDTDRVQFGPVVALNPATLLPLPEEGLQHNCLDILAEAHGTRPDLTDQPLPDADHTWYTDGSSLLQEGQRKAGAAVTTETEVIWAKALPAGTSAQRAELIALTQALKMAEGKKLNVYTDSRYAFATAHIHGEIYRRRGWLTSEGKEIKNKDEILALLKALFLPKRLSIIHCPGHQKGHSAEARGNRMADQAARKAAITETPDTSTLLAGKRTADGSEFEKRTADGSEFESPKKKAKVE

SEQ ID NO: 2846 - protein, 2094 aa, synthetic construct
MPAAKRVKLDGGDKKYSIGLDIGTNSVGWAVITDEYKVPSKKFKVLGNTDRHSIKKNLIGALLFDSGETAEATRLKRTARRRYTRRKNRICYLQEIFSNEMAKVDDSFFHRLEESFLVEEDKKHERHPIFGNIVDEVAYHEKYPTIYHLRKKLVDSTDKADLRLIYLALAHMIKFRGHFLIEGDLNPDNSDVDKLFIQLVQTYNQLFEENPINASGVDAKAILSARLSKSRRLENLIAQLPGEKKNGLFGNLIALSLGLTPNFKSNFDLAEDAKLQLSKDTYDDDLDNLLAQIGDQYADLFLAAKNLSDAILLSDILRVNTEITKAPLSASMIKRYDEHHQDLTLLKALVRQQLPEKYKEIFFDQSKNGYAGYIDGGASQEEFYKFIKPILEKMDGTEELLVKLNREDLLRKQRTFDNGSIPHQIHLGELHAILRRQEDFYPFLKDNREKIEKILTFRIPYYVGPLARGNSRFAWMTRKSEETITPWNFEEVVDKGASAQSFIERMTNFDKNLPNEKVLPKHSLLYEYFTVYNELTKVKYVTEGMRKPAFLSGEQKKAIVDLLFKTNRKVTVKQLKEDYFKKIECFDSVEISGVEDRFNASLGTYHDLLKIIKDKDFLDNEENEDILEDIVLTLTLFEDREMIEERLKTYAHLFDDKVMKQLKRRRYTGWGRLSRKLINGIRDKQSGKTILDFLKSDGFANRNFMQLIHDDSLTFKEDIQKAQVSGQGDSLHEHIANLAGSPAIKKGILQTVKVVDELVKVMGRHKPENIVIEMARENQTTQKGQKNSRERMKRIEEGIKELGSQILKEHPVENTQLQNEKLYLYYLQNGRDMYVDQELDINRLSDYDVDHIVPQSFLKDDSIDNKVLTRSDKARGKSDNVPSEEVVKKMKNYWRQLLNAKLITQRKFDNLTKAERGGLSELDKAGFIKRQLVETRQITKHVAQILDSRMNTKYDENDKLIREVKVITLKSKLVSDFRKDFQFYKVREINNYHHAHDAYLNAVVGTALIKKYPKLESEFVYGDYKVYDVRKMIAKSEQEIGKATAKYFFYSNIMNFFKTEITLANGEIRKRPLIETNGETGEIVWDKGRDFATVRKVLSMPQVNIVKKTEVQTGGFSKESILPKRNSDKLIARKKDWDPKKYGGFDSPTVAYSVLVVAKVEKGKSKKLKSVKELLGITIMERSSFEKNPIDFLEAKGYKEVKKDLIIKLPKYSLFELENGRKRMLASAGELQKGNELALPSKYVNFLYLASHYEKLKGSPEDNEQKQLFVEQHKHYLDEIIEQISEFSKRVILADANLDKVLSAYNKHRDKPIREQAENIIHLFTLTNLGAPAAFKYFDTTIDRKRYTSTKEVLDATLIHQSITGLYETRIDLSQLGGDGGGGGGGSGSSGGTLNIEDEHRLHETSKEPDVSLGSTWLSDFPQAWAETGGMGLAVRQAPLIIPLKATSTPVSIKQYPMSQEARLGIKPHIQRLLDQGILVPCQSPWNTPLLPVKKPGTNDYRPVQDLREVNKRVEDIHPTVPNPYNLLSGLPPSHQWYTVLDLKDAFFCLRLHPTSQPLFAFEWRDPEMGISGQLTWTRLPQGFKNSPTLFNEALHRDLADFRIQHPDLILLQYVDDLLLAATSELDCQQGTRALLQTLGNLGYRASAKKAQICQKQVKYLGYLLKEGQRWLTEARKETVMGQPTPKTPRQLREFLGKAGFCRLFIPGFAEMAAPLYPLTKPGTLFNWGPDQQKAYQEIKQALLTAPALGLPDLTKPFELFVDEKQGYAKGVLTQKLGPWRRPVAYLSKKLDPVAAGWPPCLRMVAAIAVLTKDAGKLTMGQPLVILAPHAVEALVKQPPDRWLSNARMTHYQALLLDTDRVQFGPVVALNPATLLPLPEEGLQHNCLDILAEAHGTRPDLTDQPLPDADHTWYTDGSSLLQEGQRKAGAAVTTETEVIWAKALPAGTSAQRAELIALTQALKMAEGKKLNVYTDSRYAFATAHIHGEIYRRRGWLTSEGKEIKNKDEILALLKALFLPKRLSIIHCPGHQKGHSAEARGNRMADQAARKAAITETPDTSTLLAGKRTADGSEFEKRTADGSEFESPKKKAKVE

SEQ ID NO: 2847 - protein, 2094 aa, synthetic construct
MPAAKRVKLDGGDKKYSIGLDIGTNSVGWAVITDEYKVPSKKFKVLGNTDRHSIKKNLIGALLFDSGETAEATRLKRTARRRYTRRKNRICYLQEIFSNEMAKVDDSFFHRLEESFLVEEDKKHERHPIFGNIVDEVAYHEKYPTIYHLRKKLVDSTDKADLRLIYLALAHMIKFRGHFLIEGDLNPDNSDVDKLFIQLVQTYNQLFEENPINASGVDAKAILSARLSKSRRLENLIAQLPGEKKNGLFGNLIALSLGLTPNFKSNFDLAEDAKLQLSKDTYDDDLDNLLAQIGDQYADLFLAAKNLSDAILLSDILRVNTEITKAPLSASMIKRYDEHHQDLTLLKALVRQQLPEKYKEIFFDQSKNGYAGYIDGGASQEEFYKFIKPILEKMDGTEELLVKLNREDLLRKQRTFDNGSIPHQIHLGELHAILRRQEDFYPFLKDNREKIEKILTFRIPYYVGPLARGNSRFAWMTRKSEETITPWNFEEVVDKGASAQSFIERMTNFDKNLPNEKVLPKHSLLYEYFTVYNELTKVKYVTEGMRKPAFLSGEQKKAIVDLLFKTNRKVTVKQLKEDYFKKIECFDSVEISGVEDRFNASLGTYHDLLKIIKDKDFLDNEENEDILEDIVLTLTLFEDREMIEERLKTYAHLFDDKVMKQLKRRRYTGWGRLSRKLINGIRDKQSGKTILDFLKSDGFANRNFMQLIHDDSLTFKEDIQKAQVSGQGDSLHEHIANLAGSPAIKKGILQTVKVVDELVKVMGRHKPENIVIEMARENQTTQKGQKNSRERMKRIEEGIKELGSQILKEHPVENTQLQNEKLYLYYLQNGRDMYVDQELDINRLSDYDVDHIVPQSFLKDDSIDNKVLTRSDKARGKSDNVPSEEVVKKMKNYWRQLLNAKLITQRKFDNLTKAERGGLSELDKAGFIKRQLVETRQITKHVAQILDSRMNTKYDENDKLIREVKVITLKSKLVSDFRKDFQFYKVREINNYHHAHDAYLNAVVGTALIKKYPKLESEFVYGDYKVYDVRKMIAKSEQEIGKATAKYFFYSNIMNFFKTEITLANGEIRKRPLIETNGETGEIVWDKGRDFATVRKVLSMPQVNIVKKTEVQTGGFSKESILPKRNSDKLIARKKDWDPKKYGGFDSPTVAYSVLVVAKVEKGKSKKLKSVKELLGITIMERSSFEKNPIDFLEAKGYKEVKKDLIIKLPKYSLFELENGRKRMLASAGELQKGNELALPSKYVNFLYLASHYEKLKGSPEDNEQKQLFVEQHKHYLDEIIEQISEFSKRVILADANLDKVLSAYNKHRDKPIREQAENIIHLFTLTNLGAPAAFKYFDTTIDRKRYTSTKEVLDATLIHQSITGLYETRIDLSQLGGDGGPAPGSSGGGGGTLNIEDEHRLHETSKEPDVSLGSTWLSDFPQAWAETGGMGLAVRQAPLIIPLKATSTPVSIKQYPMSQEARLGIKPHIQRLLDQGILVPCQSPWNTPLLPVKKPGTNDYRPVQDLREVNKRVEDIHPTVPNPYNLLSGLPPSHQWYTVLDLKDAFFCLRLHPTSQPLFAFEWRDPEMGISGQLTWTRLPQGFKNSPTLFNEALHRDLADFRIQHPDLILLQYVDDLLLAATSELDCQQGTRALLQTLGNLGYRASAKKAQICQKQVKYLGYLLKEGQRWLTEARKETVMGQPTPKTPRQLREFLGKAGFCRLFIPGFAEMAAPLYPLTKPGTLFNWGPDQQKAYQEIKQALLTAPALGLPDLTKPFELFVDEKQGYAKGVLTQKLGPWRRPVAYLSKKLDPVAAGWPPCLRMVAAIAVLTKDAGKLTMGQPLVILAPHAVEALVKQPPDRWLSNARMTHYQALLLDTDRVQFGPVVALNPATLLPLPEEGLQHNCLDILAEAHGTRPDLTDQPLPDADHTWYTDGSSLLQEGQRKAGAAVTTETEVIWAKALPAGTSAQRAELIALTQALKMAEGKKLNVYTDSRYAFATAHIHGEIYRRRGWLTSEGKEIKNKDEILALLKALFLPKRLSIIHCPGHQKGHSAEARGNRMADQAARKAAITETPDTSTLLAGKRTADGSEFEKRTADGSEFESPKKKAKVE

SEQ ID NO: 2848 - protein, 2094 aa, synthetic construct
MPAAKRVKLDGGDKKYSIGLDIGTNSVGWAVITDEYKVPSKKFKVLGNTDRHSIKKNLIGALLFDSGETAEATRLKRTARRRYTRRKNRICYLQEIFSNEMAKVDDSFFHRLEESFLVEEDKKHERHPIFGNIVDEVAYHEKYPTIYHLRKKLVDSTDKADLRLIYLALAHMIKFRGHFLIEGDLNPDNSDVDKLFIQLVQTYNQLFEENPINASGVDAKAILSARLSKSRRLENLIAQLPGEKKNGLFGNLIALSLGLTPNFKSNFDLAEDAKLQLSKDTYDDDLDNLLAQIGDQYADLFLAAKNLSDAILLSDILRVNTEITKAPLSASMIKRYDEHHQDLTLLKALVRQQLPEKYKEIFFDQSKNGYAGYIDGGASQEEFYKFIKPILEKMDGTEELLVKLNREDLLRKQRTFDNGSIPHQIHLGELHAILRRQEDFYPFLKDNREKIEKILTFRIPYYVGPLARGNSRFAWMTRKSEETITPWNFEEVVDKGASAQSFIERMTNFDKNLPNEKVLPKHSLLYEYFTVYNELTKVKYVTEGMRKPAFLSGEQKKAIVDLLFKTNRKVTVKQLKEDYFKKIECFDSVEISGVEDRFNASLGTYHDLLKIIKDKDFLDNEENEDILEDIVLTLTLFEDREMIEERLKTYAHLFDDKVMKQLKRRRYTGWGRLSRKLINGIRDKQSGKTILDFLKSDGFANRNFMQLIHDDSLTFKEDIQKAQVSGQGDSLHEHIANLAGSPAIKKGILQTVKVVDELVKVMGRHKPENIVIEMARENQTTQKGQKNSRERMKRIEEGIKELGSQILKEHPVENTQLQNEKLYLYYLQNGRDMYVDQELDINRLSDYDVDHIVPQSFLKDDSIDNKVLTRSDKARGKSDNVPSEEVVKKMKNYWRQLLNAKLITQRKFDNLTKAERGGLSELDKAGFIKRQLVETRQITKHVAQILDSRMNTKYDENDKLIREVKVITLKSKLVSDFRKDFQFYKVREINNYHHAHDAYLNAVVGTALIKKYPKLESEFVYGDYKVYDVRKMIAKSEQEIGKATAKYFFYSNIMNFFKTEITLANGEIRKRPLIETNGETGEIVWDKGRDFATVRKVLSMPQVNIVKKTEVQTGGFSKESILPKRNSDKLIARKKDWDPKKYGGFDSPTVAYSVLVVAKVEKGKSKKLKSVKELLGITIMERSSFEKNPIDFLEAKGYKEVKKDLIIKLPKYSLFELENGRKRMLASAGELQKGNELALPSKYVNFLYLASHYEKLKGSPEDNEQKQLFVEQHKHYLDEIIEQISEFSKRVILADANLDKVLSAYNKHRDKPIREQAENIIHLFTLTNLGAPAAFKYFDTTIDRKRYTSTKEVLDATLIHQSITGLYETRIDLSQLGGDGGGGGGSSPAPGGTLNIEDEHRLHETSKEPDVSLGSTWLSDFPQAWAETGGMGLAVRQAPLIIPLKATSTPVSIKQYPMSQEARLGIKPHIQRLLDQGILVPCQSPWNTPLLPVKKPGTNDYRPVQDLREVNKRVEDIHPTVPNPYNLLSGLPPSHQWYTVLDLKDAFFCLRLHPTSQPLFAFEWRDPEMGISGQLTWTRLPQGFKNSPTLFNEALHRDLADFRIQHPDLILLQYVDDLLLAATSELDCQQGTRALLQTLGNLGYRASAKKAQICQKQVKYLGYLLKEGQRWLTEARKETVMGQPTPKTPRQLREFLGKAGFCRLFIPGFAEMAAPLYPLTKPGTLFNWGPDQQKAYQEIKQALLTAPALGLPDLTKPFELFVDEKQGYAKGVLTQKLGPWRRPVAYLSKKLDPVAAGWPPCLRMVAAIAVLTKDAGKLTMGQPLVILAPHAVEALVKQPPDRWLSNARMTHYQALLLDTDRVQFGPVVALNPATLLPLPEEGLQHNCLDILAEAHGTRPDLTDQPLPDADHTWYTDGSSLLQEGQRKAGAAVTTETEVIWAKALPAGTSAQRAELIALTQALKMAEGKKLNVYTDSRYAFATAHIHGEIYRRRGWLTSEGKEIKNKDEILALLKALFLPKRLSIIHCPGHQKGHSAEARGNRMADQAARKAAITETPDTSTLLAGKRTADGSEFEKRTADGSEFESPKKKAKVE

SEQ ID NO: 2849 - protein, 2093 aa, synthetic construct
MPAAKRVKLDGGDKKYSIGLDIGTNSVGWAVITDEYKVPSKKFKVLGNTDRHSIKKNLIGALLFDSGETAEATRLKRTARRRYTRRKNRICYLQEIFSNEMAKVDDSFFHRLEESFLVEEDKKHERHPIFGNIVDEVAYHEKYPTIYHLRKKLVDSTDKADLRLIYLALAHMIKFRGHFLIEGDLNPDNSDVDKLFIQLVQTYNQLFEENPINASGVDAKAILSARLSKSRRLENLIAQLPGEKKNGLFGNLIALSLGLTPNFKSNFDLAEDAKLQLSKDTYDDDLDNLLAQIGDQYADLFLAAKNLSDAILLSDILRVNTEITKAPLSASMIKRYDEHHQDLTLLKALVRQQLPEKYKEIFFDQSKNGYAGYIDGGASQEEFYKFIKPILEKMDGTEELLVKLNREDLLRKQRTFDNGSIPHQIHLGELHAILRRQEDFYPFLKDNREKIEKILTFRIPYYVGPLARGNSRFAWMTRKSEETITPWNFEEVVDKGASAQSFIERMTNFDKNLPNEKVLPKHSLLYEYFTVYNELTKVKYVTEGMRKPAFLSGEQKKAIVDLLFKTNRKVTVKQLKEDYFKKIECFDSVEISGVEDRFNASLGTYHDLLKIIKDKDFLDNEENEDILEDIVLTLTLFEDREMIEERLKTYAHLFDDKVMKQLKRRRYTGWGRLSRKLINGIRDKQSGKTILDFLKSDGFANRNFMQLIHDDSLTFKEDIQKAQVSGQGDSLHEHIANLAGSPAIKKGILQTVKVVDELVKVMGRHKPENIVIEMARENQTTQKGQKNSRERMKRIEEGIKELGSQILKEHPVENTQLQNEKLYLYYLQNGRDMYVDQELDINRLSDYDVDHIVPQSFLKDDSIDNKVLTRSDKARGKSDNVPSEEVVKKMKNYWRQLLNAKLITQRKFDNLTKAERGGLSELDKAGFIKRQLVETRQITKHVAQILDSRMNTKYDENDKLIREVKVITLKSKLVSDFRKDFQFYKVREINNYHHAHDAYLNAVVGTALIKKYPKLESEFVYGDYKVYDVRKMIAKSEQEIGKATAKYFFYSNIMNFFKTEITLANGEIRKRPLIETNGETGEIVWDKGRDFATVRKVLSMPQVNIVKKTEVQTGGFSKESILPKRNSDKLIARKKDWDPKKYGGFDSPTVAYSVLVVAKVEKGKSKKLKSVKELLGITIMERSSFEKNPIDFLEAKGYKEVKKDLIIKLPKYSLFELENGRKRMLASAGELQKGNELALPSKYVNFLYLASHYEKLKGSPEDNEQKQLFVEQHKHYLDEIIEQISEFSKRVILADANLDKVLSAYNKHRDKPIREQAENIIHLFTLTNLGAPAAFKYFDTTIDRKRYTSTKEVLDATLIHQSITGLYETRIDLSQLGGDGGGGSEAAAKGGTLNIEDEHRLHETSKEPDVSLGSTWLSDFPQAWAETGGMGLAVRQAPLIIPLKATSTPVSIKQYPMSQEARLGIKPHIQRLLDQGILVPCQSPWNTPLLPVKKPGTNDYRPVQDLREVNKRVEDIHPTVPNPYNLLSGLPPSHQWYTVLDLKDAFFCLRLHPTSQPLFAFEWRDPEMGISGQLTWTRLPQGFKNSPTLFNEALHRDLADFRIQHPDLILLQYVDDLLLAATSELDCQQGTRALLQTLGNLGYRASAKKAQICQKQVKYLGYLLKEGQRWLTEARKETVMGQPTPKTPRQLREFLGKAGFCRLFIPGFAEMAAPLYPLTKPGTLFNWGPDQQKAYQEIKQALLTAPALGLPDLTKPFELFVDEKQGYAKGVLTQKLGPWRRPVAYLSKKLDPVAAGWPPCLRMVAAIAVLTKDAGKLTMGQPLVILAPHAVEALVKQPPDRWLSNARMTHYQALLLDTDRVQFGPVVALNPATLLPLPEEGLQHNCLDILAEAHGTRPDLTDQPLPDADHTWYTDGSSLLQEGQRKAGAAVTTETEVIWAKALPAGTSAQRAELIALTQALKMAEGKKLNVYTDSRYAFATAHIHGEIYRRRGWLTSEGKEIKNKDEILALLKALFLPKRLSIIHCPGHQKGHSAEARGNRMADQAARKAAITETPDTSTLLAGKRTADGSEFEKRTADGSEFESPKKKAKVE

SEQ ID NO: 2850 - protein, 2093 aa, synthetic construct
MPAAKRVKLDGGDKKYSIGLDIGTNSVGWAVITDEYKVPSKKFKVLGNTDRHSIKKNLIGALLFDSGETAEATRLKRTARRRYTRRKNRICYLQEIFSNEMAKVDDSFFHRLEESFLVEEDKKHERHPIFGNIVDEVAYHEKYPTIYHLRKKLVDSTDKADLRLIYLALAHMIKFRGHFLIEGDLNPDNSDVDKLFIQLVQTYNQLFEENPINASGVDAKAILSARLSKSRRLENLIAQLPGEKKNGLFGNLIALSLGLTPNFKSNFDLAEDAKLQLSKDTYDDDLDNLLAQIGDQYADLFLAAKNLSDAILLSDILRVNTEITKAPLSASMIKRYDEHHQDLTLLKALVRQQLPEKYKEIFFDQSKNGYAGYIDGGASQEEFYKFIKPILEKMDGTEELLVKLNREDLLRKQRTFDNGSIPHQIHLGELHAILRRQEDFYPFLKDNREKIEKILTFRIPYYVGPLARGNSRFAWMTRKSEETITPWNFEEVVDKGASAQSFIERMTNFDKNLPNEKVLPKHSLLYEYFTVYNELTKVKYVTEGMRKPAFLSGEQKKAIVDLLFKTNRKVTVKQLKEDYFKKIECFDSVEISGVEDRFNASLGTYHDLLKIIKDKDFLDNEENEDILEDIVLTLTLFEDREMIEERLKTYAHLFDDKVMKQLKRRRYTGWGRLSRKLINGIRDKQSGKTILDFLKSDGFANRNFMQLIHDDSLTFKEDIQKAQVSGQGDSLHEHIANLAGSPAIKKGILQTVKVVDELVKVMGRHKPENIVIEMARENQTTQKGQKNSRERMKRIEEGIKELGSQILKEHPVENTQLQNEKLYLYYLQNGRDMYVDQELDINRLSDYDVDHIVPQSFLKDDSIDNKVLTRSDKARGKSDNVPSEEVVKKMKNYWRQLLNAKLITQRKFDNLTKAERGGLSELDKAGFIKRQLVETRQITKHVAQILDSRMNTKYDENDKLIREVKVITLKSKLVSDFRKDFQFYKVREINNYHHAHDAYLNAVVGTALIKKYPKLESEFVYGDYKVYDVRKMIAKSEQEIGKATAKYFFYSNIMNFFKTEITLANGEIRKRPLIETNGETGEIVWDKGRDFATVRKVLSMPQVNIVKKTEVQTGGFSKESILPKRNSDKLIARKKDWDPKKYGGFDSPTVAYSVLVVAKVEKGKSKKLKSVKELLGITIMERSSFEKNPIDFLEAKGYKEVKKDLIIKLPKYSLFELENGRKRMLASAGELQKGNELALPSKYVNFLYLASHYEKLKGSPEDNEQKQLFVEQHKHYLDEIIEQISEFSKRVILADANLDKVLSAYNKHRDKPIREQAENIIHLFTLTNLGAPAAFKYFDTTIDRKRYTSTKEVLDATLIHQSITGLYETRIDLSQLGGDGGEAAAKPAPGGTLNIEDEHRLHETSKEPDVSLGSTWLSDFPQAWAETGGMGLAVRQAPLIIPLKATSTPVSIKQYPMSQEARLGIKPHIQRLLDQGILVPCQSPWNTPLLPVKKPGTNDYRPVQDLREVNKRVEDIHPTVPNPYNLLSGLPPSHQWYTVLDLKDAFFCLRLHPTSQPLFAFEWRDPEMGISGQLTWTRLPQGFKNSPTLFNEALHRDLADFRIQHPDLILLQYVDDLLLAATSELDCQQGTRALLQTLGNLGYRASAKKAQICQKQVKYLGYLLKEGQRWLTEARKETVMGQPTPKTPRQLREFLGKAGFCRLFIPGFAEMAAPLYPLTKPGTLFNWGPDQQKAYQEIKQALLTAPALGLPDLTKPFELFVDEKQGYAKGVLTQKLGPWRRPVAYLSKKLDPVAAGWPPCLRMVAAIAVLTKDAGKLTMGQPLVILAPHAVEALVKQPPDRWLSNARMTHYQALLLDTDRVQFGPVVALNPATLLPLPEEGLQHNCLDILAEAHGTRPDLTDQPLPDADHTWYTDGSSLLQEGQRKAGAAVTTETEVIWAKALPAGTSAQRAELIALTQALKMAEGKKLNVYTDSRYAFATAHIHGEIYRRRGWLTSEGKEIKNKDEILALLKALFLPKRLSIIHCPGHQKGHSAEARGNRMADQAARKAAITETPDTSTLLAGKRTADGSEFEKRTADGSEFESPKKKAKVE

SEQ ID NO: 2851 - protein, 2096 aa, synthetic construct
MPAAKRVKLDGGDKKYSIGLDIGTNSVGWAVITDEYKVPSKKFKVLGNTDRHSIKKNLIGALLFDSGETAEATRLKRTARRRYTRRKNRICYLQEIFSNEMAKVDDSFFHRLEESFLVEEDKKHERHPIFGNIVDEVAYHEKYPTIYHLRKKLVDSTDKADLRLIYLALAHMIKFRGHFLIEGDLNPDNSDVDKLFIQLVQTYNQLFEENPINASGVDAKAILSARLSKSRRLENLIAQLPGEKKNGLFGNLIALSLGLTPNFKSNFDLAEDAKLQLSKDTYDDDLDNLLAQIGDQYADLFLAAKNLSDAILLSDILRVNTEITKAPLSASMIKRYDEHHQDLTLLKALVRQQLPEKYKEIFFDQSKNGYAGYIDGGASQEEFYKFIKPILEKMDGTEELLVKLNREDLLRKQRTFDNGSIPHQIHLGELHAILRRQEDFYPFLKDNREKIEKILTFRIPYYVGPLARGNSRFAWMTRKSEETITPWNFEEVVDKGASAQSFIERMTNFDKNLPNEKVLPKHSLLYEYFTVYNELTKVKYVTEGMRKPAFLSGEQKKAIVDLLFKTNRKVTVKQLKEDYFKKIECFDSVEISGVEDRFNASLGTYHDLLKIIKDKDFLDNEENEDILEDIVLTLTLFEDREMIEERLKTYAHLFDDKVMKQLKRRRYTGWGRLSRKLINGIRDKQSGKTILDFLKSDGFANRNFMQLIHDDSLTFKEDIQKAQVSGQGDSLHEHIANLAGSPAIKKGILQTVKVVDELVKVMGRHKPENIVIEMARENQTTQKGQKNSRERMKRIEEGIKELGSQILKEHPVENTQLQNEKLYLYYLQNGRDMYVDQELDINRLSDYDVDHIVPQSFLKDDSIDNKVLTRSDKARGKSDNVPSEEVVKKMKNYWRQLLNAKLITQRKFDNLTKAERGGLSELDKAGFIKRQLVETRQITKHVAQILDSRMNTKYDENDKLIREVKVITLKSKLVSDFRKDFQFYKVREINNYHHAHDAYLNAVVGTALIKKYPKLESEFVYGDYKVYDVRKMIAKSEQEIGKATAKYFFYSNIMNFFKTEITLANGEIRKRPLIETNGETGEIVWDKGRDFATVRKVLSMPQVNIVKKTEVQTGGFSKESILPKRNSDKLIARKKDWDPKKYGGFDSPTVAYSVLVVAKVEKGKSKKLKSVKELLGITIMERSSFEKNPIDFLEAKGYKEVKKDLIIKLPKYSLFELENGRKRMLASAGELQKGNELALPSKYVNFLYLASHYEKLKGSPEDNEQKQLFVEQHKHYLDEIIEQISEFSKRVILADANLDKVLSAYNKHRDKPIREQAENIIHLFTLTNLGAPAAFKYFDTTIDRKRYTSTKEVLDATLIHQSITGLYETRIDLSQLGGDGGPAPAPAPAPAPGGTLNIEDEHRLHETSKEPDVSLGSTWLSDFPQAWAETGGMGLAVRQAPLIIPLKATSTPVSIKQYPMSQEARLGIKPHIQRLLDQGILVPCQSPWNTPLLPVKKPGTNDYRPVQDLREVNKRVEDIHPTVPNPYNLLSGLPPSHQWYTVLDLKDAFFCLRLHPTSQPLFAFEWRDPEMGISGQLTWTRLPQGFKNSPTLFNEALHRDLADFRIQHPDLILLQYVDDLLLAATSELDCQQGTRALLQTLGNLGYRASAKKAQICQKQVKYLGYLLKEGQRWLTEARKETVMGQPTPKTPRQLREFLGKAGFCRLFIPGFAEMAAPLYPLTKPGTLFNWGPDQQKAYQEIKQALLTAPALGLPDLTKPFELFVDEKQGYAKGVLTQKLGPWRRPVAYLSKKLDPVAAGWPPCLRMVAAIAVLTKDAGKLTMGQPLVILAPHAVEALVKQPPDRWLSNARMTHYQALLLDTDRVQFGPVVALNPATLLPLPEEGLQHNCLDILAEAHGTRPDLTDQPLPDADHTWYTDGSSLLQEGQRKAGAAVTTETEVIWAKALPAGTSAQRAELIALTQALKMAEGKKLNVYTDSRYAFATAHIHGEIYRRRGWLTSEGKEIKNKDEILALLKALFLPKRLSIIHCPGHQKGHSAEARGNRMADQAARKAAITETPDTSTLLAGKRTADGSEFEKRTADGSEFESPKKKAKVE

SEQ ID NO: 2852 - protein, 2094 aa, synthetic construct
MPAAKRVKLDGGDKKYSIGLDIGTNSVGWAVITDEYKVPSKKFKVLGNTDRHSIKKNLIGALLFDSGETAEATRLKRTARRRYTRRKNRICYLQEIFSNEMAKVDDSFFHRLEESFLVEEDKKHERHPIFGNIVDEVAYHEKYPTIYHLRKKLVDSTDKADLRLIYLALAHMIKFRGHFLIEGDLNPDNSDVDKLFIQLVQTYNQLFEENPINASGVDAKAILSARLSKSRRLENLIAQLPGEKKNGLFGNLIALSLGLTPNFKSNFDLAEDAKLQLSKDTYDDDLDNLLAQIGDQYADLFLAAKNLSDAILLSDILRVNTEITKAPLSASMIKRYDEHHQDLTLLKALVRQQLPEKYKEIFFDQSKNGYAGYIDGGASQEEFYKFIKPILEKMDGTEELLVKLNREDLLRKQRTFDNGSIPHQIHLGELHAILRRQEDFYPFLKDNREKIEKILTFRIPYYVGPLARGNSRFAWMTRKSEETITPWNFEEVVDKGASAQSFIERMTNFDKNLPNEKVLPKHSLLYEYFTVYNELTKVKYVTEGMRKPAFLSGEQKKAIVDLLFKTNRKVTVKQLKEDYFKKIECFDSVEISGVEDRFNASLGTYHDLLKIIKDKDFLDNEENEDILEDIVLTLTLFEDREMIEERLKTYAHLFDDKVMKQLKRRRYTGWGRLSRKLINGIRDKQSGKTILDFLKSDGFANRNFMQLIHDDSLTFKEDIQKAQVSGQGDSLHEHIANLAGSPAIKKGILQTVKVVDELVKVMGRHKPENIVIEMARENQTTQKGQKNSRERMKRIEEGIKELGSQILKEHPVENTQLQNEKLYLYYLQNGRDMYVDQELDINRLSDYDVDHIVPQSFLKDDSIDNKVLTRSDKARGKSDNVPSEEVVKKMKNYWRQLLNAKLITQRKFDNLTKAERGGLSELDKAGFIKRQLVETRQITKHVAQILDSRMNTKYDENDKLIREVKVITLKSKLVSDFRKDFQFYKVREINNYHHAHDAYLNAVVGTALIKKYPKLESEFVYGDYKVYDVRKMIAKSEQEIGKATAKYFFYSNIMNFFKTEITLANGEIRKRPLIETNGETGEIVWDKGRDFATVRKVLSMPQVNIVKKTEVQTGGFSKESILPKRNSDKLIARKKDWDPKKYGGFDSPTVAYSVLVVAKVEKGKSKKLKSVKELLGITIMERSSFEKNPIDFLEAKGYKEVKKDLIIKLPKYSLFELENGRKRMLASAGELQKGNELALPSKYVNFLYLASHYEKLKGSPEDNEQKQLFVEQHKHYLDEIIEQISEFSKRVILADANLDKVLSAYNKHRDKPIREQAENIIHLFTLTNLGAPAAFKYFDTTIDRKRYTSTKEVLDATLIHQSITGLYETRIDLSQLGGDGGGGSPAPGSSGGTLNIEDEHRLHETSKEPDVSLGSTWLSDFPQAWAETGGMGLAVRQAPLIIPLKATSTPVSIKQYPMSQEARLGIKPHIQRLLDQGILVPCQSPWNTPLLPVKKPGTNDYRPVQDLREVNKRVEDIHPTVPNPYNLLSGLPPSHQWYTVLDLKDAFFCLRLHPTSQPLFAFEWRDPEMGISGQLTWTRLPQGFKNSPTLFNEALHRDLADFRIQHPDLILLQYVDDLLLAATSELDCQQGTRALLQTLGNLGYRASAKKAQICQKQVKYLGYLLKEGQRWLTEARKETVMGQPTPKTPRQLREFLGKAGFCRLFIPGFAEMAAPLYPLTKPGTLFNWGPDQQKAYQEIKQALLTAPALGLPDLTKPFELFVDEKQGYAKGVLTQKLGPWRRPVAYLSKKLDPVAAGWPPCLRMVAAIAVLTKDAGKLTMGQPLVILAPHAVEALVKQPPDRWLSNARMTHYQALLLDTDRVQFGPVVALNPATLLPLPEEGLQHNCLDILAEAHGTRPDLTDQPLPDADHTWYTDGSSLLQEGQRKAGAAVTTETEVIWAKALPAGTSAQRAELIALTQALKMAEGKKLNVYTDSRYAFATAHIHGEIYRRRGWLTSEGKEIKNKDEILALLKALFLPKRLSIIHCPGHQKGHSAEARGNRMADQAARKAAITETPDTSTLLAGKRTADGSEFEKRTADGSEFESPKKKAKVE

SEQ ID NO: 2853 - protein, 2091 aa, synthetic construct
MPAAKRVKLDGGDKKYSIGLDIGTNSVGWAVITDEYKVPSKKFKVLGNTDRHSIKKNLIGALLFDSGETAEATRLKRTARRRYTRRKNRICYLQEIFSNEMAKVDDSFFHRLEESFLVEEDKKHERHPIFGNIVDEVAYHEKYPTIYHLRKKLVDSTDKADLRLIYLALAHMIKFRGHFLIEGDLNPDNSDVDKLFIQLVQTYNQLFEENPINASGVDAKAILSARLSKSRRLENLIAQLPGEKKNGLFGNLIALSLGLTPNFKSNFDLAEDAKLQLSKDTYDDDLDNLLAQIGDQYADLFLAAKNLSDAILLSDILRVNTEITKAPLSASMIKRYDEHHQDLTLLKALVRQQLPEKYKEIFFDQSKNGYAGYIDGGASQEEFYKFIKPILEKMDGTEELLVKLNREDLLRKQRTFDNGSIPHQIHLGELHAILRRQEDFYPFLKDNREKIEKILTFRIPYYVGPLARGNSRFAWMTRKSEETITPWNFEEVVDKGASAQSFIERMTNFDKNLPNEKVLPKHSLLYEYFTVYNELTKVKYVTEGMRKPAFLSGEQKKAIVDLLFKTNRKVTVKQLKEDYFKKIECFDSVEISGVEDRFNASLGTYHDLLKIIKDKDFLDNEENEDILEDIVLTLTLFEDREMIEERLKTYAHLFDDKVMKQLKRRRYTGWGRLSRKLINGIRDKQSGKTILDFLKSDGFANRNFMQLIHDDSLTFKEDIQKAQVSGQGDSLHEHIANLAGSPAIKKGILQTVKVVDELVKVMGRHKPENIVIEMARENQTTQKGQKNSRERMKRIEEGIKELGSQILKEHPVENTQLQNEKLYLYYLQNGRDMYVDQELDINRLSDYDVDHIVPQSFLKDDSIDNKVLTRSDKARGKSDNVPSEEVVKKMKNYWRQLLNAKLITQRKFDNLTKAERGGLSELDKAGFIKRQLVETRQITKHVAQILDSRMNTKYDENDKLIREVKVITLKSKLVSDFRKDFQFYKVREINNYHHAHDAYLNAVVGTALIKKYPKLESEFVYGDYKVYDVRKMIAKSEQEIGKATAKYFFYSNIMNFFKTEITLANGEIRKRPLIETNGETGEIVWDKGRDFATVRKVLSMPQVNIVKKTEVQTGGFSKESILPKRNSDKLIARKKDWDPKKYGGFDSPTVAYSVLVVAKVEKGKSKKLKSVKELLGITIMERSSFEKNPIDFLEAKGYKEVKKDLIIKLPKYSLFELENGRKRMLASAGELQKGNELALPSKYVNFLYLASHYEKLKGSPEDNEQKQLFVEQHKHYLDEIIEQISEFSKRVILADANLDKVLSAYNKHRDKPIREQAENIIHLFTLTNLGAPAAFKYFDTTIDRKRYTSTKEVLDATLIHQSITGLYETRIDLSQLGGDGGGGSGGSGGTLNIEDEHRLHETSKEPDVSLGSTWLSDFPQAWAETGGMGLAVRQAPLIIPLKATSTPVSIKQYPMSQEARLGIKPHIQRLLDQGILVPCQSPWNTPLLPVKKPGTNDYRPVQDLREVNKRVEDIHPTVPNPYNLLSGLPPSHQWYTVLDLKDAFFCLRLHPTSQPLFAFEWRDPEMGISGQLTWTRLPQGFKNSPTLFNEALHRDLADFRIQHPDLILLQYVDDLLLAATSELDCQQGTRALLQTLGNLGYRASAKKAQICQKQVKYLGYLLKEGQRWLTEARKETVMGQPTPKTPRQLREFLGKAGFCRLFIPGFAEMAAPLYPLTKPGTLFNWGPDQQKAYQEIKQALLTAPALGLPDLTKPFELFVDEKQGYAKGVLTQKLGPWRRPVAYLSKKLDPVAAGWPPCLRMVAAIAVLTKDAGKLTMGQPLVILAPHAVEALVKQPPDRWLSNARMTHYQALLLDTDRVQFGPVVALNPATLLPLPEEGLQHNCLDILAEAHGTRPDLTDQPLPDADHTWYTDGSSLLQEGQRKAGAAVTTETEVIWAKALPAGTSAQRAELIALTQALKMAEGKKLNVYTDSRYAFATAHIHGEIYRRRGWLTSEGKEIKNKDEILALLKALFLPKRLSIIHCPGHQKGHSAEARGNRMADQAARKAAITETPDTSTLLAGKRTADGSEFEKRTADGSEFESPKKKAKVE

SEQ ID NO: 2854 - protein, 2094 aa, synthetic construct
MPAAKRVKLDGGDKKYSIGLDIGTNSVGWAVITDEYKVPSKKFKVLGNTDRHSIKKNLIGALLFDSGETAEATRLKRTARRRYTRRKNRICYLQEIFSNEMAKVDDSFFHRLEESFLVEEDKKHERHPIFGNIVDEVAYHEKYPTIYHLRKKLVDSTDKADLRLIYLALAHMIKFRGHFLIEGDLNPDNSDVDKLFIQLVQTYNQLFEENPINASGVDAKAILSARLSKSRRLENLIAQLPGEKKNGLFGNLIALSLGLTPNFKSNFDLAEDAKLQLSKDTYDDDLDNLLAQIGDQYADLFLAAKNLSDAILLSDILRVNTEITKAPLSASMIKRYDEHHQDLTLLKALVRQQLPEKYKEIFFDQSKNGYAGYIDGGASQEEFYKFIKPILEKMDGTEELLVKLNREDLLRKQRTFDNGSIPHQIHLGELHAILRRQEDFYPFLKDNREKIEKILTFRIPYYVGPLARGNSRFAWMTRKSEETITPWNFEEVVDKGASAQSFIERMTNFDKNLPNEKVLPKHSLLYEYFTVYNELTKVKYVTEGMRKPAFLSGEQKKAIVDLLFKTNRKVTVKQLKEDYFKKIECFDSVEISGVEDRFNASLGTYHDLLKIIKDKDFLDNEENEDILEDIVLTLTLFEDREMIEERLKTYAHLFDDKVMKQLKRRRYTGWGRLSRKLINGIRDKQSGKTILDFLKSDGFANRNFMQLIHDDSLTFKEDIQKAQVSGQGDSLHEHIANLAGSPAIKKGILQTVKVVDELVKVMGRHKPENIVIEMARENQTTQKGQKNSRERMKRIEEGIKELGSQILKEHPVENTQLQNEKLYLYYLQNGRDMYVDQELDINRLSDYDVDHIVPQSFLKDDSIDNKVLTRSDKARGKSDNVPSEEVVKKMKNYWRQLLNAKLITQRKFDNLTKAERGGLSELDKAGFIKRQLVETRQITKHVAQILDSRMNTKYDENDKLIREVKVITLKSKLVSDFRKDFQFYKVREINNYHHAHDAYLNAVVGTALIKKYPKLESEFVYGDYKVYDVRKMIAKSEQEIGKATAKYFFYSNIMNFFKTEITLANGEIRKRPLIETNGETGEIVWDKGRDFATVRKVLSMPQVNIVKKTEVQTGGFSKESILPKRNSDKLIARKKDWDPKKYGGFDSPTVAYSVLVVAKVEKGKSKKLKSVKELLGITIMERSSFEKNPIDFLEAKGYKEVKKDLIIKLPKYSLFELENGRKRMLASAGELQKGNELALPSKYVNFLYLASHYEKLKGSPEDNEQKQLFVEQHKHYLDEIIEQISEFSKRVILADANLDKVLSAYNKHRDKPIREQAENIIHLFTLTNLGAPAAFKYFDTTIDRKRYTSTKEVLDATLIHQSITGLYETRIDLSQLGGDGGGGGGSSGGSGGTLNIEDEHRLHETSKEPDVSLGSTWLSDFPQAWAETGGMGLAVRQAPLIIPLKATSTPVSIKQYPMSQEARLGIKPHIQRLLDQGILVPCQSPWNTPLLPVKKPGTNDYRPVQDLREVNKRVEDIHPTVPNPYNLLSGLPPSHQWYTVLDLKDAFFCLRLHPTSQPLFAFEWRDPEMGISGQLTWTRLPQGFKNSPTLFNEALHRDLADFRIQHPDLILLQYVDDLLLAATSELDCQQGTRALLQTLGNLGYRASAKKAQICQKQVKYLGYLLKEGQRWLTEARKETVMGQPTPKTPRQLREFLGKAGFCRLFIPGFAEMAAPLYPLTKPGTLFNWGPDQQKAYQEIKQALLTAPALGLPDLTKPFELFVDEKQGYAKGVLTQKLGPWRRPVAYLSKKLDPVAAGWPPCLRMVAAIAVLTKDAGKLTMGQPLVILAPHAVEALVKQPPDRWLSNARMTHYQALLLDTDRVQFGPVVALNPATLLPLPEEGLQHNCLDILAEAHGTRPDLTDQPLPDADHTWYTDGSSLLQEGQRKAGAAVTTETEVIWAKALPAGTSAQRAELIALTQALKMAEGKKLNVYTDSRYAFATAHIHGEIYRRRGWLTSEGKEIKNKDEILALLKALFLPKRLSIIHCPGHQKGHSAEARGNRMADQAARKAAITETPDTSTLLAGKRTADGSEFEKRTADGSEFESPKKKAKVE

SEQ ID NO: 2855 - protein, 2091 aa, synthetic construct
MPAAKRVKLDGGDKKYSIGLDIGTNSVGWAVITDEYKVPSKKFKVLGNTDRHSIKKNLIGALLFDSGETAEATRLKRTARRRYTRRKNRICYLQEIFSNEMAKVDDSFFHRLEESFLVEEDKKHERHPIFGNIVDEVAYHEKYPTIYHLRKKLVDSTDKADLRLIYLALAHMIKFRGHFLIEGDLNPDNSDVDKLFIQLVQTYNQLFEENPINASGVDAKAILSARLSKSRRLENLIAQLPGEKKNGLFGNLIALSLGLTPNFKSNFDLAEDAKLQLSKDTYDDDLDNLLAQIGDQYADLFLAAKNLSDAILLSDILRVNTEITKAPLSASMIKRYDEHHQDLTLLKALVRQQLPEKYKEIFFDQSKNGYAGYIDGGASQEEFYKFIKPILEKMDGTEELLVKLNREDLLRKQRTFDNGSIPHQIHLGELHAILRRQEDFYPFLKDNREKIEKILTFRIPYYVGPLARGNSRFAWMTRKSEETITPWNFEEVVDKGASAQSFIERMTNFDKNLPNEKVLPKHSLLYEYFTVYNELTKVKYVTEGMRKPAFLSGEQKKAIVDLLFKTNRKVTVKQLKEDYFKKIECFDSVEISGVEDRFNASLGTYHDLLKIIKDKDFLDNEENEDILEDIVLTLTLFEDREMIEERLKTYAHLFDDKVMKQLKRRRYTGWGRLSRKLINGIRDKQSGKTILDFLKSDGFANRNFMQLIHDDSLTFKEDIQKAQVSGQGDSLHEHIANLAGSPAIKKGILQTVKVVDELVKVMGRHKPENIVIEMARENQTTQKGQKNSRERMKRIEEGIKELGSQILKEHPVENTQLQNEKLYLYYLQNGRDMYVDQELDINRLSDYDVDHIVPQSFLKDDSIDNKVLTRSDKARGKSDNVPSEEVVKKMKNYWRQLLNAKLITQRKFDNLTKAERGGLSELDKAGFIKRQLVETRQITKHVAQILDSRMNTKYDENDKLIREVKVITLKSKLVSDFRKDFQFYKVREINNYHHAHDAYLNAVVGTALIKKYPKLESEFVYGDYKVYDVRKMIAKSEQEIGKATAKYFFYSNIMNFFKTEITLANGEIRKRPLIETNGETGEIVWDKGRDFATVRKVLSMPQVNIVKKTEVQTGGFSKESILPKRNSDKLIARKKDWDPKKYGGFDSPTVAYSVLVVAKVEKGKSKKLKSVKELLGITIMERSSFEKNPIDFLEAKGYKEVKKDLIIKLPKYSLFELENGRKRMLASAGELQKGNELALPSKYVNFLYLASHYEKLKGSPEDNEQKQLFVEQHKHYLDEIIEQISEFSKRVILADANLDKVLSAYNKHRDKPIREQAENIIHLFTLTNLGAPAAFKYFDTTIDRKRYTSTKEVLDATLIHQSITGLYETRIDLSQLGGDGGGSSGGSGGTLNIEDEHRLHETSKEPDVSLGSTWLSDFPQAWAETGGMGLAVRQAPLIIPLKATSTPVSIKQYPMSQEARLGIKPHIQRLLDQGILVPCQSPWNTPLLPVKKPGTNDYRPVQDLREVNKRVEDIHPTVPNPYNLLSGLPPSHQWYTVLDLKDAFFCLRLHPTSQPLFAFEWRDPEMGISGQLTWTRLPQGFKNSPTLFNEALHRDLADFRIQHPDLILLQYVDDLLLAATSELDCQQGTRALLQTLGNLGYRASAKKAQICQKQVKYLGYLLKEGQRWLTEARKETVMGQPTPKTPRQLREFLGKAGFCRLFIPGFAEMAAPLYPLTKPGTLFNWGPDQQKAYQEIKQALLTAPALGLPDLTKPFELFVDEKQGYAKGVLTQKLGPWRRPVAYLSKKLDPVAAGWPPCLRMVAAIAVLTKDAGKLTMGQPLVILAPHAVEALVKQPPDRWLSNARMTHYQALLLDTDRVQFGPVVALNPATLLPLPEEGLQHNCLDILAEAHGTRPDLTDQPLPDADHTWYTDGSSLLQEGQRKAGAAVTTETEVIWAKALPAGTSAQRAELIALTQALKMAEGKKLNVYTDSRYAFATAHIHGEIYRRRGWLTSEGKEIKNKDEILALLKALFLPKRLSIIHCPGHQKGHSAEARGNRMADQAARKAAITETPDTSTLLAGKRTADGSEFEKRTADGSEFESPKKKAKVE

SEQ ID NO: 2856 - protein, 2093 aa, synthetic construct
MPAAKRVKLDGGDKKYSIGLDIGTNSVGWAVITDEYKVPSKKFKVLGNTDRHSIKKNLIGALLFDSGETAEATRLKRTARRRYTRRKNRICYLQEIFSNEMAKVDDSFFHRLEESFLVEEDKKHERHPIFGNIVDEVAYHEKYPTIYHLRKKLVDSTDKADLRLIYLALAHMIKFRGHFLIEGDLNPDNSDVDKLFIQLVQTYNQLFEENPINASGVDAKAILSARLSKSRRLENLIAQLPGEKKNGLFGNLIALSLGLTPNFKSNFDLAEDAKLQLSKDTYDDDLDNLLAQIGDQYADLFLAAKNLSDAILLSDILRVNTEITKAPLSASMIKRYDEHHQDLTLLKALVRQQLPEKYKEIFFDQSKNGYAGYIDGGASQEEFYKFIKPILEKMDGTEELLVKLNREDLLRKQRTFDNGSIPHQIHLGELHAILRRQEDFYPFLKDNREKIEKILTFRIPYYVGPLARGNSRFAWMTRKSEETITPWNFEEVVDKGASAQSFIERMTNFDKNLPNEKVLPKHSLLYEYFTVYNELTKVKYVTEGMRKPAFLSGEQKKAIVDLLFKTNRKVTVKQLKEDYFKKIECFDSVEISGVEDRFNASLGTYHDLLKIIKDKDFLDNEENEDILEDIVLTLTLFEDREMIEERLKTYAHLFDDKVMKQLKRRRYTGWGRLSRKLINGIRDKQSGKTILDFLKSDGFANRNFMQLIHDDSLTFKEDIQKAQVSGQGDSLHEHIANLAGSPAIKKGILQTVKVVDELVKVMGRHKPENIVIEMARENQTTQKGQKNSRERMKRIEEGIKELGSQILKEHPVENTQLQNEKLYLYYLQNGRDMYVDQELDINRLSDYDVDHIVPQSFLKDDSIDNKVLTRSDKARGKSDNVPSEEVVKKMKNYWRQLLNAKLITQRKFDNLTKAERGGLSELDKAGFIKRQLVETRQITKHVAQILDSRMNTKYDENDKLIREVKVITLKSKLVSDFRKDFQFYKVREINNYHHAHDAYLNAVVGTALIKKYPKLESEFVYGDYKVYDVRKMIAKSEQEIGKATAKYFFYSNIMNFFKTEITLANGEIRKRPLIETNGETGEIVWDKGRDFATVRKVLSMPQVNIVKKTEVQTGGFSKESILPKRNSDKLIARKKDWDPKKYGGFDSPTVAYSVLVVAKVEKGKSKKLKSVKELLGITIMERSSFEKNPIDFLEAKGYKEVKKDLIIKLPKYSLFELENGRKRMLASAGELQKGNELALPSKYVNFLYLASHYEKLKGSPEDNEQKQLFVEQHKHYLDEIIEQISEFSKRVILADANLDKVLSAYNKHRDKPIREQAENIIHLFTLTNLGAPAAFKYFDTTIDRKRYTSTKEVLDATLIHQSITGLYETRIDLSQLGGDGGGGGEAAAKGGTLNIEDEHRLHETSKEPDVSLGSTWLSDFPQAWAETGGMGLAVRQAPLIIPLKATSTPVSIKQYPMSQEARLGIKPHIQRLLDQGILVPCQSPWNTPLLPVKKPGTNDYRPVQDLREVNKRVEDIHPTVPNPYNLLSGLPPSHQWYTVLDLKDAFFCLRLHPTSQPLFAFEWRDPEMGISGQLTWTRLPQGFKNSPTLFNEALHRDLADFRIQHPDLILLQYVDDLLLAATSELDCQQGTRALLQTLGNLGYRASAKKAQICQKQVKYLGYLLKEGQRWLTEARKETVMGQPTPKTPRQLREFLGKAGFCRLFIPGFAEMAAPLYPLTKPGTLFNWGPDQQKAYQEIKQALLTAPALGLPDLTKPFELFVDEKQGYAKGVLTQKLGPWRRPVAYLSKKLDPVAAGWPPCLRMVAAIAVLTKDAGKLTMGQPLVILAPHAVEALVKQPPDRWLSNARMTHYQALLLDTDRVQFGPVVALNPATLLPLPEEGLQHNCLDILAEAHGTRPDLTDQPLPDADHTWYTDGSSLLQEGQRKAGAAVTTETEVIWAKALPAGTSAQRAELIALTQALKMAEGKKLNVYTDSRYAFATAHIHGEIYRRRGWLTSEGKEIKNKDEILALLKALFLPKRLSIIHCPGHQKGHSAEARGNRMADQAARKAAITETPDTSTLLAGKRTADGSEFEKRTADGSEFESPKKKAKVE

SEQ ID NO: 2857 - protein, 2096 aa, synthetic construct
MPAAKRVKLDGGDKKYSIGLDIGTNSVGWAVITDEYKVPSKKFKVLGNTDRHSIKKNLIGALLFDSGETAEATRLKRTARRRYTRRKNRICYLQEIFSNEMAKVDDSFFHRLEESFLVEEDKKHERHPIFGNIVDEVAYHEKYPTIYHLRKKLVDSTDKADLRLIYLALAHMIKFRGHFLIEGDLNPDNSDVDKLFIQLVQTYNQLFEENPINASGVDAKAILSARLSKSRRLENLIAQLPGEKKNGLFGNLIALSLGLTPNFKSNFDLAEDAKLQLSKDTYDDDLDNLLAQIGDQYADLFLAAKNLSDAILLSDILRVNTEITKAPLSASMIKRYDEHHQDLTLLKALVRQQLPEKYKEIFFDQSKNGYAGYIDGGASQEEFYKFIKPILEKMDGTEELLVKLNREDLLRKQRTFDNGSIPHQIHLGELHAILRRQEDFYPFLKDNREKIEKILTFRIPYYVGPLARGNSRFAWMTRKSEETITPWNFEEVVDKGASAQSFIERMTNFDKNLPNEKVLPKHSLLYEYFTVYNELTKVKYVTEGMRKPAFLSGEQKKAIVDLLFKTNRKVTVKQLKEDYFKKIECFDSVEISGVEDRFNASLGTYHDLLKIIKDKDFLDNEENEDILEDIVLTLTLFEDREMIEERLKTYAHLFDDKVMKQLKRRRYTGWGRLSRKLINGIRDKQSGKTILDFLKSDGFANRNFMQLIHDDSLTFKEDIQKAQVSGQGDSLHEHIANLAGSPAIKKGILQTVKVVDELVKVMGRHKPENIVIEMARENQTTQKGQKNSRERMKRIEEGIKELGSQILKEHPVENTQLQNEKLYLYYLQNGRDMYVDQELDINRLSDYDVDHIVPQSFLKDDSIDNKVLTRSDKARGKSDNVPSEEVVKKMKNYWRQLLNAKLITQRKFDNLTKAERGGLSELDKAGFIKRQLVETRQITKHVAQILDSRMNTKYDENDKLIREVKVITLKSKLVSDFRKDFQFYKVREINNYHHAHDAYLNAVVGTALIKKYPKLESEFVYGDYKVYDVRKMIAKSEQEIGKATAKYFFYSNIMNFFKTEITLANGEIRKRPLIETNGETGEIVWDKGRDFATVRKVLSMPQVNIVKKTEVQTGGFSKESILPKRNSDKLIARKKDWDPKKYGGFDSPTVAYSVLVVAKVEKGKSKKLKSVKELLGITIMERSSFEKNPIDFLEAKGYKEVKKDLIIKLPKYSLFELENGRKRMLASAGELQKGNELALPSKYVNFLYLASHYEKLKGSPEDNEQKQLFVEQHKHYLDEIIEQISEFSKRVILADANLDKVLSAYNKHRDKPIREQAENIIHLFTLTNLGAPAAFKYFDTTIDRKRYTSTKEVLDATLIHQSITGLYETRIDLSQLGGDGGGGSEAAAKPAPGGTLNIEDEHRLHETSKEPDVSLGSTWLSDFPQAWAETGGMGLAVRQAPLIIPLKATSTPVSIKQYPMSQEARLGIKPHIQRLLDQGILVPCQSPWNTPLLPVKKPGTNDYRPVQDLREVNKRVEDIHPTVPNPYNLLSGLPPSHQWYTVLDLKDAFFCLRLHPTSQPLFAFEWRDPEMGISGQLTWTRLPQGFKNSPTLFNEALHRDLADFRIQHPDLILLQYVDDLLLAATSELDCQQGTRALLQTLGNLGYRASAKKAQICQKQVKYLGYLLKEGQRWLTEARKETVMGQPTPKTPRQLREFLGKAGFCRLFIPGFAEMAAPLYPLTKPGTLFNWGPDQQKAYQEIKQALLTAPALGLPDLTKPFELFVDEKQGYAKGVLTQKLGPWRRPVAYLSKKLDPVAAGWPPCLRMVAAIAVLTKDAGKLTMGQPLVILAPHAVEALVKQPPDRWLSNARMTHYQALLLDTDRVQFGPVVALNPATLLPLPEEGLQHNCLDILAEAHGTRPDLTDQPLPDADHTWYTDGSSLLQEGQRKAGAAVTTETEVIWAKALPAGTSAQRAELIALTQALKMAEGKKLNVYTDSRYAFATAHIHGEIYRRRGWLTSEGKEIKNKDEILALLKALFLPKRLSIIHCPGHQKGHSAEARGNRMADQAARKAAITETPDTSTLLAGKRTADGSEFEKRTADGSEFESPKKKAKVE

SEQ ID NO: 2858 - protein, 2101 aa, synthetic construct
MPAAKRVKLDGGDKKYSIGLDIGTNSVGWAVITDEYKVPSKKFKVLGNTDRHSIKKNLIGALLFDSGETAEATRLKRTARRRYTRRKNRICYLQEIFSNEMAKVDDSFFHRLEESFLVEEDKKHERHPIFGNIVDEVAYHEKYPTIYHLRKKLVDSTDKADLRLIYLALAHMIKFRGHFLIEGDLNPDNSDVDKLFIQLVQTYNQLFEENPINASGVDAKAILSARLSKSRRLENLIAQLPGEKKNGLFGNLIALSLGLTPNFKSNFDLAEDAKLQLSKDTYDDDLDNLLAQIGDQYADLFLAAKNLSDAILLSDILRVNTEITKAPLSASMIKRYDEHHQDLTLLKALVRQQLPEKYKEIFFDQSKNGYAGYIDGGASQEEFYKFIKPILEKMDGTEELLVKLNREDLLRKQRTFDNGSIPHQIHLGELHAILRRQEDFYPFLKDNREKIEKILTFRIPYYVGPLARGNSRFAWMTRKSEETITPWNFEEVVDKGASAQSFIERMTNFDKNLPNEKVLPKHSLLYEYFTVYNELTKVKYVTEGMRKPAFLSGEQKKAIVDLLFKTNRKVTVKQLKEDYFKKIECFDSVEISGVEDRFNASLGTYHDLLKIIKDKDFLDNEENEDILEDIVLTLTLFEDREMIEERLKTYAHLFDDKVMKQLKRRRYTGWGRLSRKLINGIRDKQSGKTILDFLKSDGFANRNFMQLIHDDSLTFKEDIQKAQVSGQGDSLHEHIANLAGSPAIKKGILQTVKVVDELVKVMGRHKPENIVIEMARENQTTQKGQKNSRERMKRIEEGIKELGSQILKEHPVENTQLQNEKLYLYYLQNGRDMYVDQELDINRLSDYDVDHIVPQSFLKDDSIDNKVLTRSDKARGKSDNVPSEEVVKKMKNYWRQLLNAKLITQRKFDNLTKAERGGLSELDKAGFIKRQLVETRQITKHVAQILDSRMNTKYDENDKLIREVKVITLKSKLVSDFRKDFQFYKVREINNYHHAHDAYLNAVVGTALIKKYPKLESEFVYGDYKVYDVRKMIAKSEQEIGKATAKYFFYSNIMNFFKTEITLANGEIRKRPLIETNGETGEIVWDKGRDFATVRKVLSMPQVNIVKKTEVQTGGFSKESILPKRNSDKLIARKKDWDPKKYGGFDSPTVAYSVLVVAKVEKGKSKKLKSVKELLGITIMERSSFEKNPIDFLEAKGYKEVKKDLIIKLPKYSLFELENGRKRMLASAGELQKGNELALPSKYVNFLYLASHYEKLKGSPEDNEQKQLFVEQHKHYLDEIIEQISEFSKRVILADANLDKVLSAYNKHRDKPIREQAENIIHLFTLTNLGAPAAFKYFDTTIDRKRYTSTKEVLDATLIHQSITGLYETRIDLSQLGGDGGSGSETPGTSESATPESGGTLNIEDEHRLHETSKEPDVSLGSTWLSDFPQAWAETGGMGLAVRQAPLIIPLKATSTPVSIKQYPMSQEARLGIKPHIQRLLDQGILVPCQSPWNTPLLPVKKPGTNDYRPVQDLREVNKRVEDIHPTVPNPYNLLSGLPPSHQWYTVLDLKDAFFCLRLHPTSQPLFAFEWRDPEMGISGQLTWTRLPQGFKNSPTLFNEALHRDLADFRIQHPDLILLQYVDDLLLAATSELDCQQGTRALLQTLGNLGYRASAKKAQICQKQVKYLGYLLKEGQRWLTEARKETVMGQPTPKTPRQLREFLGKAGFCRLFIPGFAEMAAPLYPLTKPGTLFNWGPDQQKAYQEIKQALLTAPALGLPDLTKPFELFVDEKQGYAKGVLTQKLGPWRRPVAYLSKKLDPVAAGWPPCLRMVAAIAVLTKDAGKLTMGQPLVILAPHAVEALVKQPPDRWLSNARMTHYQALLLDTDRVQFGPVVALNPATLLPLPEEGLQHNCLDILAEAHGTRPDLTDQPLPDADHTWYTDGSSLLQEGQRKAGAAVTTETEVIWAKALPAGTSAQRAELIALTQALKMAEGKKLNVYTDSRYAFATAHIHGEIYRRRGWLTSEGKEIKNKDEILALLKALFLPKRLSIIHCPGHQKGHSAEARGNRMADQAARKAAITETPDTSTLLAGKRTADGSEFEKRTADGSEFESPKKKAKVE

SEQ ID NO: 2859 - protein, 2094 aa, synthetic construct
MPAAKRVKLDGGDKKYSIGLDIGTNSVGWAVITDEYKVPSKKFKVLGNTDRHSIKKNLIGALLFDSGETAEATRLKRTARRRYTRRKNRICYLQEIFSNEMAKVDDSFFHRLEESFLVEEDKKHERHPIFGNIVDEVAYHEKYPTIYHLRKKLVDSTDKADLRLIYLALAHMIKFRGHFLIEGDLNPDNSDVDKLFIQLVQTYNQLFEENPINASGVDAKAILSARLSKSRRLENLIAQLPGEKKNGLFGNLIALSLGLTPNFKSNFDLAEDAKLQLSKDTYDDDLDNLLAQIGDQYADLFLAAKNLSDAILLSDILRVNTEITKAPLSASMIKRYDEHHQDLTLLKALVRQQLPEKYKEIFFDQSKNGYAGYIDGGASQEEFYKFIKPILEKMDGTEELLVKLNREDLLRKQRTFDNGSIPHQIHLGELHAILRRQEDFYPFLKDNREKIEKILTFRIPYYVGPLARGNSRFAWMTRKSEETITPWNFEEVVDKGASAQSFIERMTNFDKNLPNEKVLPKHSLLYEYFTVYNELTKVKYVTEGMRKPAFLSGEQKKAIVDLLFKTNRKVTVKQLKEDYFKKIECFDSVEISGVEDRFNASLGTYHDLLKIIKDKDFLDNEENEDILEDIVLTLTLFEDREMIEERLKTYAHLFDDKVMKQLKRRRYTGWGRLSRKLINGIRDKQSGKTILDFLKSDGFANRNFMQLIHDDSLTFKEDIQKAQVSGQGDSLHEHIANLAGSPAIKKGILQTVKVVDELVKVMGRHKPENIVIEMARENQTTQKGQKNSRERMKRIEEGIKELGSQILKEHPVENTQLQNEKLYLYYLQNGRDMYVDQELDINRLSDYDVDHIVPQSFLKDDSIDNKVLTRSDKARGKSDNVPSEEVVKKMKNYWRQLLNAKLITQRKFDNLTKAERGGLSELDKAGFIKRQLVETRQITKHVAQILDSRMNTKYDENDKLIREVKVITLKSKLVSDFRKDFQFYKVREINNYHHAHDAYLNAVVGTALIKKYPKLESEFVYGDYKVYDVRKMIAKSEQEIGKATAKYFFYSNIMNFFKTEITLANGEIRKRPLIETNGETGEIVWDKGRDFATVRKVLSMPQVNIVKKTEVQTGGFSKESILPKRNSDKLIARKKDWDPKKYGGFDSPTVAYSVLVVAKVEKGKSKKLKSVKELLGITIMERSSFEKNPIDFLEAKGYKEVKKDLIIKLPKYSLFELENGRKRMLASAGELQKGNELALPSKYVNFLYLASHYEKLKGSPEDNEQKQLFVEQHKHYLDEIIEQISEFSKRVILADANLDKVLSAYNKHRDKPIREQAENIIHLFTLTNLGAPAAFKYFDTTIDRKRYTSTKEVLDATLIHQSITGLYETRIDLSQLGGDGGGSSGGSGGGGGTLNIEDEHRLHETSKEPDVSLGSTWLSDFPQAWAETGGMGLAVRQAPLIIPLKATSTPVSIKQYPMSQEARLGIKPHIQRLLDQGILVPCQSPWNTPLLPVKKPGTNDYRPVQDLREVNKRVEDIHPTVPNPYNLLSGLPPSHQWYTVLDLKDAFFCLRLHPTSQPLFAFEWRDPEMGISGQLTWTRLPQGFKNSPTLFNEALHRDLADFRIQHPDLILLQYVDDLLLAATSELDCQQGTRALLQTLGNLGYRASAKKAQICQKQVKYLGYLLKEGQRWLTEARKETVMGQPTPKTPRQLREFLGKAGFCRLFIPGFAEMAAPLYPLTKPGTLFNWGPDQQKAYQEIKQALLTAPALGLPDLTKPFELFVDEKQGYAKGVLTQKLGPWRRPVAYLSKKLDPVAAGWPPCLRMVAAIAVLTKDAGKLTMGQPLVILAPHAVEALVKQPPDRWLSNARMTHYQALLLDTDRVQFGPVVALNPATLLPLPEEGLQHNCLDILAEAHGTRPDLTDQPLPDADHTWYTDGSSLLQEGQRKAGAAVTTETEVIWAKALPAGTSAQRAELIALTQALKMAEGKKLNVYTDSRYAFATAHIHGEIYRRRGWLTSEGKEIKNKDEILALLKALFLPKRLSIIHCPGHQKGHSAEARGNRMADQAARKAAITETPDTSTLLAGKRTADGSEFEKRTADGSEFESPKKKAKVE

SEQ ID NO: 2860 - protein, 2096 aa, synthetic construct
MPAAKRVKLDGGDKKYSIGLDIGTNSVGWAVITDEYKVPSKKFKVLGNTDRHSIKKNLIGALLFDSGETAEATRLKRTARRRYTRRKNRICYLQEIFSNEMAKVDDSFFHRLEESFLVEEDKKHERHPIFGNIVDEVAYHEKYPTIYHLRKKLVDSTDKADLRLIYLALAHMIKFRGHFLIEGDLNPDNSDVDKLFIQLVQTYNQLFEENPINASGVDAKAILSARLSKSRRLENLIAQLPGEKKNGLFGNLIALSLGLTPNFKSNFDLAEDAKLQLSKDTYDDDLDNLLAQIGDQYADLFLAAKNLSDAILLSDILRVNTEITKAPLSASMIKRYDEHHQDLTLLKALVRQQLPEKYKEIFFDQSKNGYAGYIDGGASQEEFYKFIKPILEKMDGTEELLVKLNREDLLRKQRTFDNGSIPHQIHLGELHAILRRQEDFYPFLKDNREKIEKILTFRIPYYVGPLARGNSRFAWMTRKSEETITPWNFEEVVDKGASAQSFIERMTNFDKNLPNEKVLPKHSLLYEYFTVYNELTKVKYVTEGMRKPAFLSGEQKKAIVDLLFKTNRKVTVKQLKEDYFKKIECFDSVEISGVEDRFNASLGTYHDLLKIIKDKDFLDNEENEDILEDIVLTLTLFEDREMIEERLKTYAHLFDDKVMKQLKRRRYTGWGRLSRKLINGIRDKQSGKTILDFLKSDGFANRNFMQLIHDDSLTFKEDIQKAQVSGQGDSLHEHIANLAGSPAIKKGILQTVKVVDELVKVMGRHKPENIVIEMARENQTTQKGQKNSRERMKRIEEGIKELGSQILKEHPVENTQLQNEKLYLYYLQNGRDMYVDQELDINRLSDYDVDHIVPQSFLKDDSIDNKVLTRSDKARGKSDNVPSEEVVKKMKNYWRQLLNAKLITQRKFDNLTKAERGGLSELDKAGFIKRQLVETRQITKHVAQILDSRMNTKYDENDKLIREVKVITLKSKLVSDFRKDFQFYKVREINNYHHAHDAYLNAVVGTALIKKYPKLESEFVYGDYKVYDVRKMIAKSEQEIGKATAKYFFYSNIMNFFKTEITLANGEIRKRPLIETNGETGEIVWDKGRDFATVRKVLSMPQVNIVKKTEVQTGGFSKESILPKRNSDKLIARKKDWDPKKYGGFDSPTVAYSVLVVAKVEKGKSKKLKSVKELLGITIMERSSFEKNPIDFLEAKGYKEVKKDLIIKLPKYSLFELENGRKRMLASAGELQKGNELALPSKYVNFLYLASHYEKLKGSPEDNEQKQLFVEQHKHYLDEIIEQISEFSKRVILADANLDKVLSAYNKHRDKPIREQAENIIHLFTLTNLGAPAAFKYFDTTIDRKRYTSTKEVLDATLIHQSITGLYETRIDLSQLGGDGGGSSGGSEAAAKGGTLNIEDEHRLHETSKEPDVSLGSTWLSDFPQAWAETGGMGLAVRQAPLIIPLKATSTPVSIKQYPMSQEARLGIKPHIQRLLDQGILVPCQSPWNTPLLPVKKPGTNDYRPVQDLREVNKRVEDIHPTVPNPYNLLSGLPPSHQWYTVLDLKDAFFCLRLHPTSQPLFAFEWRDPEMGISGQLTWTRLPQGFKNSPTLFNEALHRDLADFRIQHPDLILLQYVDDLLLAATSELDCQQGTRALLQTLGNLGYRASAKKAQICQKQVKYLGYLLKEGQRWLTEARKETVMGQPTPKTPRQLREFLGKAGFCRLFIPGFAEMAAPLYPLTKPGTLFNWGPDQQKAYQEIKQALLTAPALGLPDLTKPFELFVDEKQGYAKGVLTQKLGPWRRPVAYLSKKLDPVAAGWPPCLRMVAAIAVLTKDAGKLTMGQPLVILAPHAVEALVKQPPDRWLSNARMTHYQALLLDTDRVQFGPVVALNPATLLPLPEEGLQHNCLDILAEAHGTRPDLTDQPLPDADHTWYTDGSSLLQEGQRKAGAAVTTETEVIWAKALPAGTSAQRAELIALTQALKMAEGKKLNVYTDSRYAFATAHIHGEIYRRRGWLTSEGKEIKNKDEILALLKALFLPKRLSIIHCPGHQKGHSAEARGNRMADQAARKAAITETPDTSTLLAGKRTADGSEFEKRTADGSEFESPKKKAKVE

SEQ ID NO: 2861 - protein, 2091 aa, synthetic construct
MPAAKRVKLDGGDKKYSIGLDIGTNSVGWAVITDEYKVPSKKFKVLGNTDRHSIKKNLIGALLFDSGETAEATRLKRTARRRYTRRKNRICYLQEIFSNEMAKVDDSFFHRLEESFLVEEDKKHERHPIFGNIVDEVAYHEKYPTIYHLRKKLVDSTDKADLRLIYLALAHMIKFRGHFLIEGDLNPDNSDVDKLFIQLVQTYNQLFEENPINASGVDAKAILSARLSKSRRLENLIAQLPGEKKNGLFGNLIALSLGLTPNFKSNFDLAEDAKLQLSKDTYDDDLDNLLAQIGDQYADLFLAAKNLSDAILLSDILRVNTEITKAPLSASMIKRYDEHHQDLTLLKALVRQQLPEKYKEIFFDQSKNGYAGYIDGGASQEEFYKFIKPILEKMDGTEELLVKLNREDLLRKQRTFDNGSIPHQIHLGELHAILRRQEDFYPFLKDNREKIEKILTFRIPYYVGPLARGNSRFAWMTRKSEETITPWNFEEVVDKGASAQSFIERMTNFDKNLPNEKVLPKHSLLYEYFTVYNELTKVKYVTEGMRKPAFLSGEQKKAIVDLLFKTNRKVTVKQLKEDYFKKIECFDSVEISGVEDRFNASLGTYHDLLKIIKDKDFLDNEENEDILEDIVLTLTLFEDREMIEERLKTYAHLFDDKVMKQLKRRRYTGWGRLSRKLINGIRDKQSGKTILDFLKSDGFANRNFMQLIHDDSLTFKEDIQKAQVSGQGDSLHEHIANLAGSPAIKKGILQTVKVVDELVKVMGRHKPENIVIEMARENQTTQKGQKNSRERMKRIEEGIKELGSQILKEHPVENTQLQNEKLYLYYLQNGRDMYVDQELDINRLSDYDVDHIVPQSFLKDDSIDNKVLTRSDKARGKSDNVPSEEVVKKMKNYWRQLLNAKLITQRKFDNLTKAERGGLSELDKAGFIKRQLVETRQITKHVAQILDSRMNTKYDENDKLIREVKVITLKSKLVSDFRKDFQFYKVREINNYHHAHDAYLNAVVGTALIKKYPKLESEFVYGDYKVYDVRKMIAKSEQEIGKATAKYFFYSNIMNFFKTEITLANGEIRKRPLIETNGETGEIVWDKGRDFATVRKVLSMPQVNIVKKTEVQTGGFSKESILPKRNSDKLIARKKDWDPKKYGGFDSPTVAYSVLVVAKVEKGKSKKLKSVKELLGITIMERSSFEKNPIDFLEAKGYKEVKKDLIIKLPKYSLFELENGRKRMLASAGELQKGNELALPSKYVNFLYLASHYEKLKGSPEDNEQKQLFVEQHKHYLDEIIEQISEFSKRVILADANLDKVLSAYNKHRDKPIREQAENIIHLFTLTNLGAPAAFKYFDTTIDRKRYTSTKEVLDATLIHQSITGLYETRIDLSQLGGDGGGGSGGGGGTLNIEDEHRLHETSKEPDVSLGSTWLSDFPQAWAETGGMGLAVRQAPLIIPLKATSTPVSIKQYPMSQEARLGIKPHIQRLLDQGILVPCQSPWNTPLLPVKKPGTNDYRPVQDLREVNKRVEDIHPTVPNPYNLLSGLPPSHQWYTVLDLKDAFFCLRLHPTSQPLFAFEWRDPEMGISGQLTWTRLPQGFKNSPTLFNEALHRDLADFRIQHPDLILLQYVDDLLLAATSELDCQQGTRALLQTLGNLGYRASAKKAQICQKQVKYLGYLLKEGQRWLTEARKETVMGQPTPKTPRQLREFLGKAGFCRLFIPGFAEMAAPLYPLTKPGTLFNWGPDQQKAYQEIKQALLTAPALGLPDLTKPFELFVDEKQGYAKGVLTQKLGPWRRPVAYLSKKLDPVAAGWPPCLRMVAAIAVLTKDAGKLTMGQPLVILAPHAVEALVKQPPDRWLSNARMTHYQALLLDTDRVQFGPVVALNPATLLPLPEEGLQHNCLDILAEAHGTRPDLTDQPLPDADHTWYTDGSSLLQEGQRKAGAAVTTETEVIWAKALPAGTSAQRAELIALTQALKMAEGKKLNVYTDSRYAFATAHIHGEIYRRRGWLTSEGKEIKNKDEILALLKALFLPKRLSIIHCPGHQKGHSAEARGNRMADQAARKAAITETPDTSTLLAGKRTADGSEFEKRTADGSEFESPKKKAKVE

SEQ ID NO: 2862 - protein, 2116 aa, synthetic construct; identical to SEQ ID NO: 2637

SEQ ID NO: 2863 - protein, 2116 aa, synthetic construct
MPAAKRVKLDGGDKKYSIGLDIGTNSVGWAVITDEYKVPSKKFKVLGNTDRHSIKKNLIGALLFDSGETAEATRLKRTARRRYTRRKNRICYLQEIFSNEMAKVDDSFFHRLEESFLVEEDKKHERHPIFGNIVDEVAYHEKYPTIYHLRKKLVDSTDKADLRLIYLALAHMIKFRGHFLIEGDLNPDNSDVDKLFIQLVQTYNQLFEENPINASGVDAKAILSARLSKSRRLENLIAQLPGEKKNGLFGNLIALSLGLTPNFKSNFDLAEDAKLQLSKDTYDDDLDNLLAQIGDQYADLFLAAKNLSDAILLSDILRVNTEITKAPLSASMIKRYDEHHQDLTLLKALVRQQLPEKYKEIFFDQSKNGYAGYIDGGASQEEFYKFIKPILEKMDGTEELLVKLNREDLLRKQRTFDNGSIPHQIHLGELHAILRRQEDFYPFLKDNREKIEKILTFRIPYYVGPLARGNSRFAWMTRKSEETITPWNFEEVVDKGASAQSFIERMTNFDKNLPNEKVLPKHSLLYEYFTVYNELTKVKYVTEGMRKPAFLSGEQKKAIVDLLFKTNRKVTVKQLKEDYFKKIECFDSVEISGVEDRFNASLGTYHDLLKIIKDKDFLDNEENEDILEDIVLTLTLFEDREMIEERLKTYAHLFDDKVMKQLKRRRYTGWGRLSRKLINGIRDKQSGKTILDFLKSDGFANRNFMQLIHDDSLTFKEDIQKAQVSGQGDSLHEHIANLAGSPAIKKGILQTVKVVDELVKVMGRHKPENIVIEMARENQTTQKGQKNSRERMKRIEEGIKELGSQILKEHPVENTQLQNEKLYLYYLQNGRDMYVDQELDINRLSDYDVDHIVPQSFLKDDSIDNKVLTRSDKARGKSDNVPSEEVVKKMKNYWRQLLNAKLITQRKFDNLTKAERGGLSELDKAGFIKRQLVETRQITKHVAQILDSRMNTKYDENDKLIREVKVITLKSKLVSDFRKDFQFYKVREINNYHHAHDAYLNAVVGTALIKKYPKLESEFVYGDYKVYDVRKMIAKSEQEIGKATAKYFFYSNIMNFFKTEITLANGEIRKRPLIETNGETGEIVWDKGRDFATVRKVLSMPQVNIVKKTEVQTGGFSKESILPKRNSDKLIARKKDWDPKKYGGFDSPTVAYSVLVVAKVEKGKSKKLKSVKELLGITIMERSSFEKNPIDFLEAKGYKEVKKDLIIKLPKYSLFELENGRKRMLASAGELQKGNELALPSKYVNFLYLASHYEKLKGSPEDNEQKQLFVEQHKHYLDEIIEQISEFSKRVILADANLDKVLSAYNKHRDKPIREQAENIIHLFTLTNLGAPAAFKYFDTTIDRKRYTSTKEVLDATLIHQSITGLYETRIDLSQLGGDGGEAAAKGGGGGSGGTLNIEDEYRLHETSKEPDVSLGSTWLSDFPQAWAETGGMGLAVRQAPLIIPLKATSTPVSIKQYPMSQEARLGIKPHIQRLLDQGILVPCQSPWNTPLLPVKKPGTNDYRPVQDLREVNKRVEDIHPTVPNPYNLLSGLPPSHQWYTVLDLKDAFFCLRLHPTSQPLFAFEWRDPEMGISGQLTWTRLPQGFKNSPTLFNEALHRDLADFRIQHPDLILLQYVDDLLLAATSELDCQQGTRALLQTLGNLGYRASAKKAQICQKQVKYLGYLLKEGQRWLTEARKETVMGQPTPKTPRQLREFLGKAGFCRLFIPGFAEMAAPLYPLTKPGTLFNWGPDQQKAYQEIKQALLTAPALGLPDLTKPFELFVDEKQGYAKGVLTQKLGPWRRPVAYLSKKLDPVAAGWPPCLRMVAAIAVLTKDAGKLTMGQPLVILAPHAVEALVKQPPDRWLSNARMTHYQALLLDTDRVQFGPVVALNPATLLPLPEEGLQHNCLDILAEAHGTRPDLTDQPLPDADHTWYTDGSSLLQEGQRKAGAAVTTETEVIWAKALPAGTSAQRAELIALTQALKMAEGKKLNVYTDSRYAFATAHIHGEIYRRRGWLTSEGKEIKNKDEILALLKALFLPKRLSIIHCPGHQKGHSAEARGNRMADQAARKAAITETPDTSTLLIENSSPSGGSKRTADGSEFEAGKRTADGSEFEKRTADGSEFESPKKKAKVE

SEQ ID NO: 2864 - protein, 2108 aa, synthetic construct; identical to SEQ ID NO: 2655

SEQ ID NO: 2865 - protein, 2108 aa, synthetic construct; identical to SEQ ID NO: 2624

SEQ ID NO: 2866 - protein, 2116 aa, synthetic construct; identical to SEQ ID NO: 2692

SEQ ID NO: 2867 - protein, 2117 aa, synthetic construct; identical to SEQ ID NO: 2665

SEQ ID NO: 2868 - protein, 2118 aa, synthetic construct
MPAAKRVKLDGGDKKYSIGLDIGTNSVGWAVITDEYKVPSKKFKVLGNTDRHSIKKNLIGALLFDSGETAEATRLKRTARRRYTRRKNRICYLQEIFSNEMAKVDDSFFHRLEESFLVEEDKKHERHPIFGNIVDEVAYHEKYPTIYHLRKKLVDSTDKADLRLIYLALAHMIKFRGHFLIEGDLNPDNSDVDKLFIQLVQTYNQLFEENPINASGVDAKAILSARLSKSRRLENLIAQLPGEKKNGLFGNLIALSLGLTPNFKSNFDLAEDAKLQLSKDTYDDDLDNLLAQIGDQYADLFLAAKNLSDAILLSDILRVNTEITKAPLSASMIKRYDEHHQDLTLLKALVRQQLPEKYKEIFFDQSKNGYAGYIDGGASQEEFYKFIKPILEKMDGTEELLVKLNREDLLRKQRTFDNGSIPHQIHLGELHAILRRQEDFYPFLKDNREKIEKILTFRIPYYVGPLARGNSRFAWMTRKSEETITPWNFEEVVDKGASAQSFIERMTNFDKNLPNEKVLPKHSLLYEYFTVYNELTKVKYVTEGMRKPAFLSGEQKKAIVDLLFKTNRKVTVKQLKEDYFKKIECFDSVEISGVEDRFNASLGTYHDLLKIIKDKDFLDNEENEDILEDIVLTLTLFEDREMIEERLKTYAHLFDDKVMKQLKRRRYTGWGRLSRKLINGIRDKQSGKTILDFLKSDGFANRNFMQLIHDDSLTFKEDIQKAQVSGQGDSLHEHIANLAGSPAIKKGILQTVKVVDELVKVMGRHKPENIVIEMARENQTTQKGQKNSRERMKRIEEGIKELGSQILKEHPVENTQLQNEKLYLYYLQNGRDMYVDQELDINRLSDYDVDHIVPQSFLKDDSIDNKVLTRSDKARGKSDNVPSEEVVKKMKNYWRQLLNAKLITQRKFDNLTKAERGGLSELDKAGFIKRQLVETRQITKHVAQILDSRMNTKYDENDKLIREVKVITLKSKLVSDFRKDFQFYKVREINNYHHAHDAYLNAVVGTALIKKYPKLESEFVYGDYKVYDVRKMIAKSEQEIGKATAKYFFYSNIMNFFKTEITLANGEIRKRPLIETNGETGEIVWDKGRDFATVRKVLSMPQVNIVKKTEVQTGGFSKESILPKRNSDKLIARKKDWDPKKYGGFDSPTVAYSVLVVAKVEKGKSKKLKSVKELLGITIMERSSFEKNPIDFLEAKGYKEVKKDLIIKLPKYSLFELENGRKRMLASAGELQKGNELALPSKYVNFLYLASHYEKLKGSPEDNEQKQLFVEQHKHYLDEIIEQISEFSKRVILADANLDKVLSAYNKHRDKPIREQAENIIHLFTLTNLGAPAAFKYFDTTIDRKRYTSTKEVLDATLIHQSITGLYETRIDLSQLGGDGGPAPAPAPAPAPAPGGTLNIEDEYRLHETSKEPDVSLGSTWLSDFPQAWAETGGMGLAVRQAPLIIPLKATSTPVSIKQYPMSQEARLGIKPHIQRLLDQGILVPCQSPWNTPLLPVKKPGTNDYRPVQDLREVNKRVEDIHPTVPNPYNLLSGLPPSHQWYTVLDLKDAFFCLRLHPTSQPLFAFEWRDPEMGISGQLTWTRLPQGFKNSPTLFNEALHRDLADFRIQHPDLILLQYVDDLLLAATSELDCQQGTRALLQTLGNLGYRASAKKAQICQKQVKYLGYLLKEGQRWLTEARKETVMGQPTPKTPRQLREFLGKAGFCRLFIPGFAEMAAPLYPLTKPGTLFNWGPDQQKAYQEIKQALLTAPALGLPDLTKPFELFVDEKQGYAKGVLTQKLGPWRRPVAYLSKKLDPVAAGWPPCLRMVAAIAVLTKDAGKLTMGQPLVILAPHAVEALVKQPPDRWLSNARMTHYQALLLDTDRVQFGPVVALNPATLLPLPEEGLQHNCLDILAEAHGTRPDLTDQPLPDADHTWYTDGSSLLQEGQRKAGAAVTTETEVIWAKALPAGTSAQRAELIALTQALKMAEGKKLNVYTDSRYAFATAHIHGEIYRRRGWLTSEGKEIKNKDEILALLKALFLPKRLSIIHCPGHQKGHSAEARGNRMADQAARKAAITETPDTSTLLIENSSPSGGSKRTADGSEFEAGKRTADGSEFEKRTADGSEFESPKKKAKVE

SEQ ID NO: 2869 - protein, 2114 aa, synthetic construct
MPAAKRVKLDGGDKKYSIGLDIGTNSVGWAVITDEYKVPSKKFKVLGNTDRHSIKKNLIGALLFDSGETAEATRLKRTARRRYTRRKNRICYLQEIFSNEMAKVDDSFFHRLEESFLVEEDKKHERHPIFGNIVDEVAYHEKYPTIYHLRKKLVDSTDKADLRLIYLALAHMIKFRGHFLIEGDLNPDNSDVDKLFIQLVQTYNQLFEENPINASGVDAKAILSARLSKSRRLENLIAQLPGEKKNGLFGNLIALSLGLTPNFKSNFDLAEDAKLQLSKDTYDDDLDNLLAQIGDQYADLFLAAKNLSDAILLSDILRVNTEITKAPLSASMIKRYDEHHQDLTLLKALVRQQLPEKYKEIFFDQSKNGYAGYIDGGASQEEFYKFIKPILEKMDGTEELLVKLNREDLLRKQRTFDNGSIPHQIHLGELHAILRRQEDFYPFLKDNREKIEKILTFRIPYYVGPLARGNSRFAWMTRKSEETITPWNFEEVVDKGASAQSFIERMTNFDKNLPNEKVLPKHSLLYEYFTVYNELTKVKYVTEGMRKPAFLSGEQKKAIVDLLFKTNRKVTVKQLKEDYFKKIECFDSVEISGVEDRFNASLGTYHDLLKIIKDKDFLDNEENEDILEDIVLTLTLFEDREMIEERLKTYAHLFDDKVMKQLKRRRYTGWGRLSRKLINGIRDKQSGKTILDFLKSDGFANRNFMQLIHDDSLTFKEDIQKAQVSGQGDSLHEHIANLAGSPAIKKGILQTVKVVDELVKVMGRHKPENIVIEMARENQTTQKGQKNSRERMKRIEEGIKELGSQILKEHPVENTQLQNEKLYLYYLQNGRDMYVDQELDINRLSDYDVDHIVPQSFLKDDSIDNKVLTRSDKARGKSDNVPSEEVVKKMKNYWRQLLNAKLITQRKFDNLTKAERGGLSELDKAGFIKRQLVETRQITKHVAQILDSRMNTKYDENDKLIREVKVITLKSKLVSDFRKDFQFYKVREINNYHHAHDAYLNAVVGTALIKKYPKLESEFVYGDYKVYDVRKMIAKSEQEIGKATAKYFFYSNIMNFFKTEITLANGEIRKRPLIETNGETGEIVWDKGRDFATVRKVLSMPQVNIVKKTEVQTGGFSKESILPKRNSDKLIARKKDWDPKKYGGFDSPTVAYSVLVVAKVEKGKSKKLKSVKELLGITIMERSSFEKNPIDFLEAKGYKEVKKDLIIKLPKYSLFELENGRKRMLASAGELQKGNELALPSKYVNFLYLASHYEKLKGSPEDNEQKQLFVEQHKHYLDEIIEQISEFSKRVILADANLDKVLSAYNKHRDKPIREQAENIIHLFTLTNLGAPAAFKYFDTTIDRKRYTSTKEVLDATLIHQSITGLYETRIDLSQLGGDGGPAPGGGGSSGGTLNIEDEYRLHETSKEPDVSLGSTWLSDFPQAWAETGGMGLAVRQAPLIIPLKATSTPVSIKQYPMSQEARLGIKPHIQRLLDQGILVPCQSPWNTPLLPVKKPGTNDYRPVQDLREVNKRVEDIHPTVPNPYNLLSGLPPSHQWYTVLDLKDAFFCLRLHPTSQPLFAFEWRDPEMGISGQLTWTRLPQGFKNSPTLFNEALHRDLADFRIQHPDLILLQYVDDLLLAATSELDCQQGTRALLQTLGNLGYRASAKKAQICQKQVKYLGYLLKEGQRWLTEARKETVMGQPTPKTPRQLREFLGKAGFCRLFIPGFAEMAAPLYPLTKPGTLFNWGPDQQKAYQEIKQALLTAPALGLPDLTKPFELFVDEKQGYAKGVLTQKLGPWRRPVAYLSKKLDPVAAGWPPCLRMVAAIAVLTKDAGKLTMGQPLVILAPHAVEALVKQPPDRWLSNARMTHYQALLLDTDRVQFGPVVALNPATLLPLPEEGLQHNCLDILAEAHGTRPDLTDQPLPDADHTWYTDGSSLLQEGQRKAGAAVTTETEVIWAKALPAGTSAQRAELIALTQALKMAEGKKLNVYTDSRYAFATAHIHGEIYRRRGWLTSEGKEIKNKDEILALLKALFLPKRLSIIHCPGHQKGHSAEARGNRMADQAARKAAITETPDTSTLLIENSSPSGGSKRTADGSEFEAGKRTADGSEFEKRTADGSEFESPKKKAKVE

SEQ ID NO: 2870 - protein, 2116 aa, synthetic construct; identical to SEQ ID NO: 2677

SEQ ID NO: 2871 - protein, 2111 aa, synthetic construct; identical to SEQ ID NO: 2676

SEQ ID NO: 2872 - protein, 2116 aa, synthetic construct
MPAAKRVKLDGGDKKYSIGLDIGTNSVGWAVITDEYKVPSKKFKVLGNTDRHSIKKNLIGALLFDSGETAEATRLKRTARRRYTRRKNRICYLQEIFSNEMAKVDDSFFHRLEESFLVEEDKKHERHPIFGNIVDEVAYHEKYPTIYHLRKKLVDSTDKADLRLIYLALAHMIKFRGHFLIEGDLNPDNSDVDKLFIQLVQTYNQLFEENPINASGVDAKAILSARLSKSRRLENLIAQLPGEKKNGLFGNLIALSLGLTPNFKSNFDLAEDAKLQLSKDTYDDDLDNLLAQIGDQYADLFLAAKNLSDAILLSDILRVNTEITKAPLSASMIKRYDEHHQDLTLLKALVRQQLPEKYKEIFFDQSKNGYAGYIDGGASQEEFYKFIKPILEKMDGTEELLVKLNREDLLRKQRTFDNGSIPHQIHLGELHAILRRQEDFYPFLKDNREKIEKILTFRIPYYVGPLARGNSRFAWMTRKSEETITPWNFEEVVDKGASAQSFIERMTNFDKNLPNEKVLPKHSLLYEYFTVYNELTKVKYVTEGMRKPAFLSGEQKKAIVDLLFKTNRKVTVKQLKEDYFKKIECFDSVEISGVEDRFNASLGTYHDLLKIIKDKDFLDNEENEDILEDIVLTLTLFEDREMIEERLKTYAHLFDDKVMKQLKRRRYTGWGRLSRKLINGIRDKQSGKTILDFLKSDGFANRNFMQLIHDDSLTFKEDIQKAQVSGQGDSLHEHIANLAGSPAIKKGILQTVKVVDELVKVMGRHKPENIVIEMARENQTTQKGQKNSRERMKRIEEGIKELGSQILKEHPVENTQLQNEKLYLYYLQNGRDMYVDQELDINRLSDYDVDHIVPQSFLKDDSIDNKVLTRSDKARGKSDNVPSEEVVKKMKNYWRQLLNAKLITQRKFDNLTKAERGGLSELDKAGFIKRQLVETRQITKHVAQILDSRMNTKYDENDKLIREVKVITLKSKLVSDFRKDFQFYKVREINNYHHAHDAYLNAVVGTALIKKYPKLESEFVYGDYKVYDVRKMIAKSEQEIGKATAKYFFYSNIMNFFKTEITLANGEIRKRPLIETNGETGEIVWDKGRDFATVRKVLSMPQVNIVKKTEVQTGGFSKESILPKRNSDKLIARKKDWDPKKYGGFDSPTVAYSVLVVAKVEKGKSKKLKSVKELLGITIMERSSFEKNPIDFLEAKGYKEVKKDLIIKLPKYSLFELENGRKRMLASAGELQKGNELALPSKYVNFLYLASHYEKLKGSPEDNEQKQLFVEQHKHYLDEIIEQISEFSKRVILADANLDKVLSAYNKHRDKPIREQAENIIHLFTLTNLGAPAAFKYFDTTIDRKRYTSTKEVLDATLIHQSITGLYETRIDLSQLGGDGGPAPGGGEAAAKGGTLNIEDEYRLHETSKEPDVSLGSTWLSDFPQAWAETGGMGLAVRQAPLIIPLKATSTPVSIKQYPMSQEARLGIKPHIQRLLDQGILVPCQSPWNTPLLPVKKPGTNDYRPVQDLREVNKRVEDIHPTVPNPYNLLSGLPPSHQWYTVLDLKDAFFCLRLHPTSQPLFAFEWRDPEMGISGQLTWTRLPQGFKNSPTLFNEALHRDLADFRIQHPDLILLQYVDDLLLAATSELDCQQGTRALLQTLGNLGYRASAKKAQICQKQVKYLGYLLKEGQRWLTEARKETVMGQPTPKTPRQLREFLGKAGFCRLFIPGFAEMAAPLYPLTKPGTLFNWGPDQQKAYQEIKQALLTAPALGLPDLTKPFELFVDEKQGYAKGVLTQKLGPWRRPVAYLSKKLDPVAAGWPPCLRMVAAIAVLTKDAGKLTMGQPLVILAPHAVEALVKQPPDRWLSNARMTHYQALLLDTDRVQFGPVVALNPATLLPLPEEGLQHNCLDILAEAHGTRPDLTDQPLPDADHTWYTDGSSLLQEGQRKAGAAVTTETEVIWAKALPAGTSAQRAELIALTQALKMAEGKKLNVYTDSRYAFATAHIHGEIYRRRGWLTSEGKEIKNKDEILALLKALFLPKRLSIIHCPGHQKGHSAEARGNRMADQAARKAAITETPDTSTLLIENSSPSGGSKRTADGSEFEAGKRTADGSEFEKRTADGSEFESPKKKAKVE

SEQ ID NO: 2873 - protein, 2116 aa, synthetic construct; identical to SEQ ID NO: 2651

SEQ ID NO: 2874 - protein, 2116 aa, synthetic construct; identical to SEQ ID NO: 2638

SEQ ID NO: 2875 - protein, 2114 aa, synthetic construct; identical to SEQ ID NO: 2685

SEQ ID NO: 2876 - protein, 2114 aa, synthetic construct; identical to SEQ ID NO: 2698

SEQ ID NO: 2877 - protein, 2120 aa, synthetic construct; identical to SEQ ID NO: 2627

SEQ ID NO: 2878 - protein, 2114 aa, synthetic construct; identical to SEQ ID NO: 2649

SEQ ID NO: 2879 - protein, 2116 aa, synthetic construct
MPAAKRVKLDGGDKKYSIGLDIGTNSVGWAVITDEYKVPSKKFKVLGNTDRHSIKKNLIGALLFDSGETAEATRLKRTARRRYTRRKNRICYLQEIFSNEMAKVDDSFFHRLEESFLVEEDKKHERHPIFGNIVDEVAYHEKYPTIYHLRKKLVDSTDKADLRLIYLALAHMIKFRGHFLIEGDLNPDNSDVDKLFIQLVQTYNQLFEENPINASGVDAKAILSARLSKSRRLENLIAQLPGEKKNGLFGNLIALSLGLTPNFKSNFDLAEDAKLQLSKDTYDDDLDNLLAQIGDQYADLFLAAKNLSDAILLSDILRVNTEITKAPLSASMIKRYDEHHQDLTLLKALVRQQLPEKYKEIFFDQSKNGYAGYIDGGASQEEFYKFIKPILEKMDGTEELLVKLNREDLLRKQRTFDNGSIPHQIHLGELHAILRRQEDFYPFLKDNREKIEKILTFRIPYYVGPLARGNSRFAWMTRKSEETITPWNFEEVVDKGASAQSFIERMTNFDKNLPNEKVLPKHSLLYEYFTVYNELTKVKYVTEGMRKPAFLSGEQKKAIVDLLFKTNRKVTVKQLKEDYFKKIECFDSVEISGVEDRFNASLGTYHDLLKIIKDKDFLDNEENEDILEDIVLTLTLFEDREMIEERLKTYAHLFDDKVMKQLKRRRYTGWGRLSRKLINGIRDKQSGKTILDFLKSDGFANRNFMQLIHDDSLTFKEDIQKAQVSGQGDSLHEHIANLAGSPAIKKGILQTVKVVDELVKVMGRHKPENIVIEMARENQTTQKGQKNSRERMKRIEEGIKELGSQILKEHPVENTQLQNEKLYLYYLQNGRDMYVDQELDINRLSDYDVDHIVPQSFLKDDSIDNKVLTRSDKARGKSDNVPSEEVVKKMKNYWRQLLNAKLITQRKFDNLTKAERGGLSELDKAGFIKRQLVETRQITKHVAQILDSRMNTKYDENDKLIREVKVITLKSKLVSDFRKDFQFYKVREINNYHHAHDAYLNAVVGTALIKKYPKLESEFVYGDYKVYDVRKMIAKSEQEIGKATAKYFFYSNIMNFFKTEITLANGEIRKRPLIETNGETGEIVWDKGRDFATVRKVLSMPQVNIVKKTEVQTGGFSKESILPKRNSDKLIARKKDWDPKKYGGFDSPTVAYSVLVVAKVEKGKSKKLKSVKELLGITIMERSSFEKNPIDFLEAKGYKEVKKDLIIKLPKYSLFELENGRKRMLASAGELQKGNELALPSKYVNFLYLASHYEKLKGSPEDNEQKQLFVEQHKHYLDEIIEQISEFSKRVILADANLDKVLSAYNKHRDKPIREQAENIIHLFTLTNLGAPAAFKYFDTTIDRKRYTSTKEVLDATLIHQSITGLYETRIDLSQLGGDGGGGGEAAAKPAPGGTLNIEDEYRLHETSKEPDVSLGSTWLSDFPQAWAETGGMGLAVRQAPLIIPLKATSTPVSIKQYPMSQEARLGIKPHIQRLLDQGILVPCQSPWNTPLLPVKKPGTNDYRPVQDLREVNKRVEDIHPTVPNPYNLLSGLPPSHQWYTVLDLKDAFFCLRLHPTSQPLFAFEWRDPEMGISGQLTWTRLPQGFKNSPTLFNEALHRDLADFRIQHPDLILLQYVDDLLLAATSELDCQQGTRALLQTLGNLGYRASAKKAQICQKQVKYLGYLLKEGQRWLTEARKETVMGQPTPKTPRQLREFLGKAGFCRLFIPGFAEMAAPLYPLTKPGTLFNWGPDQQKAYQEIKQALLTAPALGLPDLTKPFELFVDEKQGYAKGVLTQKLGPWRRPVAYLSKKLDPVAAGWPPCLRMVAAIAVLTKDAGKLTMGQPLVILAPHAVEALVKQPPDRWLSNARMTHYQALLLDTDRVQFGPVVALNPATLLPLPEEGLQHNCLDILAEAHGTRPDLTDQPLPDADHTWYTDGSSLLQEGQRKAGAAVTTETEVIWAKALPAGTSAQRAELIALTQALKMAEGKKLNVYTDSRYAFATAHIHGEIYRRRGWLTSEGKEIKNKDEILALLKALFLPKRLSIIHCPGHQKGHSAEARGNRMADQAARKAAITETPDTSTLLIENSSPSGGSKRTADGSEFEAGKRTADGSEFEKRTADGSEFESPKKKAKVE

SEQ ID NO: 2880 - protein, 2130 aa, synthetic construct; identical to SEQ ID NO: 2678

SEQ ID NO: 2881 - protein, 2110 aa, synthetic construct; identical to SEQ ID NO: 2620

SEQ ID NO: 2882 - protein, 2117 aa, synthetic construct; identical to SEQ ID NO: 2687

SEQ ID NO: 2883 - protein, 2113 aa, synthetic construct
MPAAKRVKLDGGDKKYSIGLDIGTNSVGWAVITDEYKVPSKKFKVLGNTDRHSIKKNLIGALLFDSGETAEATRLKRTARRRYTRRKNRICYLQEIFSNEMAKVDDSFFHRLEESFLVEEDKKHERHPIFGNIVDEVAYHEKYPTIYHLRKKLVDSTDKADLRLIYLALAHMIKFRGHFLIEGDLNPDNSDVDKLFIQLVQTYNQLFEENPINASGVDAKAILSARLSKSRRLENLIAQLPGEKKNGLFGNLIALSLGLTPNFKSNFDLAEDAKLQLSKDTYDDDLDNLLAQIGDQYADLFLAAKNLSDAILLSDILRVNTEITKAPLSASMIKRYDEHHQDLTLLKALVRQQLPEKYKEIFFDQSKNGYAGYIDGGASQEEFYKFIKPILEKMDGTEELLVKLNREDLLRKQRTFDNGSIPHQIHLGELHAILRRQEDFYPFLKDNREKIEKILTFRIPYYVGPLARGNSRFAWMTRKSEETITPWNFEEVVDKGASAQSFIERMTNFDKNLPNEKVLPKHSLLYEYFTVYNELTKVKYVTEGMRKPAFLSGEQKKAIVDLLFKTNRKVTVKQLKEDYFKKIECFDSVEISGVEDRFNASLGTYHDLLKIIKDKDFLDNEENEDILEDIVLTLTLFEDREMIEERLKTYAHLFDDKVMKQLKRRRYTGWGRLSRKLINGIRDKQSGKTILDFLKSDGFANRNFMQLIHDDSLTFKEDIQKAQVSGQGDSLHEHIANLAGSPAIKKGILQTVKVVDELVKVMGRHKPENIVIEMARENQTTQKGQKNSRERMKRIEEGIKELGSQILKEHPVENTQLQNEKLYLYYLQNGRDMYVDQELDINRLSDYDVDHIVPQSFLKDDSIDNKVLTRSDKARGKSDNVPSEEVVKKMKNYWRQLLNAKLITQRKFDNLTKAERGGLSELDKAGFIKRQLVETRQITKHVAQILDSRMNTKYDENDKLIREVKVITLKSKLVSDFRKDFQFYKVREINNYHHAHDAYLNAVVGTALIKKYPKLESEFVYGDYKVYDVRKMIAKSEQEIGKATAKYFFYSNIMNFFKTEITLANGEIRKRPLIETNGETGEIVWDKGRDFATVRKVLSMPQVNIVKKTEVQTGGFSKESILPKRNSDKLIARKKDWDPKKYGGFDSPTVAYSVLVVAKVEKGKSKKLKSVKELLGITIMERSSFEKNPIDFLEAKGYKEVKKDLIIKLPKYSLFELENGRKRMLASAGELQKGNELALPSKYVNFLYLASHYEKLKGSPEDNEQKQLFVEQHKHYLDEIIEQISEFSKRVILADANLDKVLSAYNKHRDKPIREQAENIIHLFTLTNLGAPAAFKYFDTTIDRKRYTSTKEVLDATLIHQSITGLYETRIDLSQLGGDGGPAPEAAAKGGTLNIEDEYRLHETSKEPDVSLGSTWLSDFPQAWAETGGMGLAVRQAPLIIPLKATSTPVSIKQYPMSQEARLGIKPHIQRLLDQGILVPCQSPWNTPLLPVKKPGTNDYRPVQDLREVNKRVEDIHPTVPNPYNLLSGLPPSHQWYTVLDLKDAFFCLRLHPTSQPLFAFEWRDPEMGISGQLTWTRLPQGFKNSPTLFNEALHRDLADFRIQHPDLILLQYVDDLLLAATSELDCQQGTRALLQTLGNLGYRASAKKAQICQKQVKYLGYLLKEGQRWLTEARKETVMGQPTPKTPRQLREFLGKAGFCRLFIPGFAEMAAPLYPLTKPGTLFNWGPDQQKAYQEIKQALLTAPALGLPDLTKPFELFVDEKQGYAKGVLTQKLGPWRRPVAYLSKKLDPVAAGWPPCLRMVAAIAVLTKDAGKLTMGQPLVILAPHAVEALVKQPPDRWLSNARMTHYQALLLDTDRVQFGPVVALNPATLLPLPEEGLQHNCLDILAEAHGTRPDLTDQPLPDADHTWYTDGSSLLQEGQRKAGAAVTTETEVIWAKALPAGTSAQRAELIALTQALKMAEGKKLNVYTDSRYAFATAHIHGEIYRRRGWLTSEGKEIKNKDEILALLKALFLPKRLSIIHCPGHQKGHSAEARGNRMADQAARKAAITETPDTSTLLIENSSPSGGSKRTADGSEFEAGKRTADGSEFEKRTADGSEFESPKKKAKVE

SEQ ID NO: 2884 - protein, 2116 aa, synthetic construct; identical to SEQ ID NO: 2674

SEQ ID NO: 2885 - protein, 2116 aa, synthetic construct; identical to SEQ ID NO: 2688

SEQ ID NO: 2886 - protein, 2111 aa, synthetic construct; identical to SEQ ID NO: 2653

SEQ ID NO: 2887 - protein, 2115 aa, synthetic construct; identical to SEQ ID NO: 2647

SEQ ID NO: 2888 - protein, 2125 aa, synthetic construct; identical to SEQ ID NO: 2610

SEQ ID NO: 2889 - protein, 2116 aa, synthetic construct; identical to SEQ ID NO: 2683

SEQ ID NO: 2890 - protein, 2114 aa, synthetic construct; identical to SEQ ID NO: 2633

SEQ ID NO: 2891 - protein, 2116 aa, synthetic construct; identical to SEQ ID NO: 2641

SEQ ID NO: 2892 - protein, 2138 aa, synthetic construct
MPAAKRVKLDGGDKKYSIGLDIGTNSVGWAVITDEYKVPSKKFKVLGNTDRHSIKKNLIGALLFDSGETAEATRLKRTARRRYTRRKNRICYLQEIFSNEMAKVDDSFFHRLEESFLVEEDKKHERHPIFGNIVDEVAYHEKYPTIYHLRKKLVDSTDKADLRLIYLALAHMIKFRGHFLIEGDLNPDNSDVDKLFIQLVQTYNQLFEENPINASGVDAKAILSARLSKSRRLENLIAQLPGEKKNGLFGNLIALSLGLTPNFKSNFDLAEDAKLQLSKDTYDDDLDNLLAQIGDQYADLFLAAKNLSDAILLSDILRVNTEITKAPLSASMIKRYDEHHQDLTLLKALVRQQLPEKYKEIFFDQSKNGYAGYIDGGASQEEFYKFIKPILEKMDGTEELLVKLNREDLLRKQRTFDNGSIPHQIHLGELHAILRRQEDFYPFLKDNREKIEKILTFRIPYYVGPLARGNSRFAWMTRKSEETITPWNFEEVVDKGASAQSFIERMTNFDKNLPNEKVLPKHSLLYEYFTVYNELTKVKYVTEGMRKPAFLSGEQKKAIVDLLFKTNRKVTVKQLKEDYFKKIECFDSVEISGVEDRFNASLGTYHDLLKIIKDKDFLDNEENEDILEDIVLTLTLFEDREMIEERLKTYAHLFDDKVMKQLKRRRYTGWGRLSRKLINGIRDKQSGKTILDFLKSDGFANRNFMQLIHDDSLTFKEDIQKAQVSGQGDSLHEHIANLAGSPAIKKGILQTVKVVDELVKVMGRHKPENIVIEMARENQTTQKGQKNSRERMKRIEEGIKELGSQILKEHPVENTQLQNEKLYLYYLQNGRDMYVDQELDINRLSDYDVDHIVPQSFLKDDSIDNKVLTRSDKARGKSDNVPSEEVVKKMKNYWRQLLNAKLITQRKFDNLTKAERGGLSELDKAGFIKRQLVETRQITKHVAQILDSRMNTKYDENDKLIREVKVITLKSKLVSDFRKDFQFYKVREINNYHHAHDAYLNAVVGTALIKKYPKLESEFVYGDYKVYDVRKMIAKSEQEIGKATAKYFFYSNIMNFFKTEITLANGEIRKRPLIETNGETGEIVWDKGRDFATVRKVLSMPQVNIVKKTEVQTGGFSKESILPKRNSDKLIARKKDWDPKKYGGFDSPTVAYSVLVVAKVEKGKSKKLKSVKELLGITIMERSSFEKNPIDFLEAKGYKEVKKDLIIKLPKYSLFELENGRKRMLASAGELQKGNELALPSKYVNFLYLASHYEKLKGSPEDNEQKQLFVEQHKHYLDEIIEQISEFSKRVILADANLDKVLSAYNKHRDKPIREQAENIIHLFTLTNLGAPAAFKYFDTTIDRKRYTSTKEVLDATLIHQSITGLYETRIDLSQLGGDGGSGGSSGGSSGSETPGTSESATPESSGGSSGGSSGGTLNIEDEYRLHETSKEPDVSLGSTWLSDFPQAWAETGGMGLAVRQAPLIIPLKATSTPVSIKQYPMSQEARLGIKPHIQRLLDQGILVPCQSPWNTPLLPVKKPGTNDYRPVQDLREVNKRVEDIHPTVPNPYNLLSGLPPSHQWYTVLDLKDAFFCLRLHPTSQPLFAFEWRDPEMGISGQLTWTRLPQGFKNSPTLFNEALHRDLADFRIQHPDLILLQYVDDLLLAATSELDCQQGTRALLQTLGNLGYRASAKKAQICQKQVKYLGYLLKEGQRWLTEARKETVMGQPTPKTPRQLREFLGKAGFCRLFIPGFAEMAAPLYPLTKPGTLFNWGPDQQKAYQEIKQALLTAPALGLPDLTKPFELFVDEKQGYAKGVLTQKLGPWRRPVAYLSKKLDPVAAGWPPCLRMVAAIAVLTKDAGKLTMGQPLVILAPHAVEALVKQPPDRWLSNARMTHYQALLLDTDRVQFGPVVALNPATLLPLPEEGLQHNCLDILAEAHGTRPDLTDQPLPDADHTWYTDGSSLLQEGQRKAGAAVTTETEVIWAKALPAGTSAQRAELIALTQALKMAEGKKLNVYTDSRYAFATAHIHGEIYRRRGWLTSEGKEIKNKDEILALLKALFLPKRLSIIHCPGHQKGHSAEARGNRMADQAARKAAITETPDTSTLLIENSSPSGGSKRTADGSEFEAGKRTADGSEFEKRTADGSEFESPKKKAKVE

SEQ ID NO: 2893 - protein, 2116 aa, synthetic construct; identical to SEQ ID NO: 2701

SEQ ID NO: 2894 - protein, 2114 aa, synthetic construct; identical to SEQ ID NO: 2684

SEQ ID NO: 2895 - protein, 2114 aa, synthetic construct; identical to SEQ ID NO: 2622

SEQ ID NO: 2896 - protein, 2116 aa, synthetic construct; identical to SEQ ID NO: 2645

SEQ ID NO: 2897 - protein, 2116 aa, synthetic construct; identical to SEQ ID NO: 2658

SEQ ID NO: 2898 - protein, 2114 aa, synthetic construct; identical to SEQ ID NO: 2670

SEQ ID NO: 2899 - protein, 2110 aa, synthetic construct
MPAAKRVKLDGGDKKYSIGLDIGTNSVGWAVITDEYKVPSKKFKVLGNTDRHSIKKNLIGALLFDSGETAEATRLKRTARRRYTRRKNRICYLQEIFSNEMAKVDDSFFHRLEESFLVEEDKKHERHPIFGNIVDEVAYHEKYPTIYHLRKKLVDSTDKADLRLIYLALAHMIKFRGHFLIEGDLNPDNSDVDKLFIQLVQTYNQLFEENPINASGVDAKAILSARLSKSRRLENLIAQLPGEKKNGLFGNLIALSLGLTPNFKSNFDLAEDAKLQLSKDTYDDDLDNLLAQIGDQYADLFLAAKNLSDAILLSDILRVNTEITKAPLSASMIKRYDEHHQDLTLLKALVRQQLPEKYKEIFFDQSKNGYAGYIDGGASQEEFYKFIKPILEKMDGTEELLVKLNREDLLRKQRTFDNGSIPHQIHLGELHAILRRQEDFYPFLKDNREKIEKILTFRIPYYVGPLARGNSRFAWMTRKSEETITPWNFEEVVDKGASAQSFIERMTNFDKNLPNEKVLPKHSLLYEYFTVYNELTKVKYVTEGMRKPAFLSGEQKKAIVDLLFKTNRKVTVKQLKEDYFKKIECFDSVEISGVEDRFNASLGTYHDLLKIIKDKDFLDNEENEDILEDIVLTLTLFEDREMIEERLKTYAHLFDDKVMKQLKRRRYTGWGRLSRKLINGIRDKQSGKTILDFLKSDGFANRNFMQLIHDDSLTFKEDIQKAQVSGQGDSLHEHIANLAGSPAIKKGILQTVKVVDELVKVMGRHKPENIVIEMARENQTTQKGQKNSRERMKRIEEGIKELGSQILKEHPVENTQLQNEKLYLYYLQNGRDMYVDQELDINRLSDYDVDHIVPQSFLKDDSIDNKVLTRSDKARGKSDNVPSEEVVKKMKNYWRQLLNAKLITQRKFDNLTKAERGGLSELDKAGFIKRQLVETRQITKHVAQILDSRMNTKYDENDKLIREVKVITLKSKLVSDFRKDFQFYKVREINNYHHAHDAYLNAVVGTALIKKYPKLESEFVYGDYKVYDVRKMIAKSEQEIGKATAKYFFYSNIMNFFKTEITLANGEIRKRPLIETNGETGEIVWDKGRDFATVRKVLSMPQVNIVKKTEVQTGGFSKESILPKRNSDKLIARKKDWDPKKYGGFDSPTVAYSVLVVAKVEKGKSKKLKSVKELLGITIMERSSFEKNPIDFLEAKGYKEVKKDLIIKLPKYSLFELENGRKRMLASAGELQKGNELALPSKYVNFLYLASHYEKLKGSPEDNEQKQLFVEQHKHYLDEIIEQISEFSKRVILADANLDKVLSAYNKHRDKPIREQAENIIHLFTLTNLGAPAAFKYFDTTIDRKRYTSTKEVLDATLIHQSITGLYETRIDLSQLGGDGGGGGGGGGTLNIEDEYRLHETSKEPDVSLGSTWLSDFPQAWAETGGMGLAVRQAPLIIPLKATSTPVSIKQYPMSQEARLGIKPHIQRLLDQGILVPCQSPWNTPLLPVKKPGTNDYRPVQDLREVNKRVEDIHPTVPNPYNLLSGLPPSHQWYTVLDLKDAFFCLRLHPTSQPLFAFEWRDPEMGISGQLTWTRLPQGFKNSPTLFNEALHRDLADFRIQHPDLILLQYVDDLLLAATSELDCQQGTRALLQTLGNLGYRASAKKAQICQKQVKYLGYLLKEGQRWLTEARKETVMGQPTPKTPRQLREFLGKAGFCRLFIPGFAEMAAPLYPLTKPGTLFNWGPDQQKAYQEIKQALLTAPALGLPDLTKPFELFVDEKQGYAKGVLTQKLGPWRRPVAYLSKKLDPVAAGWPPCLRMVAAIAVLTKDAGKLTMGQPLVILAPHAVEALVKQPPDRWLSNARMTHYQALLLDTDRVQFGPVVALNPATLLPLPEEGLQHNCLDILAEAHGTRPDLTDQPLPDADHTWYTDGSSLLQEGQRKAGAAVTTETEVIWAKALPAGTSAQRAELIALTQALKMAEGKKLNVYTDSRYAFATAHIHGEIYRRRGWLTSEGKEIKNKDEILALLKALFLPKRLSIIHCPGHQKGHSAEARGNRMADQAARKAAITETPDTSTLLIENSSPSGGSKRTADGSEFEAGKRTADGSEFEKRTADGSEFESPKKKAKVE

SEQ ID NO: 2900 - protein, 2120 aa, synthetic construct; identical to SEQ ID NO: 2662

SEQ ID NO: 2901 - protein, 2116 aa, synthetic construct; identical to SEQ ID NO: 2629

SEQ ID NO: 2902 - protein, 2117 aa, synthetic construct; identical to SEQ ID NO: 2696

SEQ ID NO: 2903 - protein, 2114 aa, synthetic construct; identical to SEQ ID NO: 2634

SEQ ID NO: 2904 - protein, 2114 aa, synthetic construct; identical to SEQ ID NO: 2618

SEQ ID NO: 2905 - protein, 2111 aa, synthetic construct
MPAAKRVKLDGGDKKYSIGLDIGTNSVGWAVITDEYKVPSKKFKVLGNTDRHSIKKNLIGALLFDSGETAEATRLKRTARRRYTRRKNRICYLQEIFSNEMAKVDDSFFHRLEESFLVEEDKKHERHPIFGNIVDEVAYHEKYPTIYHLRKKLVDSTDKADLRLIYLALAHMIKFRGHFLIEGDLNPDNSDVDKLFIQLVQTYNQLFEENPINASGVDAKAILSARLSKSRRLENLIAQLPGEKKNGLFGNLIALSLGLTPNFKSNFDLAEDAKLQLSKDTYDDDLDNLLAQIGDQYADLFLAAKNLSDAILLSDILRVNTEITKAPLSASMIKRYDEHHQDLTLLKALVRQQLPEKYKEIFFDQSKNGYAGYIDGGASQEEFYKFIKPILEKMDGTEELLVKLNREDLLRKQRTFDNGSIPHQIHLGELHAILRRQEDFYPFLKDNREKIEKILTFRIPYYVGPLARGNSRFAWMTRKSEETITPWNFEEVVDKGASAQSFIERMTNFDKNLPNEKVLPKHSLLYEYFTVYNELTKVKYVTEGMRKPAFLSGEQKKAIVDLLFKTNRKVTVKQLKEDYFKKIECFDSVEISGVEDRFNASLGTYHDLLKIIKDKDFLDNEENEDILEDIVLTLTLFEDREMIEERLKTYAHLFDDKVMKQLKRRRYTGWGRLSRKLINGIRDKQSGKTILDFLKSDGFANRNFMQLIHDDSLTFKEDIQKAQVSGQGDSLHEHIANLAGSPAIKKGILQTVKVVDELVKVMGRHKPENIVIEMARENQTTQKGQKNSRERMKRIEEGIKELGSQILKEHPVENTQLQNEKLYLYYLQNGRDMYVDQELDINRLSDYDVDHIVPQSFLKDDSIDNKVLTRSDKARGKSDNVPSEEVVKKMKNYWRQLLNAKLITQRKFDNLTKAERGGLSELDKAGFIKRQLVETRQITKHVAQILDSRMNTKYDENDKLIREVKVITLKSKLVSDFRKDFQFYKVREINNYHHAHDAYLNAVVGTALIKKYPKLESEFVYGDYKVYDVRKMIAKSEQEIGKATAKYFFYSNIMNFFKTEITLANGEIRKRPLIETNGETGEIVWDKGRDFATVRKVLSMPQVNIVKKTEVQTGGFSKESILPKRNSDKLIARKKDWDPKKYGGFDSPTVAYSVLVVAKVEKGKSKKLKSVKELLGITIMERSSFEKNPIDFLEAKGYKEVKKDLIIKLPKYSLFELENGRKRMLASAGELQKGNELALPSKYVNFLYLASHYEKLKGSPEDNEQKQLFVEQHKHYLDEIIEQISEFSKRVILADANLDKVLSAYNKHRDKPIREQAENIIHLFTLTNLGAPAAFKYFDTTIDRKRYTSTKEVLDATLIHQSITGLYETRIDLSQLGGDGGGSSGSSGGTLNIEDEYRLHETSKEPDVSLGSTWLSDFPQAWAETGGMGLAVRQAPLIIPLKATSTPVSIKQYPMSQEARLGIKPHIQRLLDQGILVPCQSPWNTPLLPVKKPGTNDYRPVQDLREVNKRVEDIHPTVPNPYNLLSGLPPSHQWYTVLDLKDAFFCLRLHPTSQPLFAFEWRDPEMGISGQLTWTRLPQGFKNSPTLFNEALHRDLADFRIQHPDLILLQYVDDLLLAATSELDCQQGTRALLQTLGNLGYRASAKKAQICQKQVKYLGYLLKEGQRWLTEARKETVMGQPTPKTPRQLREFLGKAGFCRLFIPGFAEMAAPLYPLTKPGTLFNWGPDQQKAYQEIKQALLTAPALGLPDLTKPFELFVDEKQGYAKGVLTQKLGPWRRPVAYLSKKLDPVAAGWPPCLRMVAAIAVLTKDAGKLTMGQPLVILAPHAVEALVKQPPDRWLSNARMTHYQALLLDTDRVQFGPVVALNPATLLPLPEEGLQHNCLDILAEAHGTRPDLTDQPLPDADHTWYTDGSSLLQEGQRKAGAAVTTETEVIWAKALPAGTSAQRAELIALTQALKMAEGKKLNVYTDSRYAFATAHIHGEIYRRRGWLTSEGKEIKNKDEILALLKALFLPKRLSIIHCPGHQKGHSAEARGNRMADQAARKAAITETPDTSTLLIENSSPSGGSKRTADGSEFEAGKRTADGSEFEKRTADGSEFESPKKKAKVE

SEQ ID NO: 2906 - protein, 2111 aa, synthetic construct; identical to SEQ ID NO: 2643

SEQ ID NO: 2907 - protein, 2121 aa, synthetic construct; identical to SEQ ID NO: 2663

SEQ ID NO: 2908 - protein, 2113 aa, synthetic construct; identical to SEQ ID NO: 2626

SEQ ID NO: 2909 - protein, 2115 aa, synthetic construct; identical to SEQ ID NO: 2639

SEQ ID NO: 2910 - protein, 2111 aa, synthetic construct; identical to SEQ ID NO: 2671

SEQ ID NO: 2911 - protein, 2111 aa, synthetic construct; identical to SEQ ID NO: 2672

SEQ ID NO: 2912 - protein, 2116 aa, synthetic construct; identical to SEQ ID NO: 2703

SEQ ID NO: 2913 - protein, 2116 aa, synthetic construct; identical to SEQ ID NO: 2660

SEQ ID NO: 2914 - protein, 2111 aa, synthetic construct
MPAAKRVKLDGGDKKYSIGLDIGTNSVGWAVITDEYKVPSKKFKVLGNTDRHSIKKNLIGALLFDSGETAEATRLKRTARRRYTRRKNRICYLQEIFSNEMAKVDDSFFHRLEESFLVEEDKKHERHPIFGNIVDEVAYHEKYPTIYHLRKKLVDSTDKADLRLIYLALAHMIKFRGHFLIEGDLNPDNSDVDKLFIQLVQTYNQLFEENPINASGVDAKAILSARLSKSRRLENLIAQLPGEKKNGLFGNLIALSLGLTPNFKSNFDLAEDAKLQLSKDTYDDDLDNLLAQIGDQYADLFLAAKNLSDAILLSDILRVNTEITKAPLSASMIKRYDEHHQDLTLLKALVRQQLPEKYKEIFFDQSKNGYAGYIDGGASQEEFYKFIKPILEKMDGTEELLVKLNREDLLRKQRTFDNGSIPHQIHLGELHAILRRQEDFYPFLKDNREKIEKILTFRIPYYVGPLARGNSRFAWMTRKSEETITPWNFEEVVDKGASAQSFIERMTNFDKNLPNEKVLPKHSLLYEYFTVYNELTKVKYVTEGMRKPAFLSGEQKKAIVDLLFKTNRKVTVKQLKEDYFKKIECFDSVEISGVEDRFNASLGTYHDLLKIIKDKDFLDNEENEDILEDIVLTLTLFEDREMIEERLKTYAHLFDDKVMKQLKRRRYTGWGRLSRKLINGIRDKQSGKTILDFLKSDGFANRNFMQLIHDDSLTFKEDIQKAQVSGQGDSLHEHIANLAGSPAIKKGILQTVKVVDELVKVMGRHKPENIVIEMARENQTTQKGQKNSRERMKRIEEGIKELGSQILKEHPVENTQLQNEKLYLYYLQNGRDMYVDQELDINRLSDYDVDHIVPQSFLKDDSIDNKVLTRSDKARGKSDNVPSEEVVKKMKNYWRQLLNAKLITQRKFDNLTKAERGGLSELDKAGFIKRQLVETRQITKHVAQILDSRMNTKYDENDKLIREVKVITLKSKLVSDFRKDFQFYKVREINNYHHAHDAYLNAVVGTALIKKYPKLESEFVYGDYKVYDVRKMIAKSEQEIGKATAKYFFYSNIMNFFKTEITLANGEIRKRPLIETNGETGEIVWDKGRDFATVRKVLSMPQVNIVKKTEVQTGGFSKESILPKRNSDKLIARKKDWDPKKYGGFDSPTVAYSVLVVAKVEKGKSKKLKSVKELLGITIMERSSFEKNPIDFLEAKGYKEVKKDLIIKLPKYSLFELENGRKRMLASAGELQKGNELALPSKYVNFLYLASHYEKLKGSPEDNEQKQLFVEQHKHYLDEIIEQISEFSKRVILADANLDKVLSAYNKHRDKPIREQAENIIHLFTLTNLGAPAAFKYFDTTIDRKRYTSTKEVLDATLIHQSITGLYETRIDLSQLGGDGGGGSGSSGGTLNIEDEYRLHETSKEPDVSLGSTWLSDFPQAWAETGGMGLAVRQAPLIIPLKATSTPVSIKQYPMSQEARLGIKPHIQRLLDQGILVPCQSPWNTPLLPVKKPGTNDYRPVQDLREVNKRVEDIHPTVPNPYNLLSGLPPSHQWYTVLDLKDAFFCLRLHPTSQPLFAFEWRDPEMGISGQLTWTRLPQGFKNSPTLFNEALHRDLADFRIQHPDLILLQYVDDLLLAATSELDCQQGTRALLQTLGNLGYRASAKKAQICQKQVKYLGYLLKEGQRWLTEARKETVMGQPTPKTPRQLREFLGKAGFCRLFIPGFAEMAAPLYPLTKPGTLFNWGPDQQKAYQEIKQALLTAPALGLPDLTKPFELFVDEKQGYAKGVLTQKLGPWRRPVAYLSKKLDPVAAGWPPCLRMVAAIAVLTKDAGKLTMGQPLVILAPHAVEALVKQPPDRWLSNARMTHYQALLLDTDRVQFGPVVALNPATLLPLPEEGLQHNCLDILAEAHGTRPDLTDQPLPDADHTWYTDGSSLLQEGQRKAGAAVTTETEVIWAKALPAGTSAQRAELIALTQALKMAEGKKLNVYTDSRYAFATAHIHGEIYRRRGWLTSEGKEIKNKDEILALLKALFLPKRLSIIHCPGHQKGHSAEARGNRMADQAARKAAITETPDTSTLLIENSSPSGGSKRTADGSEFEAGKRTADGSEFEKRTADGSEFESPKKKAKVE

SEQ ID NO: 2915 - protein, 2116 aa, synthetic construct; identical to SEQ ID NO: 2668

SEQ ID NO: 2916 - protein, 2113 aa, synthetic construct
MPAAKRVKLDGGDKKYSIGLDIGTNSVGWAVITDEYKVPSKKFKVLGNTDRHSIKKNLIGALLFDSGETAEATRLKRTARRRYTRRKNRICYLQEIFSNEMAKVDDSFFHRLEESFLVEEDKKHERHPIFGNIVDEVAYHEKYPTIYHLRKKLVDSTDKADLRLIYLALAHMIKFRGHFLIEGDLNPDNSDVDKLFIQLVQTYNQLFEENPINASGVDAKAILSARLSKSRRLENLIAQLPGEKKNGLFGNLIALSLGLTPNFKSNFDLAEDAKLQLSKDTYDDDLDNLLAQIGDQYADLFLAAKNLSDAILLSDILRVNTEITKAPLSASMIKRYDEHHQDLTLLKALVRQQLPEKYKEIFFDQSKNGYAGYIDGGASQEEFYKFIKPILEKMDGTEELLVKLNREDLLRKQRTFDNGSIPHQIHLGELHAILRRQEDFYPFLKDNREKIEKILTFRIPYYVGPLARGNSRFAWMTRKSEETITPWNFEEVVDKGASAQSFIERMTNFDKNLPNEKVLPKHSLLYEYFTVYNELTKVKYVTEGMRKPAFLSGEQKKAIVDLLFKTNRKVTVKQLKEDYFKKIECFDSVEISGVEDRFNASLGTYHDLLKIIKDKDFLDNEENEDILEDIVLTLTLFEDREMIEERLKTYAHLFDDKVMKQLKRRRYTGWGRLSRKLINGIRDKQSGKTILDFLKSDGFANRNFMQLIHDDSLTFKEDIQKAQVSGQGDSLHEHIANLAGSPAIKKGILQTVKVVDELVKVMGRHKPENIVIEMARENQTTQKGQKNSRERMKRIEEGIKELGSQILKEHPVENTQLQNEKLYLYYLQNGRDMYVDQELDINRLSDYDVDHIVPQSFLKDDSIDNKVLTRSDKARGKSDNVPSEEVVKKMKNYWRQLLNAKLITQRKFDNLTKAERGGLSELDKAGFIKRQLVETRQITKHVAQILDSRMNTKYDENDKLIREVKVITLKSKLVSDFRKDFQFYKVREINNYHHAHDAYLNAVVGTALIKKYPKLESEFVYGDYKVYDVRKMIAKSEQEIGKATAKYFFYSNIMNFFKTEITLANGEIRKRPLIETNGETGEIVWDKGRDFATVRKVLSMPQVNIVKKTEVQTGGFSKESILPKRNSDKLIARKKDWDPKKYGGFDSPTVAYSVLVVAKVEKGKSKKLKSVKELLGITIMERSSFEKNPIDFLEAKGYKEVKKDLIIKLPKYSLFELENGRKRMLASAGELQKGNELALPSKYVNFLYLASHYEKLKGSPEDNEQKQLFVEQHKHYLDEIIEQISEFSKRVILADANLDKVLSAYNKHRDKPIREQAENIIHLFTLTNLGAPAAFKYFDTTIDRKRYTSTKEVLDATLIHQSITGLYETRIDLSQLGGDGGGSSEAAAKGGTLNIEDEYRLHETSKEPDVSLGSTWLSDFPQAWAETGGMGLAVRQAPLIIPLKATSTPVSIKQYPMSQEARLGIKPHIQRLLDQGILVPCQSPWNTPLLPVKKPGTNDYRPVQDLREVNKRVEDIHPTVPNPYNLLSGLPPSHQWYTVLDLKDAFFCLRLHPTSQPLFAFEWRDPEMGISGQLTWTRLPQGFKNSPTLFNEALHRDLADFRIQHPDLILLQYVDDLLLAATSELDCQQGTRALLQTLGNLGYRASAKKAQICQKQVKYLGYLLKEGQRWLTEARKETVMGQPTPKTPRQLREFLGKAGFCRLFIPGFAEMAAPLYPLTKPGTLFNWGPDQQKAYQEIKQALLTAPALGLPDLTKPFELFVDEKQGYAKGVLTQKLGPWRRPVAYLSKKLDPVAAGWPPCLRMVAAIAVLTKDAGKLTMGQPLVILAPHAVEALVKQPPDRWLSNARMTHYQALLLDTDRVQFGPVVALNPATLLPLPEEGLQHNCLDILAEAHGTRPDLTDQPLPDADHTWYTDGSSLLQEGQRKAGAAVTTETEVIWAKALPAGTSAQRAELIALTQALKMAEGKKLNVYTDSRYAFATAHIHGEIYRRRGWLTSEGKEIKNKDEILALLKALFLPKRLSIIHCPGHQKGHSAEARGNRMADQAARKAAITETPDTSTLLIENSSPSGGSKRTADGSEFEAGKRTADGSEFEKRTADGSEFESPKKKAKVE

SEQ ID NO: 2917 - protein, 2123 aa, synthetic construct
MPAAKRVKLDGGDKKYSIGLDIGTNSVGWAVITDEYKVPSKKFKVLGNTDRHSIKKNLIGALLFDSGETAEATRLKRTARRRYTRRKNRICYLQEIFSNEMAKVDDSFFHRLEESFLVEEDKKHERHPIFGNIVDEVAYHEKYPTIYHLRKKLVDSTDKADLRLIYLALAHMIKFRGHFLIEGDLNPDNSDVDKLFIQLVQTYNQLFEENPINASGVDAKAILSARLSKSRRLENLIAQLPGEKKNGLFGNLIALSLGLTPNFKSNFDLAEDAKLQLSKDTYDDDLDNLLAQIGDQYADLFLAAKNLSDAILLSDILRVNTEITKAPLSASMIKRYDEHHQDLTLLKALVRQQLPEKYKEIFFDQSKNGYAGYIDGGASQEEFYKFIKPILEKMDGTEELLVKLNREDLLRKQRTFDNGSIPHQIHLGELHAILRRQEDFYPFLKDNREKIEKILTFRIPYYVGPLARGNSRFAWMTRKSEETITPWNFEEVVDKGASAQSFIERMTNFDKNLPNEKVLPKHSLLYEYFTVYNELTKVKYVTEGMRKPAFLSGEQKKAIVDLLFKTNRKVTVKQLKEDYFKKIECFDSVEISGVEDRFNASLGTYHDLLKIIKDKDFLDNEENEDILEDIVLTLTLFEDREMIEERLKTYAHLFDDKVMKQLKRRRYTGWGRLSRKLINGIRDKQSGKTILDFLKSDGFANRNFMQLIHDDSLTFKEDIQKAQVSGQGDSLHEHIANLAGSPAIKKGILQTVKVVDELVKVMGRHKPENIVIEMARENQTTQKGQKNSRERMKRIEEGIKELGSQILKEHPVENTQLQNEKLYLYYLQNGRDMYVDQELDINRLSDYDVDHIVPQSFLKDDSIDNKVLTRSDKARGKSDNVPSEEVVKKMKNYWRQLLNAKLITQRKFDNLTKAERGGLSELDKAGFIKRQLVETRQITKHVAQILDSRMNTKYDENDKLIREVKVITLKSKLVSDFRKDFQFYKVREINNYHHAHDAYLNAVVGTALIKKYPKLESEFVYGDYKVYDVRKMIAKSEQEIGKATAKYFFYSNIMNFFKTEITLANGEIRKRPLIETNGETGEIVWDKGRDFATVRKVLSMPQVNIVKKTEVQTGGFSKESILPKRNSDKLIARKKDWDPKKYGGFDSPTVAYSVLVVAKVEKGKSKKLKSVKELLGITIMERSSFEKNPIDFLEAKGYKEVKKDLIIKLPKYSLFELENGRKRMLASAGELQKGNELALPSKYVNFLYLASHYEKLKGSPEDNEQKQLFVEQHKHYLDEIIEQISEFSKRVILADANLDKVLSAYNKHRDKPIREQAENIIHLFTLTNLGAPAAFKYFDTTIDRKRYTSTKEVLDATLIHQSITGLYETRIDLSQLGGDGGGGSGGSGGSGGSGGSGGSGGTLNIEDEYRLHETSKEPDVSLGSTWLSDFPQAWAETGGMGLAVRQAPLIIPLKATSTPVSIKQYPMSQEARLGIKPHIQRLLDQGILVPCQSPWNTPLLPVKKPGTNDYRPVQDLREVNKRVEDIHPTVPNPYNLLSGLPPSHQWYTVLDLKDAFFCLRLHPTSQPLFAFEWRDPEMGISGQLTWTRLPQGFKNSPTLFNEALHRDLADFRIQHPDLILLQYVDDLLLAATSELDCQQGTRALLQTLGNLGYRASAKKAQICQKQVKYLGYLLKEGQRWLTEARKETVMGQPTPKTPRQLREFLGKAGFCRLFIPGFAEMAAPLYPLTKPGTLFNWGPDQQKAYQEIKQALLTAPALGLPDLTKPFELFVDEKQGYAKGVLTQKLGPWRRPVAYLSKKLDPVAAGWPPCLRMVAAIAVLTKDAGKLTMGQPLVILAPHAVEALVKQPPDRWLSNARMTHYQALLLDTDRVQFGPVVALNPATLLPLPEEGLQHNCLDILAEAHGTRPDLTDQPLPDADHTWYTDGSSLLQEGQRKAGAAVTTETEVIWAKALPAGTSAQRAELIALTQALKMAEGKKLNVYTDSRYAFATAHIHGEIYRRRGWLTSEGKEIKNKDEILALLKALFLPKRLSIIHCPGHQKGHSAEARGNRMADQAARKAAITETPDTSTLLIENSSPSGGSKRTADGSEFEAGKRTADGSEFEKRTADGSEFESPKKKAKVE

SEQ ID NO: 2918 - protein, 2114 aa, synthetic construct
MPAAKRVKLDGGDKKYSIGLDIGTNSVGWAVITDEYKVPSKKFKVLGNTDRHSIKKNLIGALLFDSGETAEATRLKRTARRRYTRRKNRICYLQEIFSNEMAKVDDSFFHRLEESFLVEEDKKHERHPIFGNIVDEVAYHEKYPTIYHLRKKLVDSTDKADLRLIYLALAHMIKFRGHFLIEGDLNPDNSDVDKLFIQLVQTYNQLFEENPINASGVDAKAILSARLSKSRRLENLIAQLPGEKKNGLFGNLIALSLGLTPNFKSNFDLAEDAKLQLSKDTYDDDLDNLLAQIGDQYADLFLAAKNLSDAILLSDILRVNTEITKAPLSASMIKRYDEHHQDLTLLKALVRQQLPEKYKEIFFDQSKNGYAGYIDGGASQEEFYKFIKPILEKMDGTEELLVKLNREDLLRKQRTFDNGSIPHQIHLGELHAILRRQEDFYPFLKDNREKIEKILTFRIPYYVGPLARGNSRFAWMTRKSEETITPWNFEEVVDKGASAQSFIERMTNFDKNLPNEKVLPKHSLLYEYFTVYNELTKVKYVTEGMRKPAFLSGEQKKAIVDLLFKTNRKVTVKQLKEDYFKKIECFDSVEISGVEDRFNASLGTYHDLLKIIKDKDFLDNEENEDILEDIVLTLTLFEDREMIEERLKTYAHLFDDKVMKQLKRRRYTGWGRLSRKLINGIRDKQSGKTILDFLKSDGFANRNFMQLIHDDSLTFKEDIQKAQVSGQGDSLHEHIANLAGSPAIKKGILQTVKVVDELVKVMGRHKPENIVIEMARENQTTQKGQKNSRERMKRIEEGIKELGSQILKEHPVENTQLQNEKLYLYYLQNGRDMYVDQELDINRLSDYDVDHIVPQSFLKDDSIDNKVLTRSDKARGKSDNVPSEEVVKKMKNYWRQLLNAKLITQRKFDNLTKAERGGLSELDKAGFIKRQLVETRQITKHVAQILDSRMNTKYDENDKLIREVKVITLKSKLVSDFRKDFQFYKVREINNYHHAHDAYLNAVVGTALIKKYPKLESEFVYGDYKVYDVRKMIAKSEQEIGKATAKYFFYSNIMNFFKTEITLANGEIRKRPLIETNGETGEIVWDKGRDFATVRKVLSMPQVNIVKKTEVQTGGFSKESILPKRNSDKLIARKKDWDPKKYGGFDSPTVAYSVLVVAKVEKGKSKKLKSVKELLGITIMERSSFEKNPIDFLEAKGYKEVKKDLIIKLPKYSLFELENGRKRMLASAGELQKGNELALPSKYVNFLYLASHYEKLKGSPEDNEQKQLFVEQHKHYLDEIIEQISEFSKRVILADANLDKVLSAYNKHRDKPIREQAENIIHLFTLTNLGAPAAFKYFDTTIDRKRYTSTKEVLDATLIHQSITGLYETRIDLSQLGGDGGGGGGGSPAPGGTLNIEDEYRLHETSKEPDVSLGSTWLSDFPQAWAETGGMGLAVRQAPLIIPLKATSTPVSIKQYPMSQEARLGIKPHIQRLLDQGILVPCQSPWNTPLLPVKKPGTNDYRPVQDLREVNKRVEDIHPTVPNPYNLLSGLPPSHQWYTVLDLKDAFFCLRLHPTSQPLFAFEWRDPEMGISGQLTWTRLPQGFKNSPTLFNEALHRDLADFRIQHPDLILLQYVDDLLLAATSELDCQQGTRALLQTLGNLGYRASAKKAQICQKQVKYLGYLLKEGQRWLTEARKETVMGQPTPKTPRQLREFLGKAGFCRLFIPGFAEMAAPLYPLTKPGTLFNWGPDQQKAYQEIKQALLTAPALGLPDLTKPFELFVDEKQGYAKGVLTQKLGPWRRPVAYLSKKLDPVAAGWPPCLRMVAAIAVLTKDAGKLTMGQPLVILAPHAVEALVKQPPDRWLSNARMTHYQALLLDTDRVQFGPVVALNPATLLPLPEEGLQHNCLDILAEAHGTRPDLTDQPLPDADHTWYTDGSSLLQEGQRKAGAAVTTETEVIWAKALPAGTSAQRAELIALTQALKMAEGKKLNVYTDSRYAFATAHIHGEIYRRRGWLTSEGKEIKNKDEILALLKALFLPKRLSIIHCPGHQKGHSAEARGNRMADQAARKAAITETPDTSTLLIENSSPSGGSKRTADGSEFEAGKRTADGSEFEKRTADGSEFESPKKKAKVE

SEQ ID NO: 2919 - protein, 2116 aa, synthetic construct; identical to SEQ ID NO: 2690

SEQ ID NO: 2920 - protein, 2116 aa, synthetic construct; identical to SEQ ID NO: 2648

SEQ ID NO: 2921 - protein, 2114 aa, synthetic construct; identical to SEQ ID NO: 2616

SEQ ID NO: 2922 - protein, 2116 aa, synthetic construct; identical to SEQ ID NO: 2666

SEQ ID NO: 2923 - protein, 2111 aa, synthetic construct
MPAAKRVKLDGGDKKYSIGLDIGTNSVGWAVITDEYKVPSKKFKVLGNTDRHSIKKNLIGALLFDSGETAEATRLKRTARRRYTRRKNRICYLQEIFSNEMAKVDDSFFHRLEESFLVEEDKKHERHPIFGNIVDEVAYHEKYPTIYHLRKKLVDSTDKADLRLIYLALAHMIKFRGHFLIEGDLNPDNSDVDKLFIQLVQTYNQLFEENPINASGVDAKAILSARLSKSRRLENLIAQLPGEKKNGLFGNLIALSLGLTPNFKSNFDLAEDAKLQLSKDTYDDDLDNLLAQIGDQYADLFLAAKNLSDAILLSDILRVNTEITKAPLSASMIKRYDEHHQDLTLLKALVRQQLPEKYKEIFFDQSKNGYAGYIDGGASQEEFYKFIKPILEKMDGTEELLVKLNREDLLRKQRTFDNGSIPHQIHLGELHAILRRQEDFYPFLKDNREKIEKILTFRIPYYVGPLARGNSRFAWMTRKSEETITPWNFEEVVDKGASAQSFIERMTNFDKNLPNEKVLPKHSLLYEYFTVYNELTKVKYVTEGMRKPAFLSGEQKKAIVDLLFKTNRKVTVKQLKEDYFKKIECFDSVEISGVEDRFNASLGTYHDLLKIIKDKDFLDNEENEDILEDIVLTLTLFEDREMIEERLKTYAHLFDDKVMKQLKRRRYTGWGRLSRKLINGIRDKQSGKTILDFLKSDGFANRNFMQLIHDDSLTFKEDIQKAQVSGQGDSLHEHIANLAGSPAIKKGILQTVKVVDELVKVMGRHKPENIVIEMARENQTTQKGQKNSRERMKRIEEGIKELGSQILKEHPVENTQLQNEKLYLYYLQNGRDMYVDQELDINRLSDYDVDHIVPQSFLKDDSIDNKVLTRSDKARGKSDNVPSEEVVKKMKNYWRQLLNAKLITQRKFDNLTKAERGGLSELDKAGFIKRQLVETRQITKHVAQILDSRMNTKYDENDKLIREVKVITLKSKLVSDFRKDFQFYKVREINNYHHAHDAYLNAVVGTALIKKYPKLESEFVYGDYKVYDVRKMIAKSEQEIGKATAKYFFYSNIMNFFKTEITLANGEIRKRPLIETNGETGEIVWDKGRDFATVRKVLSMPQVNIVKKTEVQTGGFSKESILPKRNSDKLIARKKDWDPKKYGGFDSPTVAYSVLVVAKVEKGKSKKLKSVKELLGITIMERSSFEKNPIDFLEAKGYKEVKKDLIIKLPKYSLFELENGRKRMLASAGELQKGNELALPSKYVNFLYLASHYEKLKGSPEDNEQKQLFVEQHKHYLDEIIEQISEFSKRVILADANLDKVLSAYNKHRDKPIREQAENIIHLFTLTNLGAPAAFKYFDTTIDRKRYTSTKEVLDATLIHQSITGLYETRIDLSQLGGDGGPAPGGGGGTLNIEDEYRLHETSKEPDVSLGSTWLSDFPQAWAETGGMGLAVRQAPLIIPLKATSTPVSIKQYPMSQEARLGIKPHIQRLLDQGILVPCQSPWNTPLLPVKKPGTNDYRPVQDLREVNKRVEDIHPTVPNPYNLLSGLPPSHQWYTVLDLKDAFFCLRLHPTSQPLFAFEWRDPEMGISGQLTWTRLPQGFKNSPTLFNEALHRDLADFRIQHPDLILLQYVDDLLLAATSELDCQQGTRALLQTLGNLGYRASAKKAQICQKQVKYLGYLLKEGQRWLTEARKETVMGQPTPKTPRQLREFLGKAGFCRLFIPGFAEMAAPLYPLTKPGTLFNWGPDQQKAYQEIKQALLTAPALGLPDLTKPFELFVDEKQGYAKGVLTQKLGPWRRPVAYLSKKLDPVAAGWPPCLRMVAAIAVLTKDAGKLTMGQPLVILAPHAVEALVKQPPDRWLSNARMTHYQALLLDTDRVQFGPVVALNPATLLPLPEEGLQHNCLDILAEAHGTRPDLTDQPLPDADHTWYTDGSSLLQEGQRKAGAAVTTETEVIWAKALPAGTSAQRAELIALTQALKMAEGKKLNVYTDSRYAFATAHIHGEIYRRRGWLTSEGKEIKNKDEILALLKALFLPKRLSIIHCPGHQKGHSAEARGNRMADQAARKAAITETPDTSTLLIENSSPSGGSKRTADGSEFEAGKRTADGSEFEKRTADGSEFESPKKKAKVE

SEQ ID NO: 2924 - protein, 2116 aa, synthetic construct
MPAAKRVKLDGGDKKYSIGLDIGTNSVGWAVITDEYKVPSKKFKVLGNTDRHSIKKNLIGALLFDSGETAEATRLKRTARRRYTRRKNRICYLQEIFSNEMAKVDDSFFHRLEESFLVEEDKKHERHPIFGNIVDEVAYHEKYPTIYHLRKKLVDSTDKADLRLIYLALAHMIKFRGHFLIEGDLNPDNSDVDKLFIQLVQTYNQLFEENPINASGVDAKAILSARLSKSRRLENLIAQLPGEKKNGLFGNLIALSLGLTPNFKSNFDLAEDAKLQLSKDTYDDDLDNLLAQIGDQYADLFLAAKNLSDAILLSDILRVNTEITKAPLSASMIKRYDEHHQDLTLLKALVRQQLPEKYKEIFFDQSKNGYAGYIDGGASQEEFYKFIKPILEKMDGTEELLVKLNREDLLRKQRTFDNGSIPHQIHLGELHAILRRQEDFYPFLKDNREKIEKILTFRIPYYVGPLARGNSRFAWMTRKSEETITPWNFEEVVDKGASAQSFIERMTNFDKNLPNEKVLPKHSLLYEYFTVYNELTKVKYVTEGMRKPAFLSGEQKKAIVDLLFKTNRKVTVKQLKEDYFKKIECFDSVEISGVEDRFNASLGTYHDLLKIIKDKDFLDNEENEDILEDIVLTLTLFEDREMIEERLKTYAHLFDDKVMKQLKRRRYTGWGRLSRKLINGIRDKQSGKTILDFLKSDGFANRNFMQLIHDDSLTFKEDIQKAQVSGQGDSLHEHIANLAGSPAIKKGILQTVKVVDELVKVMGRHKPENIVIEMARENQTTQKGQKNSRERMKRIEEGIKELGSQILKEHPVENTQLQNEKLYLYYLQNGRDMYVDQELDINRLSDYDVDHIVPQSFLKDDSIDNKVLTRSDKARGKSDNVPSEEVVKKMKNYWRQLLNAKLITQRKFDNLTKAERGGLSELDKAGFIKRQLVETRQITKHVAQILDSRMNTKYDENDKLIREVKVITLKSKLVSDFRKDFQFYKVREINNYHHAHDAYLNAVVGTALIKKYPKLESEFVYGDYKVYDVRKMIAKSEQEIGKATAKYFFYSNIMNFFKTEITLANGEIRKRPLIETNGETGEIVWDKGRDFATVRKVLSMPQVNIVKKTEVQTGGFSKESILPKRNSDKLIARKKDWDPKKYGGFDSPTVAYSVLVVAKVEKGKSKKLKSVKELLGITIMERSSFEKNPIDFLEAKGYKEVKKDLIIKLPKYSLFELENGRKRMLASAGELQKGNELALPSKYVNFLYLASHYEKLKGSPEDNEQKQLFVEQHKHYLDEIIEQISEFSKRVILADANLDKVLSAYNKHRDKPIREQAENIIHLFTLTNLGAPAAFKYFDTTIDRKRYTSTKEVLDATLIHQSITGLYETRIDLSQLGGDGGPAPEAAAKGGSGGTLNIEDEYRLHETSKEPDVSLGSTWLSDFPQAWAETGGMGLAVRQAPLIIPLKATSTPVSIKQYPMSQEARLGIKPHIQRLLDQGILVPCQSPWNTPLLPVKKPGTNDYRPVQDLREVNKRVEDIHPTVPNPYNLLSGLPPSHQWYTVLDLKDAFFCLRLHPTSQPLFAFEWRDPEMGISGQLTWTRLPQGFKNSPTLFNEALHRDLADFRIQHPDLILLQYVDDLLLAATSELDCQQGTRALLQTLGNLGYRASAKKAQICQKQVKYLGYLLKEGQRWLTEARKETVMGQPTPKTPRQLREFLGKAGFCRLFIPGFAEMAAPLYPLTKPGTLFNWGPDQQKAYQEIKQALLTAPALGLPDLTKPFELFVDEKQGYAKGVLTQKLGPWRRPVAYLSKKLDPVAAGWPPCLRMVAAIAVLTKDAGKLTMGQPLVILAPHAVEALVKQPPDRWLSNARMTHYQALLLDTDRVQFGPVVALNPATLLPLPEEGLQHNCLDILAEAHGTRPDLTDQPLPDADHTWYTDGSSLLQEGQRKAGAAVTTETEVIWAKALPAGTSAQRAELIALTQALKMAEGKKLNVYTDSRYAFATAHIHGEIYRRRGWLTSEGKEIKNKDEILALLKALFLPKRLSIIHCPGHQKGHSAEARGNRMADQAARKAAITETPDTSTLLIENSSPSGGSKRTADGSEFEAGKRTADGSEFEKRTADGSEFESPKKKAKVE

SEQ ID NO: 2925 - protein, 2116 aa, synthetic construct; identical to SEQ ID NO: 2628

SEQ ID NO: 2926 - protein, 2116 aa, synthetic construct; identical to SEQ ID NO: 2640

SEQ ID NO: 2927 - protein, 2109 aa, synthetic construct
MPAAKRVKLDGGDKKYSIGLDIGTNSVGWAVITDEYKVPSKKFKVLGNTDRHSIKKNLIGALLFDSGETAEATRLKRTARRRYTRRKNRICYLQEIFSNEMAKVDDSFFHRLEESFLVEEDKKHERHPIFGNIVDEVAYHEKYPTIYHLRKKLVDSTDKADLRLIYLALAHMIKFRGHFLIEGDLNPDNSDVDKLFIQLVQTYNQLFEENPINASGVDAKAILSARLSKSRRLENLIAQLPGEKKNGLFGNLIALSLGLTPNFKSNFDLAEDAKLQLSKDTYDDDLDNLLAQIGDQYADLFLAAKNLSDAILLSDILRVNTEITKAPLSASMIKRYDEHHQDLTLLKALVRQQLPEKYKEIFFDQSKNGYAGYIDGGASQEEFYKFIKPILEKMDGTEELLVKLNREDLLRKQRTFDNGSIPHQIHLGELHAILRRQEDFYPFLKDNREKIEKILTFRIPYYVGPLARGNSRFAWMTRKSEETITPWNFEEVVDKGASAQSFIERMTNFDKNLPNEKVLPKHSLLYEYFTVYNELTKVKYVTEGMRKPAFLSGEQKKAIVDLLFKTNRKVTVKQLKEDYFKKIECFDSVEISGVEDRFNASLGTYHDLLKIIKDKDFLDNEENEDILEDIVLTLTLFEDREMIEERLKTYAHLFDDKVMKQLKRRRYTGWGRLSRKLINGIRDKQSGKTILDFLKSDGFANRNFMQLIHDDSLTFKEDIQKAQVSGQGDSLHEHIANLAGSPAIKKGILQTVKVVDELVKVMGRHKPENIVIEMARENQTTQKGQKNSRERMKRIEEGIKELGSQILKEHPVENTQLQNEKLYLYYLQNGRDMYVDQELDINRLSDYDVDHIVPQSFLKDDSIDNKVLTRSDKARGKSDNVPSEEVVKKMKNYWRQLLNAKLITQRKFDNLTKAERGGLSELDKAGFIKRQLVETRQITKHVAQILDSRMNTKYDENDKLIREVKVITLKSKLVSDFRKDFQFYKVREINNYHHAHDAYLNAVVGTALIKKYPKLESEFVYGDYKVYDVRKMIAKSEQEIGKATAKYFFYSNIMNFFKTEITLANGEIRKRPLIETNGETGEIVWDKGRDFATVRKVLSMPQVNIVKKTEVQTGGFSKESILPKRNSDKLIARKKDWDPKKYGGFDSPTVAYSVLVVAKVEKGKSKKLKSVKELLGITIMERSSFEKNPIDFLEAKGYKEVKKDLIIKLPKYSLFELENGRKRMLASAGELQKGNELALPSKYVNFLYLASHYEKLKGSPEDNEQKQLFVEQHKHYLDEIIEQISEFSKRVILADANLDKVLSAYNKHRDKPIREQAENIIHLFTLTNLGAPAAFKYFDTTIDRKRYTSTKEVLDATLIHQSITGLYETRIDLSQLGGDGGGGGGGGTLNIEDEYRLHETSKEPDVSLGSTWLSDFPQAWAETGGMGLAVRQAPLIIPLKATSTPVSIKQYPMSQEARLGIKPHIQRLLDQGILVPCQSPWNTPLLPVKKPGTNDYRPVQDLREVNKRVEDIHPTVPNPYNLLSGLPPSHQWYTVLDLKDAFFCLRLHPTSQPLFAFEWRDPEMGISGQLTWTRLPQGFKNSPTLFNEALHRDLADFRIQHPDLILLQYVDDLLLAATSELDCQQGTRALLQTLGNLGYRASAKKAQICQKQVKYLGYLLKEGQRWLTEARKETVMGQPTPKTPRQLREFLGKAGFCRLFIPGFAEMAAPLYPLTKPGTLFNWGPDQQKAYQEIKQALLTAPALGLPDLTKPFELFVDEKQGYAKGVLTQKLGPWRRPVAYLSKKLDPVAAGWPPCLRMVAAIAVLTKDAGKLTMGQPLVILAPHAVEALVKQPPDRWLSNARMTHYQALLLDTDRVQFGPVVALNPATLLPLPEEGLQHNCLDILAEAHGTRPDLTDQPLPDADHTWYTDGSSLLQEGQRKAGAAVTTETEVIWAKALPAGTSAQRAELIALTQALKMAEGKKLNVYTDSRYAFATAHIHGEIYRRRGWLTSEGKEIKNKDEILALLKALFLPKRLSIIHCPGHQKGHSAEARGNRMADQAARKAAITETPDTSTLLIENSSPSGGSKRTADGSEFEAGKRTADGSEFEKRTADGSEFESPKKKAKVE

SEQ ID NO: 2928 - protein, 2116 aa, synthetic construct
MPAAKRVKLDGGDKKYSIGLDIGTNSVGWAVITDEYKVPSKKFKVLGNTDRHSIKKNLIGALLFDSGETAEATRLKRTARRRYTRRKNRICYLQEIFSNEMAKVDDSFFHRLEESFLVEEDKKHERHPIFGNIVDEVAYHEKYPTIYHLRKKLVDSTDKADLRLIYLALAHMIKFRGHFLIEGDLNPDNSDVDKLFIQLVQTYNQLFEENPINASGVDAKAILSARLSKSRRLENLIAQLPGEKKNGLFGNLIALSLGLTPNFKSNFDLAEDAKLQLSKDTYDDDLDNLLAQIGDQYADLFLAAKNLSDAILLSDILRVNTEITKAPLSASMIKRYDEHHQDLTLLKALVRQQLPEKYKEIFFDQSKNGYAGYIDGGASQEEFYKFIKPILEKMDGTEELLVKLNREDLLRKQRTFDNGSIPHQIHLGELHAILRRQEDFYPFLKDNREKIEKILTFRIPYYVGPLARGNSRFAWMTRKSEETITPWNFEEVVDKGASAQSFIERMTNFDKNLPNEKVLPKHSLLYEYFTVYNELTKVKYVTEGMRKPAFLSGEQKKAIVDLLFKTNRKVTVKQLKEDYFKKIECFDSVEISGVEDRFNASLGTYHDLLKIIKDKDFLDNEENEDILEDIVLTLTLFEDREMIEERLKTYAHLFDDKVMKQLKRRRYTGWGRLSRKLINGIRDKQSGKTILDFLKSDGFANRNFMQLIHDDSLTFKEDIQKAQVSGQGDSLHEHIANLAGSPAIKKGILQTVKVVDELVKVMGRHKPENIVIEMARENQTTQKGQKNSRERMKRIEEGIKELGSQILKEHPVENTQLQNEKLYLYYLQNGRDMYVDQELDINRLSDYDVDHIVPQSFLKDDSIDNKVLTRSDKARGKSDNVPSEEVVKKMKNYWRQLLNAKLITQRKFDNLTKAERGGLSELDKAGFIKRQLVETRQITKHVAQILDSRMNTKYDENDKLIREVKVITLKSKLVSDFRKDFQFYKVREINNYHHAHDAYLNAVVGTALIKKYPKLESEFVYGDYKVYDVRKMIAKSEQEIGKATAKYFFYSNIMNFFKTEITLANGEIRKRPLIETNGETGEIVWDKGRDFATVRKVLSMPQVNIVKKTEVQTGGFSKESILPKRNSDKLIARKKDWDPKKYGGFDSPTVAYSVLVVAKVEKGKSKKLKSVKELLGITIMERSSFEKNPIDFLEAKGYKEVKKDLIIKLPKYSLFELENGRKRMLASAGELQKGNELALPSKYVNFLYLASHYEKLKGSPEDNEQKQLFVEQHKHYLDEIIEQISEFSKRVILADANLDKVLSAYNKHRDKPIREQAENIIHLFTLTNLGAPAAFKYFDTTIDRKRYTSTKEVLDATLIHQSITGLYETRIDLSQLGGDGGGGGGGSEAAAKGGTLNIEDEYRLHETSKEPDVSLGSTWLSDFPQAWAETGGMGLAVRQAPLIIPLKATSTPVSIKQYPMSQEARLGIKPHIQRLLDQGILVPCQSPWNTPLLPVKKPGTNDYRPVQDLREVNKRVEDIHPTVPNPYNLLSGLPPSHQWYTVLDLKDAFFCLRLHPTSQPLFAFEWRDPEMGISGQLTWTRLPQGFKNSPTLFNEALHRDLADFRIQHPDLILLQYVDDLLLAATSELDCQQGTRALLQTLGNLGYRASAKKAQICQKQVKYLGYLLKEGQRWLTEARKETVMGQPTPKTPRQLREFLGKAGFCRLFIPGFAEMAAPLYPLTKPGTLFNWGPDQQKAYQEIKQALLTAPALGLPDLTKPFELFVDEKQGYAKGVLTQKLGPWRRPVAYLSKKLDPVAAGWPPCLRMVAAIAVLTKDAGKLTMGQPLVILAPHAVEALVKQPPDRWLSNARMTHYQALLLDTDRVQFGPVVALNPATLLPLPEEGLQHNCLDILAEAHGTRPDLTDQPLPDADHTWYTDGSSLLQEGQRKAGAAVTTETEVIWAKALPAGTSAQRAELIALTQALKMAEGKKLNVYTDSRYAFATAHIHGEIYRRRGWLTSEGKEIKNKDEILALLKALFLPKRLSIIHCPGHQKGHSAEARGNRMADQAARKAAITETPDTSTLLIENSSPSGGSKRTADGSEFEAGKRTADGSEFEKRTADGSEFESPKKKAKVE

SEQ ID NO: 2929 - protein, 2113 aa, synthetic construct; identical to SEQ ID NO: 2700

SEQ ID NO: 2930 - protein, 2114 aa, synthetic construct; identical to SEQ ID NO: 2656

SEQ ID NO: 2931 - protein, 2116 aa, synthetic construct; identical to SEQ ID NO: 2652

SEQ ID NO: 2932 - protein, 2120 aa, synthetic construct; identical to SEQ ID NO: 2623

SEQ ID NO: 2933 - protein, 2113 aa, synthetic construct; identical to SEQ ID NO: 2657

SEQ ID NO: 2934 - protein, 2111 aa, synthetic construct; identical to SEQ ID NO: 2693

SEQ ID NO: 2935 - protein, 2108 aa, synthetic construct; identical to SEQ ID NO: 2646

SEQ ID NO: 2936 - protein, 2111 aa, synthetic construct
MPAAKRVKLDGGDKKYSIGLDIGTNSVGWAVITDEYKVPSKKFKVLGNTDRHSIKKNLIGALLFDSGETAEATRLKRTARRRYTRRKNRICYLQEIFSNEMAKVDDSFFHRLEESFLVEEDKKHERHPIFGNIVDEVAYHEKYPTIYHLRKKLVDSTDKADLRLIYLALAHMIKFRGHFLIEGDLNPDNSDVDKLFIQLVQTYNQLFEENPINASGVDAKAILSARLSKSRRLENLIAQLPGEKKNGLFGNLIALSLGLTPNFKSNFDLAEDAKLQLSKDTYDDDLDNLLAQIGDQYADLFLAAKNLSDAILLSDILRVNTEITKAPLSASMIKRYDEHHQDLTLLKALVRQQLPEKYKEIFFDQSKNGYAGYIDGGASQEEFYKFIKPILEKMDGTEELLVKLNREDLLRKQRTFDNGSIPHQIHLGELHAILRRQEDFYPFLKDNREKIEKILTFRIPYYVGPLARGNSRFAWMTRKSEETITPWNFEEVVDKGASAQSFIERMTNFDKNLPNEKVLPKHSLLYEYFTVYNELTKVKYVTEGMRKPAFLSGEQKKAIVDLLFKTNRKVTVKQLKEDYFKKIECFDSVEISGVEDRFNASLGTYHDLLKIIKDKDFLDNEENEDILEDIVLTLTLFEDREMIEERLKTYAHLFDDKVMKQLKRRRYTGWGRLSRKLINGIRDKQSGKTILDFLKSDGFANRNFMQLIHDDSLTFKEDIQKAQVSGQGDSLHEHIANLAGSPAIKKGILQTVKVVDELVKVMGRHKPENIVIEMARENQTTQKGQKNSRERMKRIEEGIKELGSQILKEHPVENTQLQNEKLYLYYLQNGRDMYVDQELDINRLSDYDVDHIVPQSFLKDDSIDNKVLTRSDKARGKSDNVPSEEVVKKMKNYWRQLLNAKLITQRKFDNLTKAERGGLSELDKAGFIKRQLVETRQITKHVAQILDSRMNTKYDENDKLIREVKVITLKSKLVSDFRKDFQFYKVREINNYHHAHDAYLNAVVGTALIKKYPKLESEFVYGDYKVYDVRKMIAKSEQEIGKATAKYFFYSNIMNFFKTEITLANGEIRKRPLIETNGETGEIVWDKGRDFATVRKVLSMPQVNIVKKTEVQTGGFSKESILPKRNSDKLIARKKDWDPKKYGGFDSPTVAYSVLVVAKVEKGKSKKLKSVKELLGITIMERSSFEKNPIDFLEAKGYKEVKKDLIIKLPKYSLFELENGRKRMLASAGELQKGNELALPSKYVNFLYLASHYEKLKGSPEDNEQKQLFVEQHKHYLDEIIEQISEFSKRVILADANLDKVLSAYNKHRDKPIREQAENIIHLFTLTNLGAPAAFKYFDTTIDRKRYTSTKEVLDATLIHQSITGLYETRIDLSQLGGDGGPAPGSSGGTLNIEDEYRLHETSKEPDVSLGSTWLSDFPQAWAETGGMGLAVRQAPLIIPLKATSTPVSIKQYPMSQEARLGIKPHIQRLLDQGILVPCQSPWNTPLLPVKKPGTNDYRPVQDLREVNKRVEDIHPTVPNPYNLLSGLPPSHQWYTVLDLKDAFFCLRLHPTSQPLFAFEWRDPEMGISGQLTWTRLPQGFKNSPTLFNEALHRDLADFRIQHPDLILLQYVDDLLLAATSELDCQQGTRALLQTLGNLGYRASAKKAQICQKQVKYLGYLLKEGQRWLTEARKETVMGQPTPKTPRQLREFLGKAGFCRLFIPGFAEMAAPLYPLTKPGTLFNWGPDQQKAYQEIKQALLTAPALGLPDLTKPFELFVDEKQGYAKGVLTQKLGPWRRPVAYLSKKLDPVAAGWPPCLRMVAAIAVLTKDAGKLTMGQPLVILAPHAVEALVKQPPDRWLSNARMTHYQALLLDTDRVQFGPVVALNPATLLPLPEEGLQHNCLDILAEAHGTRPDLTDQPLPDADHTWYTDGSSLLQEGQRKAGAAVTTETEVIWAKALPAGTSAQRAELIALTQALKMAEGKKLNVYTDSRYAFATAHIHGEIYRRRGWLTSEGKEIKNKDEILALLKALFLPKRLSIIHCPGHQKGHSAEARGNRMADQAARKAAITETPDTSTLLIENSSPSGGSKRTADGSEFEAGKRTADGSEFEKRTADGSEFESPKKKAKVE

SEQ ID NO: 2937 - protein, 2120 aa, synthetic construct; identical to SEQ ID NO: 2636

SEQ ID NO: 2938 - protein, 2116 aa, synthetic construct; identical to SEQ ID NO: 2661

SEQ ID NO: 2939 - protein, 2120 aa, synthetic construct; identical to SEQ ID NO: 2680

SEQ ID NO: 2940 - protein, 2116 aa, synthetic construct
MPAAKRVKLDGGDKKYSIGLDIGTNSVGWAVITDEYKVPSKKFKVLGNTDRHSIKKNLIGALLFDSGETAEATRLKRTARRRYTRRKNRICYLQEIFSNEMAKVDDSFFHRLEESFLVEEDKKHERHPIFGNIVDEVAYHEKYPTIYHLRKKLVDSTDKADLRLIYLALAHMIKFRGHFLIEGDLNPDNSDVDKLFIQLVQTYNQLFEENPINASGVDAKAILSARLSKSRRLENLIAQLPGEKKNGLFGNLIALSLGLTPNFKSNFDLAEDAKLQLSKDTYDDDLDNLLAQIGDQYADLFLAAKNLSDAILLSDILRVNTEITKAPLSASMIKRYDEHHQDLTLLKALVRQQLPEKYKEIFFDQSKNGYAGYIDGGASQEEFYKFIKPILEKMDGTEELLVKLNREDLLRKQRTFDNGSIPHQIHLGELHAILRRQEDFYPFLKDNREKIEKILTFRIPYYVGPLARGNSRFAWMTRKSEETITPWNFEEVVDKGASAQSFIERMTNFDKNLPNEKVLPKHSLLYEYFTVYNELTKVKYVTEGMRKPAFLSGEQKKAIVDLLFKTNRKVTVKQLKEDYFKKIECFDSVEISGVEDRFNASLGTYHDLLKIIKDKDFLDNEENEDILEDIVLTLTLFEDREMIEERLKTYAHLFDDKVMKQLKRRRYTGWGRLSRKLINGIRDKQSGKTILDFLKSDGFANRNFMQLIHDDSLTFKEDIQKAQVSGQGDSLHEHIANLAGSPAIKKGILQTVKVVDELVKVMGRHKPENIVIEMARENQTTQKGQKNSRERMKRIEEGIKELGSQILKEHPVENTQLQNEKLYLYYLQNGRDMYVDQELDINRLSDYDVDHIVPQSFLKDDSIDNKVLTRSDKARGKSDNVPSEEVVKKMKNYWRQLLNAKLITQRKFDNLTKAERGGLSELDKAGFIKRQLVETRQITKHVAQILDSRMNTKYDENDKLIREVKVITLKSKLVSDFRKDFQFYKVREINNYHHAHDAYLNAVVGTALIKKYPKLESEFVYGDYKVYDVRKMIAKSEQEIGKATAKYFFYSNIMNFFKTEITLANGEIRKRPLIETNGETGEIVWDKGRDFATVRKVLSMPQVNIVKKTEVQTGGFSKESILPKRNSDKLIARKKDWDPKKYGGFDSPTVAYSVLVVAKVEKGKSKKLKSVKELLGITIMERSSFEKNPIDFLEAKGYKEVKKDLIIKLPKYSLFELENGRKRMLASAGELQKGNELALPSKYVNFLYLASHYEKLKGSPEDNEQKQLFVEQHKHYLDEIIEQISEFSKRVILADANLDKVLSAYNKHRDKPIREQAENIIHLFTLTNLGAPAAFKYFDTTIDRKRYTSTKEVLDATLIHQSITGLYETRIDLSQLGGDGGGGGPAPEAAAKGGTLNIEDEYRLHETSKEPDVSLGSTWLSDFPQAWAETGGMGLAVRQAPLIIPLKATSTPVSIKQYPMSQEARLGIKPHIQRLLDQGILVPCQSPWNTPLLPVKKPGTNDYRPVQDLREVNKRVEDIHPTVPNPYNLLSGLPPSHQWYTVLDLKDAFFCLRLHPTSQPLFAFEWRDPEMGISGQLTWTRLPQGFKNSPTLFNEALHRDLADFRIQHPDLILLQYVDDLLLAATSELDCQQGTRALLQTLGNLGYRASAKKAQICQKQVKYLGYLLKEGQRWLTEARKETVMGQPTPKTPRQLREFLGKAGFCRLFIPGFAEMAAPLYPLTKPGTLFNWGPDQQKAYQEIKQALLTAPALGLPDLTKPFELFVDEKQGYAKGVLTQKLGPWRRPVAYLSKKLDPVAAGWPPCLRMVAAIAVLTKDAGKLTMGQPLVILAPHAVEALVKQPPDRWLSNARMTHYQALLLDTDRVQFGPVVALNPATLLPLPEEGLQHNCLDILAEAHGTRPDLTDQPLPDADHTWYTDGSSLLQEGQRKAGAAVTTETEVIWAKALPAGTSAQRAELIALTQALKMAEGKKLNVYTDSRYAFATAHIHGEIYRRRGWLTSEGKEIKNKDEILALLKALFLPKRLSIIHCPGHQKGHSAEARGNRMADQAARKAAITETPDTSTLLIENSSPSGGSKRTADGSEFEAGKRTADGSEFEKRTADGSEFESPKKKAKVE

SEQ ID NO: 2941 - protein, 2120 aa, synthetic construct; identical to SEQ ID NO: 2669

SEQ ID NO: 2942 - protein, 2116 aa, synthetic construct; identical to SEQ ID NO: 2695

SEQ ID NO: 2943 - protein, 2123 aa, synthetic construct; identical to SEQ ID NO: 2612

SEQ ID NO: 2944 - protein, 2110 aa, synthetic construct; identical to SEQ ID NO: 2691

SEQ ID NO: 2945 - protein, 2113 aa, synthetic construct; identical to SEQ ID NO: 2659

SEQ ID NO: 2946 - protein, 2114 aa, synthetic construct; identical to SEQ ID NO: 2694

SEQ ID NO: 2947 - protein, 2111 aa, synthetic construct; identical to SEQ ID NO: 2682

SEQ ID NO: 2948 - protein, 2114 aa, synthetic construct; identical to SEQ ID NO: 2675

SEQ ID NO: 2949 - protein, 2116 aa, synthetic construct; identical to SEQ ID NO: 2686

SEQ ID NO: 2950 - protein, 2114 aa, synthetic construct; identical to SEQ ID NO: 2632

SEQ ID NO: 2951 - protein, 2113 aa, synthetic construct; identical to SEQ ID NO: 2625

SEQ ID NO: 2952 - protein, 2114 aa, synthetic construct; identical to SEQ ID NO: 2699

SEQ ID NO: 2953 - protein, 2113 aa, synthetic construct
MPAAKRVKLDGGDKKYSIGLDIGTNSVGWAVITDEYKVPSKKFKVLGNTDRHSIKKNLIGALLFDSGETAEATRLKRTARRRYTRRKNRICYLQEIFSNEMAKVDDSFFHRLEESFLVEEDKKHERHPIFGNIVDEVAYHEKYPTIYHLRKKLVDSTDKADLRLIYLALAHMIKFRGHFLIEGDLNPDNSDVDKLFIQLVQTYNQLFEENPINASGVDAKAILSARLSKSRRLENLIAQLPGEKKNGLFGNLIALSLGLTPNFKSNFDLAEDAKLQLSKDTYDDDLDNLLAQIGDQYADLFLAAKNLSDAILLSDILRVNTEITKAPLSASMIKRYDEHHQDLTLLKALVRQQLPEKYKEIFFDQSKNGYAGYIDGGASQEEFYKFIKPILEKMDGTEELLVKLNREDLLRKQRTFDNGSIPHQIHLGELHAILRRQEDFYPFLKDNREKIEKILTFRIPYYVGPLARGNSRFAWMTRKSEETITPWNFEEVVDKGASAQSFIERMTNFDKNLPNEKVLPKHSLLYEYFTVYNELTKVKYVTEGMRKPAFLSGEQKKAIVDLLFKTNRKVTVKQLKEDYFKKIECFDSVEISGVEDRFNASLGTYHDLLKIIKDKDFLDNEENEDILEDIVLTLTLFEDREMIEERLKTYAHLFDDKVMKQLKRRRYTGWGRLSRKLINGIRDKQSGKTILDFLKSDGFANRNFMQLIHDDSLTFKEDIQKAQVSGQGDSLHEHIANLAGSPAIKKGILQTVKVVDELVKVMGRHKPENIVIEMARENQTTQKGQKNSRERMKRIEEGIKELGSQILKEHPVENTQLQNEKLYLYYLQNGRDMYVDQELDINRLSDYDVDHIVPQSFLKDDSIDNKVLTRSDKARGKSDNVPSEEVVKKMKNYWRQLLNAKLITQRKFDNLTKAERGGLSELDKAGFIKRQLVETRQITKHVAQILDSRMNTKYDENDKLIREVKVITLKSKLVSDFRKDFQFYKVREINNYHHAHDAYLNAVVGTALIKKYPKLESEFVYGDYKVYDVRKMIAKSEQEIGKATAKYFFYSNIMNFFKTEITLANGEIRKRPLIETNGETGEIVWDKGRDFATVRKVLSMPQVNIVKKTEVQTGGFSKESILPKRNSDKLIARKKDWDPKKYGGFDSPTVAYSVLVVAKVEKGKSKKLKSVKELLGITIMERSSFEKNPIDFLEAKGYKEVKKDLIIKLPKYSLFELENGRKRMLASAGELQKGNELALPSKYVNFLYLASHYEKLKGSPEDNEQKQLFVEQHKHYLDEIIEQISEFSKRVILADANLDKVLSAYNKHRDKPIREQAENIIHLFTLTNLGAPAAFKYFDTTIDRKRYTSTKEVLDATLIHQSITGLYETRIDLSQLGGDGGGGGEAAAKGGTLNIEDEYRLHETSKEPDVSLGSTWLSDFPQAWAETGGMGLAVRQAPLIIPLKATSTPVSIKQYPMSQEARLGIKPHIQRLLDQGILVPCQSPWNTPLLPVKKPGTNDYRPVQDLREVNKRVEDIHPTVPNPYNLLSGLPPSHQWYTVLDLKDAFFCLRLHPTSQPLFAFEWRDPEMGISGQLTWTRLPQGFKNSPTLFNEALHRDLADFRIQHPDLILLQYVDDLLLAATSELDCQQGTRALLQTLGNLGYRASAKKAQICQKQVKYLGYLLKEGQRWLTEARKETVMGQPTPKTPRQLREFLGKAGFCRLFIPGFAEMAAPLYPLTKPGTLFNWGPDQQKAYQEIKQALLTAPALGLPDLTKPFELFVDEKQGYAKGVLTQKLGPWRRPVAYLSKKLDPVAAGWPPCLRMVAAIAVLTKDAGKLTMGQPLVILAPHAVEALVKQPPDRWLSNARMTHYQALLLDTDRVQFGPVVALNPATLLPLPEEGLQHNCLDILAEAHGTRPDLTDQPLPDADHTWYTDGSSLLQEGQRKAGAAVTTETEVIWAKALPAGTSAQRAELIALTQALKMAEGKKLNVYTDSRYAFATAHIHGEIYRRRGWLTSEGKEIKNKDEILALLKALFLPKRLSIIHCPGHQKGHSAEARGNRMADQAARKAAITETPDTSTLLIENSSPSGGSKRTADGSEFEAGKRTADGSEFEKRTADGSEFESPKKKAKVE

SEQ ID NO: 2954 - protein, 2114 aa, synthetic construct
MPAAKRVKLDGGDKKYSIGLDIGTNSVGWAVITDEYKVPSKKFKVLGNTDRHSIKKNLIGALLFDSGETAEATRLKRTARRRYTRRKNRICYLQEIFSNEMAKVDDSFFHRLEESFLVEEDKKHERHPIFGNIVDEVAYHEKYPTIYHLRKKLVDSTDKADLRLIYLALAHMIKFRGHFLIEGDLNPDNSDVDKLFIQLVQTYNQLFEENPINASGVDAKAILSARLSKSRRLENLIAQLPGEKKNGLFGNLIALSLGLTPNFKSNFDLAEDAKLQLSKDTYDDDLDNLLAQIGDQYADLFLAAKNLSDAILLSDILRVNTEITKAPLSASMIKRYDEHHQDLTLLKALVRQQLPEKYKEIFFDQSKNGYAGYIDGGASQEEFYKFIKPILEKMDGTEELLVKLNREDLLRKQRTFDNGSIPHQIHLGELHAILRRQEDFYPFLKDNREKIEKILTFRIPYYVGPLARGNSRFAWMTRKSEETITPWNFEEVVDKGASAQSFIERMTNFDKNLPNEKVLPKHSLLYEYFTVYNELTKVKYVTEGMRKPAFLSGEQKKAIVDLLFKTNRKVTVKQLKEDYFKKIECFDSVEISGVEDRFNASLGTYHDLLKIIKDKDFLDNEENEDILEDIVLTLTLFEDREMIEERLKTYAHLFDDKVMKQLKRRRYTGWGRLSRKLINGIRDKQSGKTILDFLKSDGFANRNFMQLIHDDSLTFKEDIQKAQVSGQGDSLHEHIANLAGSPAIKKGILQTVKVVDELVKVMGRHKPENIVIEMARENQTTQKGQKNSRERMKRIEEGIKELGSQILKEHPVENTQLQNEKLYLYYLQNGRDMYVDQELDINRLSDYDVDHIVPQSFLKDDSIDNKVLTRSDKARGKSDNVPSEEVVKKMKNYWRQLLNAKLITQRKFDNLTKAERGGLSELDKAGFIKRQLVETRQITKHVAQILDSRMNTKYDENDKLIREVKVITLKSKLVSDFRKDFQFYKVREINNYHHAHDAYLNAVVGTALIKKYPKLESEFVYGDYKVYDVRKMIAKSEQEIGKATAKYFFYSNIMNFFKTEITLANGEIRKRPLIETNGETGEIVWDKGRDFATVRKVLSMPQVNIVKKTEVQTGGFSKESILPKRNSDKLIARKKDWDPKKYGGFDSPTVAYSVLVVAKVEKGKSKKLKSVKELLGITIMERSSFEKNPIDFLEAKGYKEVKKDLIIKLPKYSLFELENGRKRMLASAGELQKGNELALPSKYVNFLYLASHYEKLKGSPEDNEQKQLFVEQHKHYLDEIIEQISEFSKRVILADANLDKVLSAYNKHRDKPIREQAENIIHLFTLTNLGAPAAFKYFDTTIDRKRYTSTKEVLDATLIHQSITGLYETRIDLSQLGGDGGGSSGGGPAPGGTLNIEDEYRLHETSKEPDVSLGSTWLSDFPQAWAETGGMGLAVRQAPLIIPLKATSTPVSIKQYPMSQEARLGIKPHIQRLLDQGILVPCQSPWNTPLLPVKKPGTNDYRPVQDLREVNKRVEDIHPTVPNPYNLLSGLPPSHQWYTVLDLKDAFFCLRLHPTSQPLFAFEWRDPEMGISGQLTWTRLPQGFKNSPTLFNEALHRDLADFRIQHPDLILLQYVDDLLLAATSELDCQQGTRALLQTLGNLGYRASAKKAQICQKQVKYLGYLLKEGQRWLTEARKETVMGQPTPKTPRQLREFLGKAGFCRLFIPGFAEMAAPLYPLTKPGTLFNWGPDQQKAYQEIKQALLTAPALGLPDLTKPFELFVDEKQGYAKGVLTQKLGPWRRPVAYLSKKLDPVAAGWPPCLRMVAAIAVLTKDAGKLTMGQPLVILAPHAVEALVKQPPDRWLSNARMTHYQALLLDTDRVQFGPVVALNPATLLPLPEEGLQHNCLDILAEAHGTRPDLTDQPLPDADHTWYTDGSSLLQEGQRKAGAAVTTETEVIWAKALPAGTSAQRAELIALTQALKMAEGKKLNVYTDSRYAFATAHIHGEIYRRRGWLTSEGKEIKNKDEILALLKALFLPKRLSIIHCPGHQKGHSAEARGNRMADQAARKAAITETPDTSTLLIENSSPSGGSKRTADGSEFEAGKRTADGSEFEKRTADGSEFESPKKKAKVE

SEQ ID NO: 2955 - protein, 2114 aa, synthetic construct; identical to SEQ ID NO: 2689

SEQ ID NO: 2956 - protein, 1999 aa, synthetic construct
MPAAKRVKLDGGDKKYSIGLDIGTNSVGWAVITDEYKVPSKKFKVLGNTDRHSIKKNLIGALLFDSGETAEATRLKRTARRRYTRRKNRICYLQEIFSNEMAKVDDSFFHRLEESFLVEEDKKHERHPIFGNIVDEVAYHEKYPTIYHLRKKLVDSTDKADLRLIYLALAHMIKFRGHFLIEGDLNPDNSDVDKLFIQLVQTYNQLFEENPINASGVDAKAILSARLSKSRRLENLIAQLPGEKKNGLFGNLIALSLGLTPNFKSNFDLAEDAKLQLSKDTYDDDLDNLLAQIGDQYADLFLAAKNLSDAILLSDILRVNTEITKAPLSASMIKRYDEHHQDLTLLKALVRQQLPEKYKEIFFDQSKNGYAGYIDGGASQEEFYKFIKPILEKMDGTEELLVKLNREDLLRKQRTFDNGSIPHQIHLGELHAILRRQEDFYPFLKDNREKIEKILTFRIPYYVGPLARGNSRFAWMTRKSEETITPWNFEEVVDKGASAQSFIERMTNFDKNLPNEKVLPKHSLLYEYFTVYNELTKVKYVTEGMRKPAFLSGEQKKAIVDLLFKTNRKVTVKQLKEDYFKKIECFDSVEISGVEDRFNASLGTYHDLLKIIKDKDFLDNEENEDILEDIVLTLTLFEDREMIEERLKTYAHLFDDKVMKQLKRRRYTGWGRLSRKLINGIRDKQSGKTILDFLKSDGFANRNFMQLIHDDSLTFKEDIQKAQVSGQGDSLHEHIANLAGSPAIKKGILQTVKVVDELVKVMGRHKPENIVIEMARENQTTQKGQKNSRERMKRIEEGIKELGSQILKEHPVENTQLQNEKLYLYYLQNGRDMYVDQELDINRLSDYDVDHIVPQSFLKDDSIDNKVLTRSDKARGKSDNVPSEEVVKKMKNYWRQLLNAKLITQRKFDNLTKAERGGLSELDKAGFIKRQLVETRQITKHVAQILDSRMNTKYDENDKLIREVKVITLKSKLVSDFRKDFQFYKVREINNYHHAHDAYLNAVVGTALIKKYPKLESEFVYGDYKVYDVRKMIAKSEQEIGKATAKYFFYSNIMNFFKTEITLANGEIRKRPLIETNGETGEIVWDKGRDFATVRKVLSMPQVNIVKKTEVQTGGFSKESILPKRNSDKLIARKKDWDPKKYGGFDSPTVAYSVLVVAKVEKGKSKKLKSVKELLGITIMERSSFEKNPIDFLEAKGYKEVKKDLIIKLPKYSLFELENGRKRMLASAGELQKGNELALPSKYVNFLYLASHYEKLKGSPEDNEQKQLFVEQHKHYLDEIIEQISEFSKRVILADANLDKVLSAYNKHRDKPIREQAENIIHLFTLTNLGAPAAFKYFDTTIDRKRYTSTKEVLDATLIHQSITGLYETRIDLSQLGGDGGGGGGSSGGSGGGVLDAPPSHIGLEHLPPPPEVPQFPLNLERLQALQDLVHRSLEAGYISPWDGPGNNPVFPVRKPNGAWRFVHDLRVTNALTKPIPALSPGPPDLTAIPTHLPHIICLDLKDAFFQIPVEDRFRSYFAFTLPTPGGLQPHRRFAWRVLPQGFINSPALFQRALQEPLRQVSAAFSQSLLVSYMDDILYVSPTEEQRLQCYQTMAAHLRDLGFQVASEKTRQTPSPVPFLGQMVHERMVTYQSLPTLQISSPISLHQLQTVLGDLQWVSRGTPTTRRPLQLLYSSLKPIDDPRAIIHLSPEQQQGIAELRQALSHNARSRYNEQEPLLAYVHLTRAGSTLVLFQKGAQFPLAYFQTPLTDNQASPWGLLLLLGCQYLQAQALSSYAKTILKYYHNLPKTSLDNWIQSSEDPRVQELLQLWPQISSQGIQPPGPWKTLVTRAEVFLTPQFSPEPIPAALCLFSDGAARRGAYCLWKDHLLDFQAVPAPESAQKGELAGLLAGLAAAPPEPLNIWVDSKYLYSLLRTLVLGAWLQPDPVPSYALLYKSLLRHPAIFVGHVRSHSSASHPIASLNNYVDQLAGKRTADGSEFEKRTADGSEFESPKKKAKVE

SEQ ID NO: 2957 - protein, 2131 aa, synthetic construct
MPAAKRVKLDGGDKKYSIGLDIGTNSVGWAVITDEYKVPSKKFKVLGNTDRHSIKKNLIGALLFDSGETAEATRLKRTARRRYTRRKNRICYLQEIFSNEMAKVDDSFFHRLEESFLVEEDKKHERHPIFGNIVDEVAYHEKYPTIYHLRKKLVDSTDKADLRLIYLALAHMIKFRGHFLIEGDLNPDNSDVDKLFIQLVQTYNQLFEENPINASGVDAKAILSARLSKSRRLENLIAQLPGEKKNGLFGNLIALSLGLTPNFKSNFDLAEDAKLQLSKDTYDDDLDNLLAQIGDQYADLFLAAKNLSDAILLSDILRVNTEITKAPLSASMIKRYDEHHQDLTLLKALVRQQLPEKYKEIFFDQSKNGYAGYIDGGASQEEFYKFIKPILEKMDGTEELLVKLNREDLLRKQRTFDNGSIPHQIHLGELHAILRRQEDFYPFLKDNREKIEKILTFRIPYYVGPLARGNSRFAWMTRKSEETITPWNFEEVVDKGASAQSFIERMTNFDKNLPNEKVLPKHSLLYEYFTVYNELTKVKYVTEGMRKPAFLSGEQKKAIVDLLFKTNRKVTVKQLKEDYFKKIECFDSVEISGVEDRFNASLGTYHDLLKIIKDKDFLDNEENEDILEDIVLTLTLFEDREMIEERLKTYAHLFDDKVMKQLKRRRYTGWGRLSRKLINGIRDKQSGKTILDFLKSDGFANRNFMQLIHDDSLTFKEDIQKAQVSGQGDSLHEHIANLAGSPAIKKGILQTVKVVDELVKVMGRHKPENIVIEMARENQTTQKGQKNSRERMKRIEEGIKELGSQILKEHPVENTQLQNEKLYLYYLQNGRDMYVDQELDINRLSDYDVDHIVPQSFLKDDSIDNKVLTRSDKARGKSDNVPSEEVVKKMKNYWRQLLNAKLITQRKFDNLTKAERGGLSELDKAGFIKRQLVETRQITKHVAQILDSRMNTKYDENDKLIREVKVITLKSKLVSDFRKDFQFYKVREINNYHHAHDAYLNAVVGTALIKKYPKLESEFVYGDYKVYDVRKMIAKSEQEIGKATAKYFFYSNIMNFFKTEITLANGEIRKRPLIETNGETGEIVWDKGRDFATVRKVLSMPQVNIVKKTEVQTGGFSKESILPKRNSDKLIARKKDWDPKKYGGFDSPTVAYSVLVVAKVEKGKSKKLKSVKELLGITIMERSSFEKNPIDFLEAKGYKEVKKDLIIKLPKYSLFELENGRKRMLASAGELQKGNELALPSKYVNFLYLASHYEKLKGSPEDNEQKQLFVEQHKHYLDEIIEQISEFSKRVILADANLDKVLSAYNKHRDKPIREQAENIIHLFTLTNLGAPAAFKYFDTTIDRKRYTSTKEVLDATLIHQSITGLYETRIDLSQLGGDGGAEAAAKEAAAKEAAAKEAAAKALEAEAAAKEAAAKEAAAKEAAAKAGGTLNIEDEHRLHETSKEPDVSLGSTWLSDFPQAWAETGGMGLAVRQAPLIIPLKATSTPVSIKQYPMSQEARLGIKPHIQRLLDQGILVPCQSPWNTPLLPVKKPGTNDYRPVQDLREVNKRVEDIHPTVPNPYNLLSGLPPSHQWYTVLDLKDAFFCLRLHPTSQPLFAFEWRDPEMGISGQLTWTRLPQGFKNSPTLFDEALHRDLADFRIQHPDLILLQYVDDLLLAATSELDCQQGTRALLQTLGNLGYRASAKKAQICQKQVKYLGYLLKEGQRWLTEARKETVMGQPTPKTPRQLREFLGTAGFCRLWIPGFAEMAAPLYPLTKTGTLFNWGPDQQKAYQEIKQALLTAPALGLPDLTKPFELFVDEKQGYAKGVLTQKLGPWRRPVAYLSKKLDPVAAGWPPCLRMVAAIAVLTKDAGKLTMGQPLVILAPHAVEALVKQPPDRWLSNARMTHYQALLLDTDRVQFGPVVALNPATLLPLPEEGLQHNCLDILAEAHGTRPDLTDQPLPDADHTWYTDGSSLLQEGQRKAGAAVTTETEVIWAKALPAGTSAQRAELIALTQALKMAEGKKLNVYTDSRYAFATAHIHGEIYRRRGLLTSEGKEIKNKDEILALLKALFLPKRLSIIHCPGHQKGHSAEARGNRMADQAARKAAITETPDTSTLLAGKRTADGSEFEKRTADGSEFESPKKKAKVE

SEQ ID NO: 2958 - protein, 2101 aa, synthetic construct
MPAAKRVKLDGGDKKYSIGLDIGTNSVGWAVITDEYKVPSKKFKVLGNTDRHSIKKNLIGALLFDSGETAEATRLKRTARRRYTRRKNRICYLQEIFSNEMAKVDDSFFHRLEESFLVEEDKKHERHPIFGNIVDEVAYHEKYPTIYHLRKKLVDSTDKADLRLIYLALAHMIKFRGHFLIEGDLNPDNSDVDKLFIQLVQTYNQLFEENPINASGVDAKAILSARLSKSRRLENLIAQLPGEKKNGLFGNLIALSLGLTPNFKSNFDLAEDAKLQLSKDTYDDDLDNLLAQIGDQYADLFLAAKNLSDAILLSDILRVNTEITKAPLSASMIKRYDEHHQDLTLLKALVRQQLPEKYKEIFFDQSKNGYAGYIDGGASQEEFYKFIKPILEKMDGTEELLVKLNREDLLRKQRTFDNGSIPHQIHLGELHAILRRQEDFYPFLKDNREKIEKILTFRIPYYVGPLARGNSRFAWMTRKSEETITPWNFEEVVDKGASAQSFIERMTNFDKNLPNEKVLPKHSLLYEYFTVYNELTKVKYVTEGMRKPAFLSGEQKKAIVDLLFKTNRKVTVKQLKEDYFKKIECFDSVEISGVEDRFNASLGTYHDLLKIIKDKDFLDNEENEDILEDIVLTLTLFEDREMIEERLKTYAHLFDDKVMKQLKRRRYTGWGRLSRKLINGIRDKQSGKTILDFLKSDGFANRNFMQLIHDDSLTFKEDIQKAQVSGQGDSLHEHIANLAGSPAIKKGILQTVKVVDELVKVMGRHKPENIVIEMARENQTTQKGQKNSRERMKRIEEGIKELGSQILKEHPVENTQLQNEKLYLYYLQNGRDMYVDQELDINRLSDYDVDHIVPQSFLKDDSIDNKVLTRSDKARGKSDNVPSEEVVKKMKNYWRQLLNAKLITQRKFDNLTKAERGGLSELDKAGFIKRQLVETRQITKHVAQILDSRMNTKYDENDKLIREVKVITLKSKLVSDFRKDFQFYKVREINNYHHAHDAYLNAVVGTALIKKYPKLESEFVYGDYKVYDVRKMIAKSEQEIGKATAKYFFYSNIMNFFKTEITLANGEIRKRPLIETNGETGEIVWDKGRDFATVRKVLSMPQVNIVKKTEVQTGGFSKESILPKRNSDKLIARKKDWDPKKYGGFDSPTVAYSVLVVAKVEKGKSKKLKSVKELLGITIMERSSFEKNPIDFLEAKGYKEVKKDLIIKLPKYSLFELENGRKRMLASAGELQKGNELALPSKYVNFLYLASHYEKLKGSPEDNEQKQLFVEQHKHYLDEIIEQISEFSKRVILADANLDKVLSAYNKHRDKPIREQAENIIHLFTLTNLGAPAAFKYFDTTIDRKRYTSTKEVLDATLIHQSITGLYETRIDLSQLGGDGGSGSETPGTSESATPESGGTLNIEDEHRLHETSKEPDVSLGSTWLSDFPQAWAETGGMGLAVRQAPLIIPLKATSTPVSIKQYPMSQEARLGIKPHIQRLLDQGILVPCQSPWNTPLLPVKKPGTNDYRPVQDLREVNKRVEDIHPTVPNPYNLLSGLPPSHQWYTVLDLKDAFFCLRLHPTSQPLFAFEWRDPEMGISGQLTWTRLPQGFKNSPTLFDEALHRDLADFRIQHPDLILLQYVDDLLLAATSELDCQQGTRALLQTLGNLGYRASAKKAQICQKQVKYLGYLLKEGQRWLTEARKETVMGQPTPKTPRQLREFLGTAGFCRLWIPGFAEMAAPLYPLTKTGTLFNWGPDQQKAYQEIKQALLTAPALGLPDLTKPFELFVDEKQGYAKGVLTQKLGPWRRPVAYLSKKLDPVAAGWPPCLRMVAAIAVLTKDAGKLTMGQPLVILAPHAVEALVKQPPDRWLSNARMTHYQALLLDTDRVQFGPVVALNPATLLPLPEEGLQHNCLDILAEAHGTRPDLTDQPLPDADHTWYTDGSSLLQEGQRKAGAAVTTETEVIWAKALPAGTSAQRAELIALTQALKMAEGKKLNVYTDSRYAFATAHIHGEIYRRRGLLTSEGKEIKNKDEILALLKALFLPKRLSIIHCPGHQKGHSAEARGNRMADQAARKAAITETPDTSTLLAGKRTADGSEFEKRTADGSEFESPKKKAKVE

SEQ ID NO: 2959 - protein, 2096 aa, synthetic construct
MPAAKRVKLDGGDKKYSIGLDIGTNSVGWAVITDEYKVPSKKFKVLGNTDRHSIKKNLIGALLFDSGETAEATRLKRTARRRYTRRKNRICYLQEIFSNEMAKVDDSFFHRLEESFLVEEDKKHERHPIFGNIVDEVAYHEKYPTIYHLRKKLVDSTDKADLRLIYLALAHMIKFRGHFLIEGDLNPDNSDVDKLFIQLVQTYNQLFEENPINASGVDAKAILSARLSKSRRLENLIAQLPGEKKNGLFGNLIALSLGLTPNFKSNFDLAEDAKLQLSKDTYDDDLDNLLAQIGDQYADLFLAAKNLSDAILLSDILRVNTEITKAPLSASMIKRYDEHHQDLTLLKALVRQQLPEKYKEIFFDQSKNGYAGYIDGGASQEEFYKFIKPILEKMDGTEELLVKLNREDLLRKQRTFDNGSIPHQIHLGELHAILRRQEDFYPFLKDNREKIEKILTFRIPYYVGPLARGNSRFAWMTRKSEETITPWNFEEVVDKGASAQSFIERMTNFDKNLPNEKVLPKHSLLYEYFTVYNELTKVKYVTEGMRKPAFLSGEQKKAIVDLLFKTNRKVTVKQLKEDYFKKIECFDSVEISGVEDRFNASLGTYHDLLKIIKDKDFLDNEENEDILEDIVLTLTLFEDREMIEERLKTYAHLFDDKVMKQLKRRRYTGWGRLSRKLINGIRDKQSGKTILDFLKSDGFANRNFMQLIHDDSLTFKEDIQKAQVSGQGDSLHEHIANLAGSPAIKKGILQTVKVVDELVKVMGRHKPENIVIEMARENQTTQKGQKNSRERMKRIEEGIKELGSQILKEHPVENTQLQNEKLYLYYLQNGRDMYVDQELDINRLSDYDVDHIVPQSFLKDDSIDNKVLTRSDKARGKSDNVPSEEVVKKMKNYWRQLLNAKLITQRKFDNLTKAERGGLSELDKAGFIKRQLVETRQITKHVAQILDSRMNTKYDENDKLIREVKVITLKSKLVSDFRKDFQFYKVREINNYHHAHDAYLNAVVGTALIKKYPKLESEFVYGDYKVYDVRKMIAKSEQEIGKATAKYFFYSNIMNFFKTEITLANGEIRKRPLIETNGETGEIVWDKGRDFATVRKVLSMPQVNIVKKTEVQTGGFSKESILPKRNSDKLIARKKDWDPKKYGGFDSPTVAYSVLVVAKVEKGKSKKLKSVKELLGITIMERSSFEKNPIDFLEAKGYKEVKKDLIIKLPKYSLFELENGRKRMLASAGELQKGNELALPSKYVNFLYLASHYEKLKGSPEDNEQKQLFVEQHKHYLDEIIEQISEFSKRVILADANLDKVLSAYNKHRDKPIREQAENIIHLFTLTNLGAPAAFKYFDTTIDRKRYTSTKEVLDATLIHQSITGLYETRIDLSQLGGDGGEAAAKGGSGGGGGTLNIEDEHRLHETSKEPDVSLGSTWLSDFPQAWAETGGMGLAVRQAPLIIPLKATSTPVSIKQYPMSQEARLGIKPHIQRLLDQGILVPCQSPWNTPLLPVKKPGTNDYRPVQDLREVNKRVEDIHPTVPNPYNLLSGLPPSHQWYTVLDLKDAFFCLRLHPTSQPLFAFEWRDPEMGISGQLTWTRLPQGFKNSPTLFDEALHRDLADFRIQHPDLILLQYVDDLLLAATSELDCQQGTRALLQTLGNLGYRASAKKAQICQKQVKYLGYLLKEGQRWLTEARKETVMGQPTPKTPRQLREFLGTAGFCRLWIPGFAEMAAPLYPLTKTGTLFNWGPDQQKAYQEIKQALLTAPALGLPDLTKPFELFVDEKQGYAKGVLTQKLGPWRRPVAYLSKKLDPVAAGWPPCLRMVAAIAVLTKDAGKLTMGQPLVILAPHAVEALVKQPPDRWLSNARMTHYQALLLDTDRVQFGPVVALNPATLLPLPEEGLQHNCLDILAEAHGTRPDLTDQPLPDADHTWYTDGSSLLQEGQRKAGAAVTTETEVIWAKALPAGTSAQRAELIALTQALKMAEGKKLNVYTDSRYAFATAHIHGEIYRRRGLLTSEGKEIKNKDEILALLKALFLPKRLSIIHCPGHQKGHSAEARGNRMADQAARKAAITETPDTSTLLAGKRTADGSEFEKRTADGSEFESPKKKAKVE

SEQ ID NO: 2960 - protein, 2096 aa, synthetic construct
MPAAKRVKLDGGDKKYSIGLDIGTNSVGWAVITDEYKVPSKKFKVLGNTDRHSIKKNLIGALLFDSGETAEATRLKRTARRRYTRRKNRICYLQEIFSNEMAKVDDSFFHRLEESFLVEEDKKHERHPIFGNIVDEVAYHEKYPTIYHLRKKLVDSTDKADLRLIYLALAHMIKFRGHFLIEGDLNPDNSDVDKLFIQLVQTYNQLFEENPINASGVDAKAILSARLSKSRRLENLIAQLPGEKKNGLFGNLIALSLGLTPNFKSNFDLAEDAKLQLSKDTYDDDLDNLLAQIGDQYADLFLAAKNLSDAILLSDILRVNTEITKAPLSASMIKRYDEHHQDLTLLKALVRQQLPEKYKEIFFDQSKNGYAGYIDGGASQEEFYKFIKPILEKMDGTEELLVKLNREDLLRKQRTFDNGSIPHQIHLGELHAILRRQEDFYPFLKDNREKIEKILTFRIPYYVGPLARGNSRFAWMTRKSEETITPWNFEEVVDKGASAQSFIERMTNFDKNLPNEKVLPKHSLLYEYFTVYNELTKVKYVTEGMRKPAFLSGEQKKAIVDLLFKTNRKVTVKQLKEDYFKKIECFDSVEISGVEDRFNASLGTYHDLLKIIKDKDFLDNEENEDILEDIVLTLTLFEDREMIEERLKTYAHLFDDKVMKQLKRRRYTGWGRLSRKLINGIRDKQSGKTILDFLKSDGFANRNFMQLIHDDSLTFKEDIQKAQVSGQGDSLHEHIANLAGSPAIKKGILQTVKVVDELVKVMGRHKPENIVIEMARENQTTQKGQKNSRERMKRIEEGIKELGSQILKEHPVENTQLQNEKLYLYYLQNGRDMYVDQELDINRLSDYDVDHIVPQSFLKDDSIDNKVLTRSDKARGKSDNVPSEEVVKKMKNYWRQLLNAKLITQRKFDNLTKAERGGLSELDKAGFIKRQLVETRQITKHVAQILDSRMNTKYDENDKLIREVKVITLKSKLVSDFRKDFQFYKVREINNYHHAHDAYLNAVVGTALIKKYPKLESEFVYGDYKVYDVRKMIAKSEQEIGKATAKYFFYSNIMNFFKTEITLANGEIRKRPLIETNGETGEIVWDKGRDFATVRKVLSMPQVNIVKKTEVQTGGFSKESILPKRNSDKLIARKKDWDPKKYGGFDSPTVAYSVLVVAKVEKGKSKKLKSVKELLGITIMERSSFEKNPIDFLEAKGYKEVKKDLIIKLPKYSLFELENGRKRMLASAGELQKGNELALPSKYVNFLYLASHYEKLKGSPEDNEQKQLFVEQHKHYLDEIIEQISEFSKRVILADANLDKVLSAYNKHRDKPIREQAENIIHLFTLTNLGAPAAFKYFDTTIDRKRYTSTKEVLDATLIHQSITGLYETRIDLSQLGGDGGGGSEAAAKGSSGGTLNIEDEHRLHETSKEPDVSLGSTWLSDFPQAWAETGGMGLAVRQAPLIIPLKATSTPVSIKQYPMSQEARLGIKPHIQRLLDQGILVPCQSPWNTPLLPVKKPGTNDYRPVQDLREVNKRVEDIHPTVPNPYNLLSGLPPSHQWYTVLDLKDAFFCLRLHPTSQPLFAFEWRDPEMGISGQLTWTRLPQGFKNSPTLFDEALHRDLADFRIQHPDLILLQYVDDLLLAATSELDCQQGTRALLQTLGNLGYRASAKKAQICQKQVKYLGYLLKEGQRWLTEARKETVMGQPTPKTPRQLREFLGTAGFCRLWIPGFAEMAAPLYPLTKTGTLFNWGPDQQKAYQEIKQALLTAPALGLPDLTKPFELFVDEKQGYAKGVLTQKLGPWRRPVAYLSKKLDPVAAGWPPCLRMVAAIAVLTKDAGKLTMGQPLVILAPHAVEALVKQPPDRWLSNARMTHYQALLLDTDRVQFGPVVALNPATLLPLPEEGLQHNCLDILAEAHGTRPDLTDQPLPDADHTWYTDGSSLLQEGQRKAGAAVTTETEVIWAKALPAGTSAQRAELIALTQALKMAEGKKLNVYTDSRYAFATAHIHGEIYRRRGLLTSEGKEIKNKDEILALLKALFLPKRLSIIHCPGHQKGHSAEARGNRMADQAARKAAITETPDTSTLLAGKRTADGSEFEKRTADGSEFESPKKKAKVE

SEQ ID NO: 2961 - protein, 2096 aa, synthetic construct
MPAAKRVKLDGGDKKYSIGLDIGTNSVGWAVITDEYKVPSKKFKVLGNTDRHSIKKNLIGALLFDSGETAEATRLKRTARRRYTRRKNRICYLQEIFSNEMAKVDDSFFHRLEESFLVEEDKKHERHPIFGNIVDEVAYHEKYPTIYHLRKKLVDSTDKADLRLIYLALAHMIKFRGHFLIEGDLNPDNSDVDKLFIQLVQTYNQLFEENPINASGVDAKAILSARLSKSRRLENLIAQLPGEKKNGLFGNLIALSLGLTPNFKSNFDLAEDAKLQLSKDTYDDDLDNLLAQIGDQYADLFLAAKNLSDAILLSDILRVNTEITKAPLSASMIKRYDEHHQDLTLLKALVRQQLPEKYKEIFFDQSKNGYAGYIDGGASQEEFYKFIKPILEKMDGTEELLVKLNREDLLRKQRTFDNGSIPHQIHLGELHAILRRQEDFYPFLKDNREKIEKILTFRIPYYVGPLARGNSRFAWMTRKSEETITPWNFEEVVDKGASAQSFIERMTNFDKNLPNEKVLPKHSLLYEYFTVYNELTKVKYVTEGMRKPAFLSGEQKKAIVDLLFKTNRKVTVKQLKEDYFKKIECFDSVEISGVEDRFNASLGTYHDLLKIIKDKDFLDNEENEDILEDIVLTLTLFEDREMIEERLKTYAHLFDDKVMKQLKRRRYTGWGRLSRKLINGIRDKQSGKTILDFLKSDGFANRNFMQLIHDDSLTFKEDIQKAQVSGQGDSLHEHIANLAGSPAIKKGILQTVKVVDELVKVMGRHKPENIVIEMARENQTTQKGQKNSRERMKRIEEGIKELGSQILKEHPVENTQLQNEKLYLYYLQNGRDMYVDQELDINRLSDYDVDHIVPQSFLKDDSIDNKVLTRSDKARGKSDNVPSEEVVKKMKNYWRQLLNAKLITQRKFDNLTKAERGGLSELDKAGFIKRQLVETRQITKHVAQILDSRMNTKYDENDKLIREVKVITLKSKLVSDFRKDFQFYKVREINNYHHAHDAYLNAVVGTALIKKYPKLESEFVYGDYKVYDVRKMIAKSEQEIGKATAKYFFYSNIMNFFKTEITLANGEIRKRPLIETNGETGEIVWDKGRDFATVRKVLSMPQVNIVKKTEVQTGGFSKESILPKRNSDKLIARKKDWDPKKYGGFDSPTVAYSVLVVAKVEKGKSKKLKSVKELLGITIMERSSFEKNPIDFLEAKGYKEVKKDLIIKLPKYSLFELENGRKRMLASAGELQKGNELALPSKYVNFLYLASHYEKLKGSPEDNEQKQLFVEQHKHYLDEIIEQISEFSKRVILADANLDKVLSAYNKHRDKPIREQAENIIHLFTLTNLGAPAAFKYFDTTIDRKRYTSTKEVLDATLIHQSITGLYETRIDLSQLGGDGGPAPGGSEAAAKGGTLNIEDEHRLHETSKEPDVSLGSTWLSDFPQAWAETGGMGLAVRQAPLIIPLKATSTPVSIKQYPMSQEARLGIKPHIQRLLDQGILVPCQSPWNTPLLPVKKPGTNDYRPVQDLREVNKRVEDIHPTVPNPYNLLSGLPPSHQWYTVLDLKDAFFCLRLHPTSQPLFAFEWRDPEMGISGQLTWTRLPQGFKNSPTLFDEALHRDLADFRIQHPDLILLQYVDDLLLAATSELDCQQGTRALLQTLGNLGYRASAKKAQICQKQVKYLGYLLKEGQRWLTEARKETVMGQPTPKTPRQLREFLGTAGFCRLWIPGFAEMAAPLYPLTKTGTLFNWGPDQQKAYQEIKQALLTAPALGLPDLTKPFELFVDEKQGYAKGVLTQKLGPWRRPVAYLSKKLDPVAAGWPPCLRMVAAIAVLTKDAGKLTMGQPLVILAPHAVEALVKQPPDRWLSNARMTHYQALLLDTDRVQFGPVVALNPATLLPLPEEGLQHNCLDILAEAHGTRPDLTDQPLPDADHTWYTDGSSLLQEGQRKAGAAVTTETEVIWAKALPAGTSAQRAELIALTQALKMAEGKKLNVYTDSRYAFATAHIHGEIYRRRGLLTSEGKEIKNKDEILALLKALFLPKRLSIIHCPGHQKGHSAEARGNRMADQAARKAAITETPDTSTLLAGKRTADGSEFEKRTADGSEFESPKKKAKVE

SEQ ID NO: 2962 - protein, 2093 aa, synthetic construct
MPAAKRVKLDGGDKKYSIGLDIGTNSVGWAVITDEYKVPSKKFKVLGNTDRHSIKKNLIGALLFDSGETAEATRLKRTARRRYTRRKNRICYLQEIFSNEMAKVDDSFFHRLEESFLVEEDKKHERHPIFGNIVDEVAYHEKYPTIYHLRKKLVDSTDKADLRLIYLALAHMIKFRGHFLIEGDLNPDNSDVDKLFIQLVQTYNQLFEENPINASGVDAKAILSARLSKSRRLENLIAQLPGEKKNGLFGNLIALSLGLTPNFKSNFDLAEDAKLQLSKDTYDDDLDNLLAQIGDQYADLFLAAKNLSDAILLSDILRVNTEITKAPLSASMIKRYDEHHQDLTLLKALVRQQLPEKYKEIFFDQSKNGYAGYIDGGASQEEFYKFIKPILEKMDGTEELLVKLNREDLLRKQRTFDNGSIPHQIHLGELHAILRRQEDFYPFLKDNREKIEKILTFRIPYYVGPLARGNSRFAWMTRKSEETITPWNFEEVVDKGASAQSFIERMTNFDKNLPNEKVLPKHSLLYEYFTVYNELTKVKYVTEGMRKPAFLSGEQKKAIVDLLFKTNRKVTVKQLKEDYFKKIECFDSVEISGVEDRFNASLGTYHDLLKIIKDKDFLDNEENEDILEDIVLTLTLFEDREMIEERLKTYAHLFDDKVMKQLKRRRYTGWGRLSRKLINGIRDKQSGKTILDFLKSDGFANRNFMQLIHDDSLTFKEDIQKAQVSGQGDSLHEHIANLAGSPAIKKGILQTVKVVDELVKVMGRHKPENIVIEMARENQTTQKGQKNSRERMKRIEEGIKELGSQILKEHPVENTQLQNEKLYLYYLQNGRDMYVDQELDINRLSDYDVDHIVPQSFLKDDSIDNKVLTRSDKARGKSDNVPSEEVVKKMKNYWRQLLNAKLITQRKFDNLTKAERGGLSELDKAGFIKRQLVETRQITKHVAQILDSRMNTKYDENDKLIREVKVITLKSKLVSDFRKDFQFYKVREINNYHHAHDAYLNAVVGTALIKKYPKLESEFVYGDYKVYDVRKMIAKSEQEIGKATAKYFFYSNIMNFFKTEITLANGEIRKRPLIETNGETGEIVWDKGRDFATVRKVLSMPQVNIVKKTEVQTGGFSKESILPKRNSDKLIARKKDWDPKKYGGFDSPTVAYSVLVVAKVEKGKSKKLKSVKELLGITIMERSSFEKNPIDFLEAKGYKEVKKDLIIKLPKYSLFELENGRKRMLASAGELQKGNELALPSKYVNFLYLASHYEKLKGSPEDNEQKQLFVEQHKHYLDEIIEQISEFSKRVILADANLDKVLSAYNKHRDKPIREQAENIIHLFTLTNLGAPAAFKYFDTTIDRKRYTSTKEVLDATLIHQSITGLYETRIDLSQLGGDGGGGSEAAAKGGTLNIEDEHRLHETSKEPDVSLGSTWLSDFPQAWAETGGMGLAVRQAPLIIPLKATSTPVSIKQYPMSQEARLGIKPHIQRLLDQGILVPCQSPWNTPLLPVKKPGTNDYRPVQDLREVNKRVEDIHPTVPNPYNLLSGLPPSHQWYTVLDLKDAFFCLRLHPTSQPLFAFEWRDPEMGISGQLTWTRLPQGFKNSPTLFDEALHRDLADFRIQHPDLILLQYVDDLLLAATSELDCQQGTRALLQTLGNLGYRASAKKAQICQKQVKYLGYLLKEGQRWLTEARKETVMGQPTPKTPRQLREFLGTAGFCRLWIPGFAEMAAPLYPLTKTGTLFNWGPDQQKAYQEIKQALLTAPALGLPDLTKPFELFVDEKQGYAKGVLTQKLGPWRRPVAYLSKKLDPVAAGWPPCLRMVAAIAVLTKDAGKLTMGQPLVILAPHAVEALVKQPPDRWLSNARMTHYQALLLDTDRVQFGPVVALNPATLLPLPEEGLQHNCLDILAEAHGTRPDLTDQPLPDADHTWYTDGSSLLQEGQRKAGAAVTTETEVIWAKALPAGTSAQRAELIALTQALKMAEGKKLNVYTDSRYAFATAHIHGEIYRRRGLLTSEGKEIKNKDEILALLKALFLPKRLSIIHCPGHQKGHSAEARGNRMADQAARKAAITETPDTSTLLAGKRTADGSEFEKRTADGSEFESPKKKAKVE

SEQ ID NO: 2963 - protein, 2088 aa, synthetic construct
MPAAKRVKLDGGDKKYSIGLDIGTNSVGWAVITDEYKVPSKKFKVLGNTDRHSIKKNLIGALLFDSGETAEATRLKRTARRRYTRRKNRICYLQEIFSNEMAKVDDSFFHRLEESFLVEEDKKHERHPIFGNIVDEVAYHEKYPTIYHLRKKLVDSTDKADLRLIYLALAHMIKFRGHFLIEGDLNPDNSDVDKLFIQLVQTYNQLFEENPINASGVDAKAILSARLSKSRRLENLIAQLPGEKKNGLFGNLIALSLGLTPNFKSNFDLAEDAKLQLSKDTYDDDLDNLLAQIGDQYADLFLAAKNLSDAILLSDILRVNTEITKAPLSASMIKRYDEHHQDLTLLKALVRQQLPEKYKEIFFDQSKNGYAGYIDGGASQEEFYKFIKPILEKMDGTEELLVKLNREDLLRKQRTFDNGSIPHQIHLGELHAILRRQEDFYPFLKDNREKIEKILTFRIPYYVGPLARGNSRFAWMTRKSEETITPWNFEEVVDKGASAQSFIERMTNFDKNLPNEKVLPKHSLLYEYFTVYNELTKVKYVTEGMRKPAFLSGEQKKAIVDLLFKTNRKVTVKQLKEDYFKKIECFDSVEISGVEDRFNASLGTYHDLLKIIKDKDFLDNEENEDILEDIVLTLTLFEDREMIEERLKTYAHLFDDKVMKQLKRRRYTGWGRLSRKLINGIRDKQSGKTILDFLKSDGFANRNFMQLIHDDSLTFKEDIQKAQVSGQGDSLHEHIANLAGSPAIKKGILQTVKVVDELVKVMGRHKPENIVIEMARENQTTQKGQKNSRERMKRIEEGIKELGSQILKEHPVENTQLQNEKLYLYYLQNGRDMYVDQELDINRLSDYDVDHIVPQSFLKDDSIDNKVLTRSDKARGKSDNVPSEEVVKKMKNYWRQLLNAKLITQRKFDNLTKAERGGLSELDKAGFIKRQLVETRQITKHVAQILDSRMNTKYDENDKLIREVKVITLKSKLVSDFRKDFQFYKVREINNYHHAHDAYLNAVVGTALIKKYPKLESEFVYGDYKVYDVRKMIAKSEQEIGKATAKYFFYSNIMNFFKTEITLANGEIRKRPLIETNGETGEIVWDKGRDFATVRKVLSMPQVNIVKKTEVQTGGFSKESILPKRNSDKLIARKKDWDPKKYGGFDSPTVAYSVLVVAKVEKGKSKKLKSVKELLGITIMERSSFEKNPIDFLEAKGYKEVKKDLIIKLPKYSLFELENGRKRMLASAGELQKGNELALPSKYVNFLYLASHYEKLKGSPEDNEQKQLFVEQHKHYLDEIIEQISEFSKRVILADANLDKVLSAYNKHRDKPIREQAENIIHLFTLTNLGAPAAFKYFDTTIDRKRYTSTKEVLDATLIHQSITGLYETRIDLSQLGGDGGGSSGGTLNIEDEHRLHETSKEPDVSLGSTWLSDFPQAWAETGGMGLAVRQAPLIIPLKATSTPVSIKQYPMSQEARLGIKPHIQRLLDQGILVPCQSPWNTPLLPVKKPGTNDYRPVQDLREVNKRVEDIHPTVPNPYNLLSGLPPSHQWYTVLDLKDAFFCLRLHPTSQPLFAFEWRDPEMGISGQLTWTRLPQGFKNSPTLFDEALHRDLADFRIQHPDLILLQYVDDLLLAATSELDCQQGTRALLQTLGNLGYRASAKKAQICQKQVKYLGYLLKEGQRWLTEARKETVMGQPTPKTPRQLREFLGTAGFCRLWIPGFAEMAAPLYPLTKTGTLFNWGPDQQKAYQEIKQALLTAPALGLPDLTKPFELFVDEKQGYAKGVLTQKLGPWRRPVAYLSKKLDPVAAGWPPCLRMVAAIAVLTKDAGKLTMGQPLVILAPHAVEALVKQPPDRWLSNARMTHYQALLLDTDRVQFGPVVALNPATLLPLPEEGLQHNCLDILAEAHGTRPDLTDQPLPDADHTWYTDGSSLLQEGQRKAGAAVTTETEVIWAKALPAGTSAQRAELIALTQALKMAEGKKLNVYTDSRYAFATAHIHGEIYRRRGLLTSEGKEIKNKDEILALLKALFLPKRLSIIHCPGHQKGHSAEARGNRMADQAARKAAITETPDTSTLLAGKRTADGSEFEKRTADGSEFESPKKKAKVE

SEQ ID NO: 2964 - protein, 2094 aa, synthetic construct
MPAAKRVKLDGGDKKYSIGLDIGTNSVGWAVITDEYKVPSKKFKVLGNTDRHSIKKNLIGALLFDSGETAEATRLKRTARRRYTRRKNRICYLQEIFSNEMAKVDDSFFHRLEESFLVEEDKKHERHPIFGNIVDEVAYHEKYPTIYHLRKKLVDSTDKADLRLIYLALAHMIKFRGHFLIEGDLNPDNSDVDKLFIQLVQTYNQLFEENPINASGVDAKAILSARLSKSRRLENLIAQLPGEKKNGLFGNLIALSLGLTPNFKSNFDLAEDAKLQLSKDTYDDDLDNLLAQIGDQYADLFLAAKNLSDAILLSDILRVNTEITKAPLSASMIKRYDEHHQDLTLLKALVRQQLPEKYKEIFFDQSKNGYAGYIDGGASQEEFYKFIKPILEKMDGTEELLVKLNREDLLRKQRTFDNGSIPHQIHLGELHAILRRQEDFYPFLKDNREKIEKILTFRIPYYVGPLARGNSRFAWMTRKSEETITPWNFEEVVDKGASAQSFIERMTNFDKNLPNEKVLPKHSLLYEYFTVYNELTKVKYVTEGMRKPAFLSGEQKKAIVDLLFKTNRKVTVKQLKEDYFKKIECFDSVEISGVEDRFNASLGTYHDLLKIIKDKDFLDNEENEDILEDIVLTLTLFEDREMIEERLKTYAHLFDDKVMKQLKRRRYTGWGRLSRKLINGIRDKQSGKTILDFLKSDGFANRNFMQLIHDDSLTFKEDIQKAQVSGQGDSLHEHIANLAGSPAIKKGILQTVKVVDELVKVMGRHKPENIVIEMARENQTTQKGQKNSRERMKRIEEGIKELGSQILKEHPVENTQLQNEKLYLYYLQNGRDMYVDQELDINRLSDYDVDHIVPQSFLKDDSIDNKVLTRSDKARGKSDNVPSEEVVKKMKNYWRQLLNAKLITQRKFDNLTKAERGGLSELDKAGFIKRQLVETRQITKHVAQILDSRMNTKYDENDKLIREVKVITLKSKLVSDFRKDFQFYKVREINNYHHAHDAYLNAVVGTALIKKYPKLESEFVYGDYKVYDVRKMIAKSEQEIGKATAKYFFYSNIMNFFKTEITLANGEIRKRPLIETNGETGEIVWDKGRDFATVRKVLSMPQVNIVKKTEVQTGGFSKESILPKRNSDKLIARKKDWDPKKYGGFDSPTVAYSVLVVAKVEKGKSKKLKSVKELLGITIMERSSFEKNPIDFLEAKGYKEVKKDLIIKLPKYSLFELENGRKRMLASAGELQKGNELALPSKYVNFLYLASHYEKLKGSPEDNEQKQLFVEQHKHYLDEIIEQISEFSKRVILADANLDKVLSAYNKHRDKPIREQAENIIHLFTLTNLGAPAAFKYFDTTIDRKRYTSTKEVLDATLIHQSITGLYETRIDLSQLGGDGGGGSGSSPAPGGTLNIEDEHRLHETSKEPDVSLGSTWLSDFPQAWAETGGMGLAVRQAPLIIPLKATSTPVSIKQYPMSQEARLGIKPHIQRLLDQGILVPCQSPWNTPLLPVKKPGTNDYRPVQDLREVNKRVEDIHPTVPNPYNLLSGLPPSHQWYTVLDLKDAFFCLRLHPTSQPLFAFEWRDPEMGISGQLTWTRLPQGFKNSPTLFDEALHRDLADFRIQHPDLILLQYVDDLLLAATSELDCQQGTRALLQTLGNLGYRASAKKAQICQKQVKYLGYLLKEGQRWLTEARKETVMGQPTPKTPRQLREFLGTAGFCRLWIPGFAEMAAPLYPLTKTGTLFNWGPDQQKAYQEIKQALLTAPALGLPDLTKPFELFVDEKQGYAKGVLTQKLGPWRRPVAYLSKKLDPVAAGWPPCLRMVAAIAVLTKDAGKLTMGQPLVILAPHAVEALVKQPPDRWLSNARMTHYQALLLDTDRVQFGPVVALNPATLLPLPEEGLQHNCLDILAEAHGTRPDLTDQPLPDADHTWYTDGSSLLQEGQRKAGAAVTTETEVIWAKALPAGTSAQRAELIALTQALKMAEGKKLNVYTDSRYAFATAHIHGEIYRRRGLLTSEGKEIKNKDEILALLKALFLPKRLSIIHCPGHQKGHSAEARGNRMADQAARKAAITETPDTSTLLAGKRTADGSEFEKRTADGSEFESPKKKAKVE

SEQ ID NO: 2965 - protein, 2103 aa, synthetic construct
MPAAKRVKLDGGDKKYSIGLDIGTNSVGWAVITDEYKVPSKKFKVLGNTDRHSIKKNLIGALLFDSGETAEATRLKRTARRRYTRRKNRICYLQEIFSNEMAKVDDSFFHRLEESFLVEEDKKHERHPIFGNIVDEVAYHEKYPTIYHLRKKLVDSTDKADLRLIYLALAHMIKFRGHFLIEGDLNPDNSDVDKLFIQLVQTYNQLFEENPINASGVDAKAILSARLSKSRRLENLIAQLPGEKKNGLFGNLIALSLGLTPNFKSNFDLAEDAKLQLSKDTYDDDLDNLLAQIGDQYADLFLAAKNLSDAILLSDILRVNTEITKAPLSASMIKRYDEHHQDLTLLKALVRQQLPEKYKEIFFDQSKNGYAGYIDGGASQEEFYKFIKPILEKMDGTEELLVKLNREDLLRKQRTFDNGSIPHQIHLGELHAILRRQEDFYPFLKDNREKIEKILTFRIPYYVGPLARGNSRFAWMTRKSEETITPWNFEEVVDKGASAQSFIERMTNFDKNLPNEKVLPKHSLLYEYFTVYNELTKVKYVTEGMRKPAFLSGEQKKAIVDLLFKTNRKVTVKQLKEDYFKKIECFDSVEISGVEDRFNASLGTYHDLLKIIKDKDFLDNEENEDILEDIVLTLTLFEDREMIEERLKTYAHLFDDKVMKQLKRRRYTGWGRLSRKLINGIRDKQSGKTILDFLKSDGFANRNFMQLIHDDSLTFKEDIQKAQVSGQGDSLHEHIANLAGSPAIKKGILQTVKVVDELVKVMGRHKPENIVIEMARENQTTQKGQKNSRERMKRIEEGIKELGSQILKEHPVENTQLQNEKLYLYYLQNGRDMYVDQELDINRLSDYDVDHIVPQSFLKDDSIDNKVLTRSDKARGKSDNVPSEEVVKKMKNYWRQLLNAKLITQRKFDNLTKAERGGLSELDKAGFIKRQLVETRQITKHVAQILDSRMNTKYDENDKLIREVKVITLKSKLVSDFRKDFQFYKVREINNYHHAHDAYLNAVVGTALIKKYPKLESEFVYGDYKVYDVRKMIAKSEQEIGKATAKYFFYSNIMNFFKTEITLANGEIRKRPLIETNGETGEIVWDKGRDFATVRKVLSMPQVNIVKKTEVQTGGFSKESILPKRNSDKLIARKKDWDPKKYGGFDSPTVAYSVLVVAKVEKGKSKKLKSVKELLGITIMERSSFEKNPIDFLEAKGYKEVKKDLIIKLPKYSLFELENGRKRMLASAGELQKGNELALPSKYVNFLYLASHYEKLKGSPEDNEQKQLFVEQHKHYLDEIIEQISEFSKRVILADANLDKVLSAYNKHRDKPIREQAENIIHLFTLTNLGAPAAFKYFDTTIDRKRYTSTKEVLDATLIHQSITGLYETRIDLSQLGGDGGGSSGSSGSSGSSGSSGSSGGTLNIEDEHRLHETSKEPDVSLGSTWLSDFPQAWAETGGMGLAVRQAPLIIPLKATSTPVSIKQYPMSQEARLGIKPHIQRLLDQGILVPCQSPWNTPLLPVKKPGTNDYRPVQDLREVNKRVEDIHPTVPNPYNLLSGLPPSHQWYTVLDLKDAFFCLRLHPTSQPLFAFEWRDPEMGISGQLTWTRLPQGFKNSPTLFNEALHRDLADFRIQHPDLILLQYVDDLLLAATSELDCQQGTRALLQTLGNLGYRASAKKAQICQKQVKYLGYLLKEGQRWLTEARKETVMGQPTPKTPRQLREFLGTAGFCRLWIPGFAEMAAPLYPLTKPGTLFNWGPDQQKAYQEIKQALLTAPALGLPDLTKPFELFVDEKQGYAKGVLTQKLGPWRRPVAYLSKKLDPVAAGWPPCLRMVAAIAVLTKDAGKLTMGQPLVILAPHAVEALVKQPPDRWLSNARMTHYQALLLDTDRVQFGPVVALNPATLLPLPEEGLQHNCLDILAEAHGTRPDLTDQPLPDADHTWYTDGSSLLQEGQRKAGAAVTTETEVIWAKALPAGTSAQRAELIALTQALKMAEGKKLNVYTDSRYAFATAHIHGEIYRRRGWLTSEGKEIKNKDEILALLKALFLPKRLSIIHCPGHQKGHSAEARGNRMADQAARKAAITETPDTSTLLAGKRTADGSEFEKRTADGSEFESPKKKAKVE

SEQ ID NO: 2966 - protein, 2096 aa, synthetic construct; identical to SEQ ID NO: 2713

SEQ ID NO: 2967 - protein, 2091 aa, synthetic construct
MPAAKRVKLDGGDKKYSIGLDIGTNSVGWAVITDEYKVPSKKFKVLGNTDRHSIKKNLIGALLFDSGETAEATRLKRTARRRYTRRKNRICYLQEIFSNEMAKVDDSFFHRLEESFLVEEDKKHERHPIFGNIVDEVAYHEKYPTIYHLRKKLVDSTDKADLRLIYLALAHMIKFRGHFLIEGDLNPDNSDVDKLFIQLVQTYNQLFEENPINASGVDAKAILSARLSKSRRLENLIAQLPGEKKNGLFGNLIALSLGLTPNFKSNFDLAEDAKLQLSKDTYDDDLDNLLAQIGDQYADLFLAAKNLSDAILLSDILRVNTEITKAPLSASMIKRYDEHHQDLTLLKALVRQQLPEKYKEIFFDQSKNGYAGYIDGGASQEEFYKFIKPILEKMDGTEELLVKLNREDLLRKQRTFDNGSIPHQIHLGELHAILRRQEDFYPFLKDNREKIEKILTFRIPYYVGPLARGNSRFAWMTRKSEETITPWNFEEVVDKGASAQSFIERMTNFDKNLPNEKVLPKHSLLYEYFTVYNELTKVKYVTEGMRKPAFLSGEQKKAIVDLLFKTNRKVTVKQLKEDYFKKIECFDSVEISGVEDRFNASLGTYHDLLKIIKDKDFLDNEENEDILEDIVLTLTLFEDREMIEERLKTYAHLFDDKVMKQLKRRRYTGWGRLSRKLINGIRDKQSGKTILDFLKSDGFANRNFMQLIHDDSLTFKEDIQKAQVSGQGDSLHEHIANLAGSPAIKKGILQTVKVVDELVKVMGRHKPENIVIEMARENQTTQKGQKNSRERMKRIEEGIKELGSQILKEHPVENTQLQNEKLYLYYLQNGRDMYVDQELDINRLSDYDVDHIVPQSFLKDDSIDNKVLTRSDKARGKSDNVPSEEVVKKMKNYWRQLLNAKLITQRKFDNLTKAERGGLSELDKAGFIKRQLVETRQITKHVAQILDSRMNTKYDENDKLIREVKVITLKSKLVSDFRKDFQFYKVREINNYHHAHDAYLNAVVGTALIKKYPKLESEFVYGDYKVYDVRKMIAKSEQEIGKATAKYFFYSNIMNFFKTEITLANGEIRKRPLIETNGETGEIVWDKGRDFATVRKVLSMPQVNIVKKTEVQTGGFSKESILPKRNSDKLIARKKDWDPKKYGGFDSPTVAYSVLVVAKVEKGKSKKLKSVKELLGITIMERSSFEKNPIDFLEAKGYKEVKKDLIIKLPKYSLFELENGRKRMLASAGELQKGNELALPSKYVNFLYLASHYEKLKGSPEDNEQKQLFVEQHKHYLDEIIEQISEFSKRVILADANLDKVLSAYNKHRDKPIREQAENIIHLFTLTNLGAPAAFKYFDTTIDRKRYTSTKEVLDATLIHQSITGLYETRIDLSQLGGDGGGSSGGGGGTLNIEDEHRLHETSKEPDVSLGSTWLSDFPQAWAETGGMGLAVRQAPLIIPLKATSTPVSIKQYPMSQEARLGIKPHIQRLLDQGILVPCQSPWNTPLLPVKKPGTNDYRPVQDLREVNKRVEDIHPTVPNPYNLLSGLPPSHQWYTVLDLKDAFFCLRLHPTSQPLFAFEWRDPEMGISGQLTWTRLPQGFKNSPTLFNEALHRDLADFRIQHPDLILLQYVDDLLLAATSELDCQQGTRALLQTLGNLGYRASAKKAQICQKQVKYLGYLLKEGQRWLTEARKETVMGQPTPKTPRQLREFLGTAGFCRLWIPGFAEMAAPLYPLTKPGTLFNWGPDQQKAYQEIKQALLTAPALGLPDLTKPFELFVDEKQGYAKGVLTQKLGPWRRPVAYLSKKLDPVAAGWPPCLRMVAAIAVLTKDAGKLTMGQPLVILAPHAVEALVKQPPDRWLSNARMTHYQALLLDTDRVQFGPVVALNPATLLPLPEEGLQHNCLDILAEAHGTRPDLTDQPLPDADHTWYTDGSSLLQEGQRKAGAAVTTETEVIWAKALPAGTSAQRAELIALTQALKMAEGKKLNVYTDSRYAFATAHIHGEIYRRRGWLTSEGKEIKNKDEILALLKALFLPKRLSIIHCPGHQKGHSAEARGNRMADQAARKAAITETPDTSTLLAGKRTADGSEFEKRTADGSEFESPKKKAKVE

SEQ ID NO: 2968 - protein, 2105 aa, synthetic construct; identical to SEQ ID NO: 2771

SEQ ID NO: 2969 - protein, 2096 aa, synthetic construct; identical to SEQ ID NO: 2753

SEQ ID NO: 2970 - protein, 2096 aa, synthetic construct
MPAAKRVKLDGGDKKYSIGLDIGTNSVGWAVITDEYKVPSKKFKVLGNTDRHSIKKNLIGALLFDSGETAEATRLKRTARRRYTRRKNRICYLQEIFSNEMAKVDDSFFHRLEESFLVEEDKKHERHPIFGNIVDEVAYHEKYPTIYHLRKKLVDSTDKADLRLIYLALAHMIKFRGHFLIEGDLNPDNSDVDKLFIQLVQTYNQLFEENPINASGVDAKAILSARLSKSRRLENLIAQLPGEKKNGLFGNLIALSLGLTPNFKSNFDLAEDAKLQLSKDTYDDDLDNLLAQIGDQYADLFLAAKNLSDAILLSDILRVNTEITKAPLSASMIKRYDEHHQDLTLLKALVRQQLPEKYKEIFFDQSKNGYAGYIDGGASQEEFYKFIKPILEKMDGTEELLVKLNREDLLRKQRTFDNGSIPHQIHLGELHAILRRQEDFYPFLKDNREKIEKILTFRIPYYVGPLARGNSRFAWMTRKSEETITPWNFEEVVDKGASAQSFIERMTNFDKNLPNEKVLPKHSLLYEYFTVYNELTKVKYVTEGMRKPAFLSGEQKKAIVDLLFKTNRKVTVKQLKEDYFKKIECFDSVEISGVEDRFNASLGTYHDLLKIIKDKDFLDNEENEDILEDIVLTLTLFEDREMIEERLKTYAHLFDDKVMKQLKRRRYTGWGRLSRKLINGIRDKQSGKTILDFLKSDGFANRNFMQLIHDDSLTFKEDIQKAQVSGQGDSLHEHIANLAGSPAIKKGILQTVKVVDELVKVMGRHKPENIVIEMARENQTTQKGQKNSRERMKRIEEGIKELGSQILKEHPVENTQLQNEKLYLYYLQNGRDMYVDQELDINRLSDYDVDHIVPQSFLKDDSIDNKVLTRSDKARGKSDNVPSEEVVKKMKNYWRQLLNAKLITQRKFDNLTKAERGGLSELDKAGFIKRQLVETRQITKHVAQILDSRMNTKYDENDKLIREVKVITLKSKLVSDFRKDFQFYKVREINNYHHAHDAYLNAVVGTALIKKYPKLESEFVYGDYKVYDVRKMIAKSEQEIGKATAKYFFYSNIMNFFKTEITLANGEIRKRPLIETNGETGEIVWDKGRDFATVRKVLSMPQVNIVKKTEVQTGGFSKESILPKRNSDKLIARKKDWDPKKYGGFDSPTVAYSVLVVAKVEKGKSKKLKSVKELLGITIMERSSFEKNPIDFLEAKGYKEVKKDLIIKLPKYSLFELENGRKRMLASAGELQKGNELALPSKYVNFLYLASHYEKLKGSPEDNEQKQLFVEQHKHYLDEIIEQISEFSKRVILADANLDKVLSAYNKHRDKPIREQAENIIHLFTLTNLGAPAAFKYFDTTIDRKRYTSTKEVLDATLIHQSITGLYETRIDLSQLGGDGGPAPAPAPAPAPGGTLNIEDEHRLHETSKEPDVSLGSTWLSDFPQAWAETGGMGLAVRQAPLIIPLKATSTPVSIKQYPMSQEARLGIKPHIQRLLDQGILVPCQSPWNTPLLPVKKPGTNDYRPVQDLREVNKRVEDIHPTVPNPYNLLSGLPPSHQWYTVLDLKDAFFCLRLHPTSQPLFAFEWRDPEMGISGQLTWTRLPQGFKNSPTLFNEALHRDLADFRIQHPDLILLQYVDDLLLAATSELDCQQGTRALLQTLGNLGYRASAKKAQICQKQVKYLGYLLKEGQRWLTEARKETVMGQPTPKTPRQLREFLGTAGFCRLWIPGFAEMAAPLYPLTKPGTLFNWGPDQQKAYQEIKQALLTAPALGLPDLTKPFELFVDEKQGYAKGVLTQKLGPWRRPVAYLSKKLDPVAAGWPPCLRMVAAIAVLTKDAGKLTMGQPLVILAPHAVEALVKQPPDRWLSNARMTHYQALLLDTDRVQFGPVVALNPATLLPLPEEGLQHNCLDILAEAHGTRPDLTDQPLPDADHTWYTDGSSLLQEGQRKAGAAVTTETEVIWAKALPAGTSAQRAELIALTQALKMAEGKKLNVYTDSRYAFATAHIHGEIYRRRGWLTSEGKEIKNKDEILALLKALFLPKRLSIIHCPGHQKGHSAEARGNRMADQAARKAAITETPDTSTLLAGKRTADGSEFEKRTADGSEFESPKKKAKVE

SEQ ID NO: 2971 - protein, 2093 aa, synthetic construct; identical to SEQ ID NO: 2724

SEQ ID NO: 2972 - protein, 2131 aa, synthetic construct; identical to SEQ ID NO: 2711

SEQ ID NO: 2973 - protein, 2088 aa, synthetic construct
MPAAKRVKLDGGDKKYSIGLDIGTNSVGWAVITDEYKVPSKKFKVLGNTDRHSIKKNLIGALLFDSGETAEATRLKRTARRRYTRRKNRICYLQEIFSNEMAKVDDSFFHRLEESFLVEEDKKHERHPIFGNIVDEVAYHEKYPTIYHLRKKLVDSTDKADLRLIYLALAHMIKFRGHFLIEGDLNPDNSDVDKLFIQLVQTYNQLFEENPINASGVDAKAILSARLSKSRRLENLIAQLPGEKKNGLFGNLIALSLGLTPNFKSNFDLAEDAKLQLSKDTYDDDLDNLLAQIGDQYADLFLAAKNLSDAILLSDILRVNTEITKAPLSASMIKRYDEHHQDLTLLKALVRQQLPEKYKEIFFDQSKNGYAGYIDGGASQEEFYKFIKPILEKMDGTEELLVKLNREDLLRKQRTFDNGSIPHQIHLGELHAILRRQEDFYPFLKDNREKIEKILTFRIPYYVGPLARGNSRFAWMTRKSEETITPWNFEEVVDKGASAQSFIERMTNFDKNLPNEKVLPKHSLLYEYFTVYNELTKVKYVTEGMRKPAFLSGEQKKAIVDLLFKTNRKVTVKQLKEDYFKKIECFDSVEISGVEDRFNASLGTYHDLLKIIKDKDFLDNEENEDILEDIVLTLTLFEDREMIEERLKTYAHLFDDKVMKQLKRRRYTGWGRLSRKLINGIRDKQSGKTILDFLKSDGFANRNFMQLIHDDSLTFKEDIQKAQVSGQGDSLHEHIANLAGSPAIKKGILQTVKVVDELVKVMGRHKPENIVIEMARENQTTQKGQKNSRERMKRIEEGIKELGSQILKEHPVENTQLQNEKLYLYYLQNGRDMYVDQELDINRLSDYDVDHIVPQSFLKDDSIDNKVLTRSDKARGKSDNVPSEEVVKKMKNYWRQLLNAKLITQRKFDNLTKAERGGLSELDKAGFIKRQLVETRQITKHVAQILDSRMNTKYDENDKLIREVKVITLKSKLVSDFRKDFQFYKVREINNYHHAHDAYLNAVVGTALIKKYPKLESEFVYGDYKVYDVRKMIAKSEQEIGKATAKYFFYSNIMNFFKTEITLANGEIRKRPLIETNGETGEIVWDKGRDFATVRKVLSMPQVNIVKKTEVQTGGFSKESILPKRNSDKLIARKKDWDPKKYGGFDSPTVAYSVLVVAKVEKGKSKKLKSVKELLGITIMERSSFEKNPIDFLEAKGYKEVKKDLIIKLPKYSLFELENGRKRMLASAGELQKGNELALPSKYVNFLYLASHYEKLKGSPEDNEQKQLFVEQHKHYLDEIIEQISEFSKRVILADANLDKVLSAYNKHRDKPIREQAENIIHLFTLTNLGAPAAFKYFDTTIDRKRYTSTKEVLDATLIHQSITGLYETRIDLSQLGGDGGPAPGGTLNIEDEHRLHETSKEPDVSLGSTWLSDFPQAWAETGGMGLAVRQAPLIIPLKATSTPVSIKQYPMSQEARLGIKPHIQRLLDQGILVPCQSPWNTPLLPVKKPGTNDYRPVQDLREVNKRVEDIHPTVPNPYNLLSGLPPSHQWYTVLDLKDAFFCLRLHPTSQPLFAFEWRDPEMGISGQLTWTRLPQGFKNSPTLFNEALHRDLADFRIQHPDLILLQYVDDLLLAATSELDCQQGTRALLQTLGNLGYRASAKKAQICQKQVKYLGYLLKEGQRWLTEARKETVMGQPTPKTPRQLREFLGTAGFCRLWIPGFAEMAAPLYPLTKPGTLFNWGPDQQKAYQEIKQALLTAPALGLPDLTKPFELFVDEKQGYAKGVLTQKLGPWRRPVAYLSKKLDPVAAGWPPCLRMVAAIAVLTKDAGKLTMGQPLVILAPHAVEALVKQPPDRWLSNARMTHYQALLLDTDRVQFGPVVALNPATLLPLPEEGLQHNCLDILAEAHGTRPDLTDQPLPDADHTWYTDGSSLLQEGQRKAGAAVTTETEVIWAKALPAGTSAQRAELIALTQALKMAEGKKLNVYTDSRYAFATAHIHGEIYRRRGWLTSEGKEIKNKDEILALLKALFLPKRLSIIHCPGHQKGHSAEARGNRMADQAARKAAITETPDTSTLLAGKRTADGSEFEKRTADGSEFESPKKKAKVE

SEQ ID NO: 2974 - protein, 2098 aa, synthetic construct
MPAAKRVKLDGGDKKYSIGLDIGTNSVGWAVITDEYKVPSKKFKVLGNTDRHSIKKNLIGALLFDSGETAEATRLKRTARRRYTRRKNRICYLQEIFSNEMAKVDDSFFHRLEESFLVEEDKKHERHPIFGNIVDEVAYHEKYPTIYHLRKKLVDSTDKADLRLIYLALAHMIKFRGHFLIEGDLNPDNSDVDKLFIQLVQTYNQLFEENPINASGVDAKAILSARLSKSRRLENLIAQLPGEKKNGLFGNLIALSLGLTPNFKSNFDLAEDAKLQLSKDTYDDDLDNLLAQIGDQYADLFLAAKNLSDAILLSDILRVNTEITKAPLSASMIKRYDEHHQDLTLLKALVRQQLPEKYKEIFFDQSKNGYAGYIDGGASQEEFYKFIKPILEKMDGTEELLVKLNREDLLRKQRTFDNGSIPHQIHLGELHAILRRQEDFYPFLKDNREKIEKILTFRIPYYVGPLARGNSRFAWMTRKSEETITPWNFEEVVDKGASAQSFIERMTNFDKNLPNEKVLPKHSLLYEYFTVYNELTKVKYVTEGMRKPAFLSGEQKKAIVDLLFKTNRKVTVKQLKEDYFKKIECFDSVEISGVEDRFNASLGTYHDLLKIIKDKDFLDNEENEDILEDIVLTLTLFEDREMIEERLKTYAHLFDDKVMKQLKRRRYTGWGRLSRKLINGIRDKQSGKTILDFLKSDGFANRNFMQLIHDDSLTFKEDIQKAQVSGQGDSLHEHIANLAGSPAIKKGILQTVKVVDELVKVMGRHKPENIVIEMARENQTTQKGQKNSRERMKRIEEGIKELGSQILKEHPVENTQLQNEKLYLYYLQNGRDMYVDQELDINRLSDYDVDHIVPQSFLKDDSIDNKVLTRSDKARGKSDNVPSEEVVKKMKNYWRQLLNAKLITQRKFDNLTKAERGGLSELDKAGFIKRQLVETRQITKHVAQILDSRMNTKYDENDKLIREVKVITLKSKLVSDFRKDFQFYKVREINNYHHAHDAYLNAVVGTALIKKYPKLESEFVYGDYKVYDVRKMIAKSEQEIGKATAKYFFYSNIMNFFKTEITLANGEIRKRPLIETNGETGEIVWDKGRDFATVRKVLSMPQVNIVKKTEVQTGGFSKESILPKRNSDKLIARKKDWDPKKYGGFDSPTVAYSVLVVAKVEKGKSKKLKSVKELLGITIMERSSFEKNPIDFLEAKGYKEVKKDLIIKLPKYSLFELENGRKRMLASAGELQKGNELALPSKYVNFLYLASHYEKLKGSPEDNEQKQLFVEQHKHYLDEIIEQISEFSKRVILADANLDKVLSAYNKHRDKPIREQAENIIHLFTLTNLGAPAAFKYFDTTIDRKRYTSTKEVLDATLIHQSITGLYETRIDLSQLGGDGGPAPAPAPAPAPAPGGTLNIEDEHRLHETSKEPDVSLGSTWLSDFPQAWAETGGMGLAVRQAPLIIPLKATSTPVSIKQYPMSQEARLGIKPHIQRLLDQGILVPCQSPWNTPLLPVKKPGTNDYRPVQDLREVNKRVEDIHPTVPNPYNLLSGLPPSHQWYTVLDLKDAFFCLRLHPTSQPLFAFEWRDPEMGISGQLTWTRLPQGFKNSPTLFNEALHRDLADFRIQHPDLILLQYVDDLLLAATSELDCQQGTRALLQTLGNLGYRASAKKAQICQKQVKYLGYLLKEGQRWLTEARKETVMGQPTPKTPRQLREFLGTAGFCRLWIPGFAEMAAPLYPLTKPGTLFNWGPDQQKAYQEIKQALLTAPALGLPDLTKPFELFVDEKQGYAKGVLTQKLGPWRRPVAYLSKKLDPVAAGWPPCLRMVAAIAVLTKDAGKLTMGQPLVILAPHAVEALVKQPPDRWLSNARMTHYQALLLDTDRVQFGPVVALNPATLLPLPEEGLQHNCLDILAEAHGTRPDLTDQPLPDADHTWYTDGSSLLQEGQRKAGAAVTTETEVIWAKALPAGTSAQRAELIALTQALKMAEGKKLNVYTDSRYAFATAHIHGEIYRRRGWLTSEGKEIKNKDEILALLKALFLPKRLSIIHCPGHQKGHSAEARGNRMADQAARKAAITETPDTSTLLAGKRTADGSEFEKRTADGSEFESPKKKAKVE

SEQ ID NO: 2975 - protein, 2091 aa, synthetic construct
MPAAKRVKLDGGDKKYSIGLDIGTNSVGWAVITDEYKVPSKKFKVLGNTDRHSIKKNLIGALLFDSGETAEATRLKRTARRRYTRRKNRICYLQEIFSNEMAKVDDSFFHRLEESFLVEEDKKHERHPIFGNIVDEVAYHEKYPTIYHLRKKLVDSTDKADLRLIYLALAHMIKFRGHFLIEGDLNPDNSDVDKLFIQLVQTYNQLFEENPINASGVDAKAILSARLSKSRRLENLIAQLPGEKKNGLFGNLIALSLGLTPNFKSNFDLAEDAKLQLSKDTYDDDLDNLLAQIGDQYADLFLAAKNLSDAILLSDILRVNTEITKAPLSASMIKRYDEHHQDLTLLKALVRQQLPEKYKEIFFDQSKNGYAGYIDGGASQEEFYKFIKPILEKMDGTEELLVKLNREDLLRKQRTFDNGSIPHQIHLGELHAILRRQEDFYPFLKDNREKIEKILTFRIPYYVGPLARGNSRFAWMTRKSEETITPWNFEEVVDKGASAQSFIERMTNFDKNLPNEKVLPKHSLLYEYFTVYNELTKVKYVTEGMRKPAFLSGEQKKAIVDLLFKTNRKVTVKQLKEDYFKKIECFDSVEISGVEDRFNASLGTYHDLLKIIKDKDFLDNEENEDILEDIVLTLTLFEDREMIEERLKTYAHLFDDKVMKQLKRRRYTGWGRLSRKLINGIRDKQSGKTILDFLKSDGFANRNFMQLIHDDSLTFKEDIQKAQVSGQGDSLHEHIANLAGSPAIKKGILQTVKVVDELVKVMGRHKPENIVIEMARENQTTQKGQKNSRERMKRIEEGIKELGSQILKEHPVENTQLQNEKLYLYYLQNGRDMYVDQELDINRLSDYDVDHIVPQSFLKDDSIDNKVLTRSDKARGKSDNVPSEEVVKKMKNYWRQLLNAKLITQRKFDNLTKAERGGLSELDKAGFIKRQLVETRQITKHVAQILDSRMNTKYDENDKLIREVKVITLKSKLVSDFRKDFQFYKVREINNYHHAHDAYLNAVVGTALIKKYPKLESEFVYGDYKVYDVRKMIAKSEQEIGKATAKYFFYSNIMNFFKTEITLANGEIRKRPLIETNGETGEIVWDKGRDFATVRKVLSMPQVNIVKKTEVQTGGFSKESILPKRNSDKLIARKKDWDPKKYGGFDSPTVAYSVLVVAKVEKGKSKKLKSVKELLGITIMERSSFEKNPIDFLEAKGYKEVKKDLIIKLPKYSLFELENGRKRMLASAGELQKGNELALPSKYVNFLYLASHYEKLKGSPEDNEQKQLFVEQHKHYLDEIIEQISEFSKRVILADANLDKVLSAYNKHRDKPIREQAENIIHLFTLTNLGAPAAFKYFDTTIDRKRYTSTKEVLDATLIHQSITGLYETRIDLSQLGGDGGGGGGGGGGTLNIEDEHRLHETSKEPDVSLGSTWLSDFPQAWAETGGMGLAVRQAPLIIPLKATSTPVSIKQYPMSQEARLGIKPHIQRLLDQGILVPCQSPWNTPLLPVKKPGTNDYRPVQDLREVNKRVEDIHPTVPNPYNLLSGLPPSHQWYTVLDLKDAFFCLRLHPTSQPLFAFEWRDPEMGISGQLTWTRLPQGFKNSPTLFNEALHRDLADFRIQHPDLILLQYVDDLLLAATSELDCQQGTRALLQTLGNLGYRASAKKAQICQKQVKYLGYLLKEGQRWLTEARKETVMGQPTPKTPRQLREFLGTAGFCRLWIPGFAEMAAPLYPLTKPGTLFNWGPDQQKAYQEIKQALLTAPALGLPDLTKPFELFVDEKQGYAKGVLTQKLGPWRRPVAYLSKKLDPVAAGWPPCLRMVAAIAVLTKDAGKLTMGQPLVILAPHAVEALVKQPPDRWLSNARMTHYQALLLDTDRVQFGPVVALNPATLLPLPEEGLQHNCLDILAEAHGTRPDLTDQPLPDADHTWYTDGSSLLQEGQRKAGAAVTTETEVIWAKALPAGTSAQRAELIALTQALKMAEGKKLNVYTDSRYAFATAHIHGEIYRRRGWLTSEGKEIKNKDEILALLKALFLPKRLSIIHCPGHQKGHSAEARGNRMADQAARKAAITETPDTSTLLAGKRTADGSEFEKRTADGSEFESPKKKAKVE

SEQ ID NO: 2976 - protein, 2096 aa, synthetic construct; identical to SEQ ID NO: 2723

SEQ ID NO: 2977 - protein, 2096 aa, synthetic construct; identical to SEQ ID NO: 2777

SEQ ID NO: 2978 - protein, 2093 aa, synthetic construct
MPAAKRVKLDGGDKKYSIGLDIGTNSVGWAVITDEYKVPSKKFKVLGNTDRHSIKKNLIGALLFDSGETAEATRLKRTARRRYTRRKNRICYLQEIFSNEMAKVDDSFFHRLEESFLVEEDKKHERHPIFGNIVDEVAYHEKYPTIYHLRKKLVDSTDKADLRLIYLALAHMIKFRGHFLIEGDLNPDNSDVDKLFIQLVQTYNQLFEENPINASGVDAKAILSARLSKSRRLENLIAQLPGEKKNGLFGNLIALSLGLTPNFKSNFDLAEDAKLQLSKDTYDDDLDNLLAQIGDQYADLFLAAKNLSDAILLSDILRVNTEITKAPLSASMIKRYDEHHQDLTLLKALVRQQLPEKYKEIFFDQSKNGYAGYIDGGASQEEFYKFIKPILEKMDGTEELLVKLNREDLLRKQRTFDNGSIPHQIHLGELHAILRRQEDFYPFLKDNREKIEKILTFRIPYYVGPLARGNSRFAWMTRKSEETITPWNFEEVVDKGASAQSFIERMTNFDKNLPNEKVLPKHSLLYEYFTVYNELTKVKYVTEGMRKPAFLSGEQKKAIVDLLFKTNRKVTVKQLKEDYFKKIECFDSVEISGVEDRFNASLGTYHDLLKIIKDKDFLDNEENEDILEDIVLTLTLFEDREMIEERLKTYAHLFDDKVMKQLKRRRYTGWGRLSRKLINGIRDKQSGKTILDFLKSDGFANRNFMQLIHDDSLTFKEDIQKAQVSGQGDSLHEHIANLAGSPAIKKGILQTVKVVDELVKVMGRHKPENIVIEMARENQTTQKGQKNSRERMKRIEEGIKELGSQILKEHPVENTQLQNEKLYLYYLQNGRDMYVDQELDINRLSDYDVDHIVPQSFLKDDSIDNKVLTRSDKARGKSDNVPSEEVVKKMKNYWRQLLNAKLITQRKFDNLTKAERGGLSELDKAGFIKRQLVETRQITKHVAQILDSRMNTKYDENDKLIREVKVITLKSKLVSDFRKDFQFYKVREINNYHHAHDAYLNAVVGTALIKKYPKLESEFVYGDYKVYDVRKMIAKSEQEIGKATAKYFFYSNIMNFFKTEITLANGEIRKRPLIETNGETGEIVWDKGRDFATVRKVLSMPQVNIVKKTEVQTGGFSKESILPKRNSDKLIARKKDWDPKKYGGFDSPTVAYSVLVVAKVEKGKSKKLKSVKELLGITIMERSSFEKNPIDFLEAKGYKEVKKDLIIKLPKYSLFELENGRKRMLASAGELQKGNELALPSKYVNFLYLASHYEKLKGSPEDNEQKQLFVEQHKHYLDEIIEQISEFSKRVILADANLDKVLSAYNKHRDKPIREQAENIIHLFTLTNLGAPAAFKYFDTTIDRKRYTSTKEVLDATLIHQSITGLYETRIDLSQLGGDGGEAAAKGGGGGTLNIEDEHRLHETSKEPDVSLGSTWLSDFPQAWAETGGMGLAVRQAPLIIPLKATSTPVSIKQYPMSQEARLGIKPHIQRLLDQGILVPCQSPWNTPLLPVKKPGTNDYRPVQDLREVNKRVEDIHPTVPNPYNLLSGLPPSHQWYTVLDLKDAFFCLRLHPTSQPLFAFEWRDPEMGISGQLTWTRLPQGFKNSPTLFNEALHRDLADFRIQHPDLILLQYVDDLLLAATSELDCQQGTRALLQTLGNLGYRASAKKAQICQKQVKYLGYLLKEGQRWLTEARKETVMGQPTPKTPRQLREFLGTAGFCRLWIPGFAEMAAPLYPLTKPGTLFNWGPDQQKAYQEIKQALLTAPALGLPDLTKPFELFVDEKQGYAKGVLTQKLGPWRRPVAYLSKKLDPVAAGWPPCLRMVAAIAVLTKDAGKLTMGQPLVILAPHAVEALVKQPPDRWLSNARMTHYQALLLDTDRVQFGPVVALNPATLLPLPEEGLQHNCLDILAEAHGTRPDLTDQPLPDADHTWYTDGSSLLQEGQRKAGAAVTTETEVIWAKALPAGTSAQRAELIALTQALKMAEGKKLNVYTDSRYAFATAHIHGEIYRRRGWLTSEGKEIKNKDEILALLKALFLPKRLSIIHCPGHQKGHSAEARGNRMADQAARKAAITETPDTSTLLAGKRTADGSEFEKRTADGSEFESPKKKAKVE

SEQ ID NO: 2979 - protein, 2094 aa, synthetic construct
MPAAKRVKLDGGDKKYSIGLDIGTNSVGWAVITDEYKVPSKKFKVLGNTDRHSIKKNLIGALLFDSGETAEATRLKRTARRRYTRRKNRICYLQEIFSNEMAKVDDSFFHRLEESFLVEEDKKHERHPIFGNIVDEVAYHEKYPTIYHLRKKLVDSTDKADLRLIYLALAHMIKFRGHFLIEGDLNPDNSDVDKLFIQLVQTYNQLFEENPINASGVDAKAILSARLSKSRRLENLIAQLPGEKKNGLFGNLIALSLGLTPNFKSNFDLAEDAKLQLSKDTYDDDLDNLLAQIGDQYADLFLAAKNLSDAILLSDILRVNTEITKAPLSASMIKRYDEHHQDLTLLKALVRQQLPEKYKEIFFDQSKNGYAGYIDGGASQEEFYKFIKPILEKMDGTEELLVKLNREDLLRKQRTFDNGSIPHQIHLGELHAILRRQEDFYPFLKDNREKIEKILTFRIPYYVGPLARGNSRFAWMTRKSEETITPWNFEEVVDKGASAQSFIERMTNFDKNLPNEKVLPKHSLLYEYFTVYNELTKVKYVTEGMRKPAFLSGEQKKAIVDLLFKTNRKVTVKQLKEDYFKKIECFDSVEISGVEDRFNASLGTYHDLLKIIKDKDFLDNEENEDILEDIVLTLTLFEDREMIEERLKTYAHLFDDKVMKQLKRRRYTGWGRLSRKLINGIRDKQSGKTILDFLKSDGFANRNFMQLIHDDSLTFKEDIQKAQVSGQGDSLHEHIANLAGSPAIKKGILQTVKVVDELVKVMGRHKPENIVIEMARENQTTQKGQKNSRERMKRIEEGIKELGSQILKEHPVENTQLQNEKLYLYYLQNGRDMYVDQELDINRLSDYDVDHIVPQSFLKDDSIDNKVLTRSDKARGKSDNVPSEEVVKKMKNYWRQLLNAKLITQRKFDNLTKAERGGLSELDKAGFIKRQLVETRQITKHVAQILDSRMNTKYDENDKLIREVKVITLKSKLVSDFRKDFQFYKVREINNYHHAHDAYLNAVVGTALIKKYPKLESEFVYGDYKVYDVRKMIAKSEQEIGKATAKYFFYSNIMNFFKTEITLANGEIRKRPLIETNGETGEIVWDKGRDFATVRKVLSMPQVNIVKKTEVQTGGFSKESILPKRNSDKLIARKKDWDPKKYGGFDSPTVAYSVLVVAKVEKGKSKKLKSVKELLGITIMERSSFEKNPIDFLEAKGYKEVKKDLIIKLPKYSLFELENGRKRMLASAGELQKGNELALPSKYVNFLYLASHYEKLKGSPEDNEQKQLFVEQHKHYLDEIIEQISEFSKRVILADANLDKVLSAYNKHRDKPIREQAENIIHLFTLTNLGAPAAFKYFDTTIDRKRYTSTKEVLDATLIHQSITGLYETRIDLSQLGGDGGGGSGSSGGGGGTLNIEDEHRLHETSKEPDVSLGSTWLSDFPQAWAETGGMGLAVRQAPLIIPLKATSTPVSIKQYPMSQEARLGIKPHIQRLLDQGILVPCQSPWNTPLLPVKKPGTNDYRPVQDLREVNKRVEDIHPTVPNPYNLLSGLPPSHQWYTVLDLKDAFFCLRLHPTSQPLFAFEWRDPEMGISGQLTWTRLPQGFKNSPTLFNEALHRDLADFRIQHPDLILLQYVDDLLLAATSELDCQQGTRALLQTLGNLGYRASAKKAQICQKQVKYLGYLLKEGQRWLTEARKETVMGQPTPKTPRQLREFLGTAGFCRLWIPGFAEMAAPLYPLTKPGTLFNWGPDQQKAYQEIKQALLTAPALGLPDLTKPFELFVDEKQGYAKGVLTQKLGPWRRPVAYLSKKLDPVAAGWPPCLRMVAAIAVLTKDAGKLTMGQPLVILAPHAVEALVKQPPDRWLSNARMTHYQALLLDTDRVQFGPVVALNPATLLPLPEEGLQHNCLDILAEAHGTRPDLTDQPLPDADHTWYTDGSSLLQEGQRKAGAAVTTETEVIWAKALPAGTSAQRAELIALTQALKMAEGKKLNVYTDSRYAFATAHIHGEIYRRRGWLTSEGKEIKNKDEILALLKALFLPKRLSIIHCPGHQKGHSAEARGNRMADQAARKAAITETPDTSTLLAGKRTADGSEFEKRTADGSEFESPKKKAKVE

SEQ ID NO: 2980 - protein, 2092 aa, synthetic construct
MPAAKRVKLDGGDKKYSIGLDIGTNSVGWAVITDEYKVPSKKFKVLGNTDRHSIKKNLIGALLFDSGETAEATRLKRTARRRYTRRKNRICYLQEIFSNEMAKVDDSFFHRLEESFLVEEDKKHERHPIFGNIVDEVAYHEKYPTIYHLRKKLVDSTDKADLRLIYLALAHMIKFRGHFLIEGDLNPDNSDVDKLFIQLVQTYNQLFEENPINASGVDAKAILSARLSKSRRLENLIAQLPGEKKNGLFGNLIALSLGLTPNFKSNFDLAEDAKLQLSKDTYDDDLDNLLAQIGDQYADLFLAAKNLSDAILLSDILRVNTEITKAPLSASMIKRYDEHHQDLTLLKALVRQQLPEKYKEIFFDQSKNGYAGYIDGGASQEEFYKFIKPILEKMDGTEELLVKLNREDLLRKQRTFDNGSIPHQIHLGELHAILRRQEDFYPFLKDNREKIEKILTFRIPYYVGPLARGNSRFAWMTRKSEETITPWNFEEVVDKGASAQSFIERMTNFDKNLPNEKVLPKHSLLYEYFTVYNELTKVKYVTEGMRKPAFLSGEQKKAIVDLLFKTNRKVTVKQLKEDYFKKIECFDSVEISGVEDRFNASLGTYHDLLKIIKDKDFLDNEENEDILEDIVLTLTLFEDREMIEERLKTYAHLFDDKVMKQLKRRRYTGWGRLSRKLINGIRDKQSGKTILDFLKSDGFANRNFMQLIHDDSLTFKEDIQKAQVSGQGDSLHEHIANLAGSPAIKKGILQTVKVVDELVKVMGRHKPENIVIEMARENQTTQKGQKNSRERMKRIEEGIKELGSQILKEHPVENTQLQNEKLYLYYLQNGRDMYVDQELDINRLSDYDVDHIVPQSFLKDDSIDNKVLTRSDKARGKSDNVPSEEVVKKMKNYWRQLLNAKLITQRKFDNLTKAERGGLSELDKAGFIKRQLVETRQITKHVAQILDSRMNTKYDENDKLIREVKVITLKSKLVSDFRKDFQFYKVREINNYHHAHDAYLNAVVGTALIKKYPKLESEFVYGDYKVYDVRKMIAKSEQEIGKATAKYFFYSNIMNFFKTEITLANGEIRKRPLIETNGETGEIVWDKGRDFATVRKVLSMPQVNIVKKTEVQTGGFSKESILPKRNSDKLIARKKDWDPKKYGGFDSPTVAYSVLVVAKVEKGKSKKLKSVKELLGITIMERSSFEKNPIDFLEAKGYKEVKKDLIIKLPKYSLFELENGRKRMLASAGELQKGNELALPSKYVNFLYLASHYEKLKGSPEDNEQKQLFVEQHKHYLDEIIEQISEFSKRVILADANLDKVLSAYNKHRDKPIREQAENIIHLFTLTNLGAPAAFKYFDTTIDRKRYTSTKEVLDATLIHQSITGLYETRIDLSQLGGDGGPAPAPAPGGTLNIEDEHRLHETSKEPDVSLGSTWLSDFPQAWAETGGMGLAVRQAPLIIPLKATSTPVSIKQYPMSQEARLGIKPHIQRLLDQGILVPCQSPWNTPLLPVKKPGTNDYRPVQDLREVNKRVEDIHPTVPNPYNLLSGLPPSHQWYTVLDLKDAFFCLRLHPTSQPLFAFEWRDPEMGISGQLTWTRLPQGFKNSPTLFNEALHRDLADFRIQHPDLILLQYVDDLLLAATSELDCQQGTRALLQTLGNLGYRASAKKAQICQKQVKYLGYLLKEGQRWLTEARKETVMGQPTPKTPRQLREFLGTAGFCRLWIPGFAEMAAPLYPLTKPGTLFNWGPDQQKAYQEIKQALLTAPALGLPDLTKPFELFVDEKQGYAKGVLTQKLGPWRRPVAYLSKKLDPVAAGWPPCLRMVAAIAVLTKDAGKLTMGQPLVILAPHAVEALVKQPPDRWLSNARMTHYQALLLDTDRVQFGPVVALNPATLLPLPEEGLQHNCLDILAEAHGTRPDLTDQPLPDADHTWYTDGSSLLQEGQRKAGAAVTTETEVIWAKALPAGTSAQRAELIALTQALKMAEGKKLNVYTDSRYAFATAHIHGEIYRRRGWLTSEGKEIKNKDEILALLKALFLPKRLSIIHCPGHQKGHSAEARGNRMADQAARKAAITETPDTSTLLAGKRTADGSEFEKRTADGSEFESPKKKAKVE

SEQ ID NO: 2981 - protein, 2100 aa, synthetic construct
MPAAKRVKLDGGDKKYSIGLDIGTNSVGWAVITDEYKVPSKKFKVLGNTDRHSIKKNLIGALLFDSGETAEATRLKRTARRRYTRRKNRICYLQEIFSNEMAKVDDSFFHRLEESFLVEEDKKHERHPIFGNIVDEVAYHEKYPTIYHLRKKLVDSTDKADLRLIYLALAHMIKFRGHFLIEGDLNPDNSDVDKLFIQLVQTYNQLFEENPINASGVDAKAILSARLSKSRRLENLIAQLPGEKKNGLFGNLIALSLGLTPNFKSNFDLAEDAKLQLSKDTYDDDLDNLLAQIGDQYADLFLAAKNLSDAILLSDILRVNTEITKAPLSASMIKRYDEHHQDLTLLKALVRQQLPEKYKEIFFDQSKNGYAGYIDGGASQEEFYKFIKPILEKMDGTEELLVKLNREDLLRKQRTFDNGSIPHQIHLGELHAILRRQEDFYPFLKDNREKIEKILTFRIPYYVGPLARGNSRFAWMTRKSEETITPWNFEEVVDKGASAQSFIERMTNFDKNLPNEKVLPKHSLLYEYFTVYNELTKVKYVTEGMRKPAFLSGEQKKAIVDLLFKTNRKVTVKQLKEDYFKKIECFDSVEISGVEDRFNASLGTYHDLLKIIKDKDFLDNEENEDILEDIVLTLTLFEDREMIEERLKTYAHLFDDKVMKQLKRRRYTGWGRLSRKLINGIRDKQSGKTILDFLKSDGFANRNFMQLIHDDSLTFKEDIQKAQVSGQGDSLHEHIANLAGSPAIKKGILQTVKVVDELVKVMGRHKPENIVIEMARENQTTQKGQKNSRERMKRIEEGIKELGSQILKEHPVENTQLQNEKLYLYYLQNGRDMYVDQELDINRLSDYDVDHIVPQSFLKDDSIDNKVLTRSDKARGKSDNVPSEEVVKKMKNYWRQLLNAKLITQRKFDNLTKAERGGLSELDKAGFIKRQLVETRQITKHVAQILDSRMNTKYDENDKLIREVKVITLKSKLVSDFRKDFQFYKVREINNYHHAHDAYLNAVVGTALIKKYPKLESEFVYGDYKVYDVRKMIAKSEQEIGKATAKYFFYSNIMNFFKTEITLANGEIRKRPLIETNGETGEIVWDKGRDFATVRKVLSMPQVNIVKKTEVQTGGFSKESILPKRNSDKLIARKKDWDPKKYGGFDSPTVAYSVLVVAKVEKGKSKKLKSVKELLGITIMERSSFEKNPIDFLEAKGYKEVKKDLIIKLPKYSLFELENGRKRMLASAGELQKGNELALPSKYVNFLYLASHYEKLKGSPEDNEQKQLFVEQHKHYLDEIIEQISEFSKRVILADANLDKVLSAYNKHRDKPIREQAENIIHLFTLTNLGAPAAFKYFDTTIDRKRYTSTKEVLDATLIHQSITGLYETRIDLSQLGGDGGGGSGGSGGSGGSGGSGGTLNIEDEHRLHETSKEPDVSLGSTWLSDFPQAWAETGGMGLAVRQAPLIIPLKATSTPVSIKQYPMSQEARLGIKPHIQRLLDQGILVPCQSPWNTPLLPVKKPGTNDYRPVQDLREVNKRVEDIHPTVPNPYNLLSGLPPSHQWYTVLDLKDAFFCLRLHPTSQPLFAFEWRDPEMGISGQLTWTRLPQGFKNSPTLFNEALHRDLADFRIQHPDLILLQYVDDLLLAATSELDCQQGTRALLQTLGNLGYRASAKKAQICQKQVKYLGYLLKEGQRWLTEARKETVMGQPTPKTPRQLREFLGTAGFCRLWIPGFAEMAAPLYPLTKPGTLFNWGPDQQKAYQEIKQALLTAPALGLPDLTKPFELFVDEKQGYAKGVLTQKLGPWRRPVAYLSKKLDPVAAGWPPCLRMVAAIAVLTKDAGKLTMGQPLVILAPHAVEALVKQPPDRWLSNARMTHYQALLLDTDRVQFGPVVALNPATLLPLPEEGLQHNCLDILAEAHGTRPDLTDQPLPDADHTWYTDGSSLLQEGQRKAGAAVTTETEVIWAKALPAGTSAQRAELIALTQALKMAEGKKLNVYTDSRYAFATAHIHGEIYRRRGWLTSEGKEIKNKDEILALLKALFLPKRLSIIHCPGHQKGHSAEARGNRMADQAARKAAITETPDTSTLLAGKRTADGSEFEKRTADGSEFESPKKKAKVE

SEQ ID NO: 2982 - protein, 2093 aa, synthetic construct; identical to SEQ ID NO: 2726

SEQ ID NO: 2983 - protein, 2115 aa, synthetic construct; identical to SEQ ID NO: 2741

SEQ ID NO: 2984 - protein, 2090 aa, synthetic construct
MPAAKRVKLDGGDKKYSIGLDIGTNSVGWAVITDEYKVPSKKFKVLGNTDRHSIKKNLIGALLFDSGETAEATRLKRTARRRYTRRKNRICYLQEIFSNEMAKVDDSFFHRLEESFLVEEDKKHERHPIFGNIVDEVAYHEKYPTIYHLRKKLVDSTDKADLRLIYLALAHMIKFRGHFLIEGDLNPDNSDVDKLFIQLVQTYNQLFEENPINASGVDAKAILSARLSKSRRLENLIAQLPGEKKNGLFGNLIALSLGLTPNFKSNFDLAEDAKLQLSKDTYDDDLDNLLAQIGDQYADLFLAAKNLSDAILLSDILRVNTEITKAPLSASMIKRYDEHHQDLTLLKALVRQQLPEKYKEIFFDQSKNGYAGYIDGGASQEEFYKFIKPILEKMDGTEELLVKLNREDLLRKQRTFDNGSIPHQIHLGELHAILRRQEDFYPFLKDNREKIEKILTFRIPYYVGPLARGNSRFAWMTRKSEETITPWNFEEVVDKGASAQSFIERMTNFDKNLPNEKVLPKHSLLYEYFTVYNELTKVKYVTEGMRKPAFLSGEQKKAIVDLLFKTNRKVTVKQLKEDYFKKIECFDSVEISGVEDRFNASLGTYHDLLKIIKDKDFLDNEENEDILEDIVLTLTLFEDREMIEERLKTYAHLFDDKVMKQLKRRRYTGWGRLSRKLINGIRDKQSGKTILDFLKSDGFANRNFMQLIHDDSLTFKEDIQKAQVSGQGDSLHEHIANLAGSPAIKKGILQTVKVVDELVKVMGRHKPENIVIEMARENQTTQKGQKNSRERMKRIEEGIKELGSQILKEHPVENTQLQNEKLYLYYLQNGRDMYVDQELDINRLSDYDVDHIVPQSFLKDDSIDNKVLTRSDKARGKSDNVPSEEVVKKMKNYWRQLLNAKLITQRKFDNLTKAERGGLSELDKAGFIKRQLVETRQITKHVAQILDSRMNTKYDENDKLIREVKVITLKSKLVSDFRKDFQFYKVREINNYHHAHDAYLNAVVGTALIKKYPKLESEFVYGDYKVYDVRKMIAKSEQEIGKATAKYFFYSNIMNFFKTEITLANGEIRKRPLIETNGETGEIVWDKGRDFATVRKVLSMPQVNIVKKTEVQTGGFSKESILPKRNSDKLIARKKDWDPKKYGGFDSPTVAYSVLVVAKVEKGKSKKLKSVKELLGITIMERSSFEKNPIDFLEAKGYKEVKKDLIIKLPKYSLFELENGRKRMLASAGELQKGNELALPSKYVNFLYLASHYEKLKGSPEDNEQKQLFVEQHKHYLDEIIEQISEFSKRVILADANLDKVLSAYNKHRDKPIREQAENIIHLFTLTNLGAPAAFKYFDTTIDRKRYTSTKEVLDATLIHQSITGLYETRIDLSQLGGDGGGGGGGGGTLNIEDEHRLHETSKEPDVSLGSTWLSDFPQAWAETGGMGLAVRQAPLIIPLKATSTPVSIKQYPMSQEARLGIKPHIQRLLDQGILVPCQSPWNTPLLPVKKPGTNDYRPVQDLREVNKRVEDIHPTVPNPYNLLSGLPPSHQWYTVLDLKDAFFCLRLHPTSQPLFAFEWRDPEMGISGQLTWTRLPQGFKNSPTLFNEALHRDLADFRIQHPDLILLQYVDDLLLAATSELDCQQGTRALLQTLGNLGYRASAKKAQICQKQVKYLGYLLKEGQRWLTEARKETVMGQPTPKTPRQLREFLGTAGFCRLWIPGFAEMAAPLYPLTKPGTLFNWGPDQQKAYQEIKQALLTAPALGLPDLTKPFELFVDEKQGYAKGVLTQKLGPWRRPVAYLSKKLDPVAAGWPPCLRMVAAIAVLTKDAGKLTMGQPLVILAPHAVEALVKQPPDRWLSNARMTHYQALLLDTDRVQFGPVVALNPATLLPLPEEGLQHNCLDILAEAHGTRPDLTDQPLPDADHTWYTDGSSLLQEGQRKAGAAVTTETEVIWAKALPAGTSAQRAELIALTQALKMAEGKKLNVYTDSRYAFATAHIHGEIYRRRGWLTSEGKEIKNKDEILALLKALFLPKRLSIIHCPGHQKGHSAEARGNRMADQAARKAAITETPDTSTLLAGKRTADGSEFEKRTADGSEFESPKKKAKVE

SEQ ID NO: 2985 - protein, 2094 aa, synthetic construct
MPAAKRVKLDGGDKKYSIGLDIGTNSVGWAVITDEYKVPSKKFKVLGNTDRHSIKKNLIGALLFDSGETAEATRLKRTARRRYTRRKNRICYLQEIFSNEMAKVDDSFFHRLEESFLVEEDKKHERHPIFGNIVDEVAYHEKYPTIYHLRKKLVDSTDKADLRLIYLALAHMIKFRGHFLIEGDLNPDNSDVDKLFIQLVQTYNQLFEENPINASGVDAKAILSARLSKSRRLENLIAQLPGEKKNGLFGNLIALSLGLTPNFKSNFDLAEDAKLQLSKDTYDDDLDNLLAQIGDQYADLFLAAKNLSDAILLSDILRVNTEITKAPLSASMIKRYDEHHQDLTLLKALVRQQLPEKYKEIFFDQSKNGYAGYIDGGASQEEFYKFIKPILEKMDGTEELLVKLNREDLLRKQRTFDNGSIPHQIHLGELHAILRRQEDFYPFLKDNREKIEKILTFRIPYYVGPLARGNSRFAWMTRKSEETITPWNFEEVVDKGASAQSFIERMTNFDKNLPNEKVLPKHSLLYEYFTVYNELTKVKYVTEGMRKPAFLSGEQKKAIVDLLFKTNRKVTVKQLKEDYFKKIECFDSVEISGVEDRFNASLGTYHDLLKIIKDKDFLDNEENEDILEDIVLTLTLFEDREMIEERLKTYAHLFDDKVMKQLKRRRYTGWGRLSRKLINGIRDKQSGKTILDFLKSDGFANRNFMQLIHDDSLTFKEDIQKAQVSGQGDSLHEHIANLAGSPAIKKGILQTVKVVDELVKVMGRHKPENIVIEMARENQTTQKGQKNSRERMKRIEEGIKELGSQILKEHPVENTQLQNEKLYLYYLQNGRDMYVDQELDINRLSDYDVDHIVPQSFLKDDSIDNKVLTRSDKARGKSDNVPSEEVVKKMKNYWRQLLNAKLITQRKFDNLTKAERGGLSELDKAGFIKRQLVETRQITKHVAQILDSRMNTKYDENDKLIREVKVITLKSKLVSDFRKDFQFYKVREINNYHHAHDAYLNAVVGTALIKKYPKLESEFVYGDYKVYDVRKMIAKSEQEIGKATAKYFFYSNIMNFFKTEITLANGEIRKRPLIETNGETGEIVWDKGRDFATVRKVLSMPQVNIVKKTEVQTGGFSKESILPKRNSDKLIARKKDWDPKKYGGFDSPTVAYSVLVVAKVEKGKSKKLKSVKELLGITIMERSSFEKNPIDFLEAKGYKEVKKDLIIKLPKYSLFELENGRKRMLASAGELQKGNELALPSKYVNFLYLASHYEKLKGSPEDNEQKQLFVEQHKHYLDEIIEQISEFSKRVILADANLDKVLSAYNKHRDKPIREQAENIIHLFTLTNLGAPAAFKYFDTTIDRKRYTSTKEVLDATLIHQSITGLYETRIDLSQLGGDGGGGSGSSPAPGGTLNIEDEHRLHETSKEPDVSLGSTWLSDFPQAWAETGGMGLAVRQAPLIIPLKATSTPVSIKQYPMSQEARLGIKPHIQRLLDQGILVPCQSPWNTPLLPVKKPGTNDYRPVQDLREVNKRVEDIHPTVPNPYNLLSGLPPSHQWYTVLDLKDAFFCLRLHPTSQPLFAFEWRDPEMGISGQLTWTRLPQGFKNSPTLFNEALHRDLADFRIQHPDLILLQYVDDLLLAATSELDCQQGTRALLQTLGNLGYRASAKKAQICQKQVKYLGYLLKEGQRWLTEARKETVMGQPTPKTPRQLREFLGTAGFCRLWIPGFAEMAAPLYPLTKPGTLFNWGPDQQKAYQEIKQALLTAPALGLPDLTKPFELFVDEKQGYAKGVLTQKLGPWRRPVAYLSKKLDPVAAGWPPCLRMVAAIAVLTKDAGKLTMGQPLVILAPHAVEALVKQPPDRWLSNARMTHYQALLLDTDRVQFGPVVALNPATLLPLPEEGLQHNCLDILAEAHGTRPDLTDQPLPDADHTWYTDGSSLLQEGQRKAGAAVTTETEVIWAKALPAGTSAQRAELIALTQALKMAEGKKLNVYTDSRYAFATAHIHGEIYRRRGWLTSEGKEIKNKDEILALLKALFLPKRLSIIHCPGHQKGHSAEARGNRMADQAARKAAITETPDTSTLLAGKRTADGSEFEKRTADGSEFESPKKKAKVE

SEQ ID NO: 2986 - protein, 2088 aa, synthetic construct
MPAAKRVKLDGGDKKYSIGLDIGTNSVGWAVITDEYKVPSKKFKVLGNTDRHSIKKNLIGALLFDSGETAEATRLKRTARRRYTRRKNRICYLQEIFSNEMAKVDDSFFHRLEESFLVEEDKKHERHPIFGNIVDEVAYHEKYPTIYHLRKKLVDSTDKADLRLIYLALAHMIKFRGHFLIEGDLNPDNSDVDKLFIQLVQTYNQLFEENPINASGVDAKAILSARLSKSRRLENLIAQLPGEKKNGLFGNLIALSLGLTPNFKSNFDLAEDAKLQLSKDTYDDDLDNLLAQIGDQYADLFLAAKNLSDAILLSDILRVNTEITKAPLSASMIKRYDEHHQDLTLLKALVRQQLPEKYKEIFFDQSKNGYAGYIDGGASQEEFYKFIKPILEKMDGTEELLVKLNREDLLRKQRTFDNGSIPHQIHLGELHAILRRQEDFYPFLKDNREKIEKILTFRIPYYVGPLARGNSRFAWMTRKSEETITPWNFEEVVDKGASAQSFIERMTNFDKNLPNEKVLPKHSLLYEYFTVYNELTKVKYVTEGMRKPAFLSGEQKKAIVDLLFKTNRKVTVKQLKEDYFKKIECFDSVEISGVEDRFNASLGTYHDLLKIIKDKDFLDNEENEDILEDIVLTLTLFEDREMIEERLKTYAHLFDDKVMKQLKRRRYTGWGRLSRKLINGIRDKQSGKTILDFLKSDGFANRNFMQLIHDDSLTFKEDIQKAQVSGQGDSLHEHIANLAGSPAIKKGILQTVKVVDELVKVMGRHKPENIVIEMARENQTTQKGQKNSRERMKRIEEGIKELGSQILKEHPVENTQLQNEKLYLYYLQNGRDMYVDQELDINRLSDYDVDHIVPQSFLKDDSIDNKVLTRSDKARGKSDNVPSEEVVKKMKNYWRQLLNAKLITQRKFDNLTKAERGGLSELDKAGFIKRQLVETRQITKHVAQILDSRMNTKYDENDKLIREVKVITLKSKLVSDFRKDFQFYKVREINNYHHAHDAYLNAVVGTALIKKYPKLESEFVYGDYKVYDVRKMIAKSEQEIGKATAKYFFYSNIMNFFKTEITLANGEIRKRPLIETNGETGEIVWDKGRDFATVRKVLSMPQVNIVKKTEVQTGGFSKESILPKRNSDKLIARKKDWDPKKYGGFDSPTVAYSVLVVAKVEKGKSKKLKSVKELLGITIMERSSFEKNPIDFLEAKGYKEVKKDLIIKLPKYSLFELENGRKRMLASAGELQKGNELALPSKYVNFLYLASHYEKLKGSPEDNEQKQLFVEQHKHYLDEIIEQISEFSKRVILADANLDKVLSAYNKHRDKPIREQAENIIHLFTLTNLGAPAAFKYFDTTIDRKRYTSTKEVLDATLIHQSITGLYETRIDLSQLGGDGGGSSGGTLNIEDEHRLHETSKEPDVSLGSTWLSDFPQAWAETGGMGLAVRQAPLIIPLKATSTPVSIKQYPMSQEARLGIKPHIQRLLDQGILVPCQSPWNTPLLPVKKPGTNDYRPVQDLREVNKRVEDIHPTVPNPYNLLSGLPPSHQWYTVLDLKDAFFCLRLHPTSQPLFAFEWRDPEMGISGQLTWTRLPQGFKNSPTLFNEALHRDLADFRIQHPDLILLQYVDDLLLAATSELDCQQGTRALLQTLGNLGYRASAKKAQICQKQVKYLGYLLKEGQRWLTEARKETVMGQPTPKTPRQLREFLGTAGFCRLWIPGFAEMAAPLYPLTKPGTLFNWGPDQQKAYQEIKQALLTAPALGLPDLTKPFELFVDEKQGYAKGVLTQKLGPWRRPVAYLSKKLDPVAAGWPPCLRMVAAIAVLTKDAGKLTMGQPLVILAPHAVEALVKQPPDRWLSNARMTHYQALLLDTDRVQFGPVVALNPATLLPLPEEGLQHNCLDILAEAHGTRPDLTDQPLPDADHTWYTDGSSLLQEGQRKAGAAVTTETEVIWAKALPAGTSAQRAELIALTQALKMAEGKKLNVYTDSRYAFATAHIHGEIYRRRGWLTSEGKEIKNKDEILALLKALFLPKRLSIIHCPGHQKGHSAEARGNRMADQAARKAAITETPDTSTLLAGKRTADGSEFEKRTADGSEFESPKKKAKVE

SEQ ID NO: 2987 - protein, 2096 aa, synthetic construct; identical to SEQ ID NO: 2776

SEQ ID NO: 2988 - protein, 2094 aa, synthetic construct
MPAAKRVKLDGGDKKYSIGLDIGTNSVGWAVITDEYKVPSKKFKVLGNTDRHSIKKNLIGALLFDSGETAEATRLKRTARRRYTRRKNRICYLQEIFSNEMAKVDDSFFHRLEESFLVEEDKKHERHPIFGNIVDEVAYHEKYPTIYHLRKKLVDSTDKADLRLIYLALAHMIKFRGHFLIEGDLNPDNSDVDKLFIQLVQTYNQLFEENPINASGVDAKAILSARLSKSRRLENLIAQLPGEKKNGLFGNLIALSLGLTPNFKSNFDLAEDAKLQLSKDTYDDDLDNLLAQIGDQYADLFLAAKNLSDAILLSDILRVNTEITKAPLSASMIKRYDEHHQDLTLLKALVRQQLPEKYKEIFFDQSKNGYAGYIDGGASQEEFYKFIKPILEKMDGTEELLVKLNREDLLRKQRTFDNGSIPHQIHLGELHAILRRQEDFYPFLKDNREKIEKILTFRIPYYVGPLARGNSRFAWMTRKSEETITPWNFEEVVDKGASAQSFIERMTNFDKNLPNEKVLPKHSLLYEYFTVYNELTKVKYVTEGMRKPAFLSGEQKKAIVDLLFKTNRKVTVKQLKEDYFKKIECFDSVEISGVEDRFNASLGTYHDLLKIIKDKDFLDNEENEDILEDIVLTLTLFEDREMIEERLKTYAHLFDDKVMKQLKRRRYTGWGRLSRKLINGIRDKQSGKTILDFLKSDGFANRNFMQLIHDDSLTFKEDIQKAQVSGQGDSLHEHIANLAGSPAIKKGILQTVKVVDELVKVMGRHKPENIVIEMARENQTTQKGQKNSRERMKRIEEGIKELGSQILKEHPVENTQLQNEKLYLYYLQNGRDMYVDQELDINRLSDYDVDHIVPQSFLKDDSIDNKVLTRSDKARGKSDNVPSEEVVKKMKNYWRQLLNAKLITQRKFDNLTKAERGGLSELDKAGFIKRQLVETRQITKHVAQILDSRMNTKYDENDKLIREVKVITLKSKLVSDFRKDFQFYKVREINNYHHAHDAYLNAVVGTALIKKYPKLESEFVYGDYKVYDVRKMIAKSEQEIGKATAKYFFYSNIMNFFKTEITLANGEIRKRPLIETNGETGEIVWDKGRDFATVRKVLSMPQVNIVKKTEVQTGGFSKESILPKRNSDKLIARKKDWDPKKYGGFDSPTVAYSVLVVAKVEKGKSKKLKSVKELLGITIMERSSFEKNPIDFLEAKGYKEVKKDLIIKLPKYSLFELENGRKRMLASAGELQKGNELALPSKYVNFLYLASHYEKLKGSPEDNEQKQLFVEQHKHYLDEIIEQISEFSKRVILADANLDKVLSAYNKHRDKPIREQAENIIHLFTLTNLGAPAAFKYFDTTIDRKRYTSTKEVLDATLIHQSITGLYETRIDLSQLGGDGGGSSPAPGGGGGTLNIEDEHRLHETSKEPDVSLGSTWLSDFPQAWAETGGMGLAVRQAPLIIPLKATSTPVSIKQYPMSQEARLGIKPHIQRLLDQGILVPCQSPWNTPLLPVKKPGTNDYRPVQDLREVNKRVEDIHPTVPNPYNLLSGLPPSHQWYTVLDLKDAFFCLRLHPTSQPLFAFEWRDPEMGISGQLTWTRLPQGFKNSPTLFNEALHRDLADFRIQHPDLILLQYVDDLLLAATSELDCQQGTRALLQTLGNLGYRASAKKAQICQKQVKYLGYLLKEGQRWLTEARKETVMGQPTPKTPRQLREFLGTAGFCRLWIPGFAEMAAPLYPLTKPGTLFNWGPDQQKAYQEIKQALLTAPALGLPDLTKPFELFVDEKQGYAKGVLTQKLGPWRRPVAYLSKKLDPVAAGWPPCLRMVAAIAVLTKDAGKLTMGQPLVILAPHAVEALVKQPPDRWLSNARMTHYQALLLDTDRVQFGPVVALNPATLLPLPEEGLQHNCLDILAEAHGTRPDLTDQPLPDADHTWYTDGSSLLQEGQRKAGAAVTTETEVIWAKALPAGTSAQRAELIALTQALKMAEGKKLNVYTDSRYAFATAHIHGEIYRRRGWLTSEGKEIKNKDEILALLKALFLPKRLSIIHCPGHQKGHSAEARGNRMADQAARKAAITETPDTSTLLAGKRTADGSEFEKRTADGSEFESPKKKAKVE

SEQ ID NO: 2989 - protein, 2096 aa, synthetic construct; identical to SEQ ID NO: 2727

SEQ ID NO: 2990 - protein, 2096 aa, synthetic construct; identical to SEQ ID NO: 2764

SEQ ID NO: 2991 - protein, 2110 aa, synthetic construct; identical to SEQ ID NO: 2716

SEQ ID NO: 2992 - protein, 2115 aa, synthetic construct
MPAAKRVKLDGGDKKYSIGLDIGTNSVGWAVITDEYKVPSKKFKVLGNTDRHSIKKNLIGALLFDSGETAEATRLKRTARRRYTRRKNRICYLQEIFSNEMAKVDDSFFHRLEESFLVEEDKKHERHPIFGNIVDEVAYHEKYPTIYHLRKKLVDSTDKADLRLIYLALAHMIKFRGHFLIEGDLNPDNSDVDKLFIQLVQTYNQLFEENPINASGVDAKAILSARLSKSRRLENLIAQLPGEKKNGLFGNLIALSLGLTPNFKSNFDLAEDAKLQLSKDTYDDDLDNLLAQIGDQYADLFLAAKNLSDAILLSDILRVNTEITKAPLSASMIKRYDEHHQDLTLLKALVRQQLPEKYKEIFFDQSKNGYAGYIDGGASQEEFYKFIKPILEKMDGTEELLVKLNREDLLRKQRTFDNGSIPHQIHLGELHAILRRQEDFYPFLKDNREKIEKILTFRIPYYVGPLARGNSRFAWMTRKSEETITPWNFEEVVDKGASAQSFIERMTNFDKNLPNEKVLPKHSLLYEYFTVYNELTKVKYVTEGMRKPAFLSGEQKKAIVDLLFKTNRKVTVKQLKEDYFKKIECFDSVEISGVEDRFNASLGTYHDLLKIIKDKDFLDNEENEDILEDIVLTLTLFEDREMIEERLKTYAHLFDDKVMKQLKRRRYTGWGRLSRKLINGIRDKQSGKTILDFLKSDGFANRNFMQLIHDDSLTFKEDIQKAQVSGQGDSLHEHIANLAGSPAIKKGILQTVKVVDELVKVMGRHKPENIVIEMARENQTTQKGQKNSRERMKRIEEGIKELGSQILKEHPVENTQLQNEKLYLYYLQNGRDMYVDQELDINRLSDYDVDHIVPQSFLKDDSIDNKVLTRSDKARGKSDNVPSEEVVKKMKNYWRQLLNAKLITQRKFDNLTKAERGGLSELDKAGFIKRQLVETRQITKHVAQILDSRMNTKYDENDKLIREVKVITLKSKLVSDFRKDFQFYKVREINNYHHAHDAYLNAVVGTALIKKYPKLESEFVYGDYKVYDVRKMIAKSEQEIGKATAKYFFYSNIMNFFKTEITLANGEIRKRPLIETNGETGEIVWDKGRDFATVRKVLSMPQVNIVKKTEVQTGGFSKESILPKRNSDKLIARKKDWDPKKYGGFDSPTVAYSVLVVAKVEKGKSKKLKSVKELLGITIMERSSFEKNPIDFLEAKGYKEVKKDLIIKLPKYSLFELENGRKRMLASAGELQKGNELALPSKYVNFLYLASHYEKLKGSPEDNEQKQLFVEQHKHYLDEIIEQISEFSKRVILADANLDKVLSAYNKHRDKPIREQAENIIHLFTLTNLGAPAAFKYFDTTIDRKRYTSTKEVLDATLIHQSITGLYETRIDLSQLGGDGGEAAAKEAAAKEAAAKEAAAKEAAAKEAAAKGGTLNIEDEHRLHETSKEPDVSLGSTWLSDFPQAWAETGGMGLAVRQAPLIIPLKATSTPVSIKQYPMSQEARLGIKPHIQRLLDQGILVPCQSPWNTPLLPVKKPGTNDYRPVQDLREVNKRVEDIHPTVPNPYNLLSGLPPSHQWYTVLDLKDAFFCLRLHPTSQPLFAFEWRDPEMGISGQLTWTRLPQGFKNSPTLFNEALHRDLADFRIQHPDLILLQYVDDLLLAATSELDCQQGTRALLQTLGNLGYRASAKKAQICQKQVKYLGYLLKEGQRWLTEARKETVMGQPTPKTPRQLREFLGTAGFCRLWIPGFAEMAAPLYPLTKPGTLFNWGPDQQKAYQEIKQALLTAPALGLPDLTKPFELFVDEKQGYAKGVLTQKLGPWRRPVAYLSKKLDPVAAGWPPCLRMVAAIAVLTKDAGKLTMGQPLVILAPHAVEALVKQPPDRWLSNARMTHYQALLLDTDRVQFGPVVALNPATLLPLPEEGLQHNCLDILAEAHGTRPDLTDQPLPDADHTWYTDGSSLLQEGQRKAGAAVTTETEVIWAKALPAGTSAQRAELIALTQALKMAEGKKLNVYTDSRYAFATAHIHGEIYRRRGWLTSEGKEIKNKDEILALLKALFLPKRLSIIHCPGHQKGHSAEARGNRMADQAARKAAITETPDTSTLLAGKRTADGSEFEKRTADGSEFESPKKKAKVE

SEQ ID NO: 2993 - protein, 2094 aa, synthetic construct; identical to SEQ ID NO: 2766

SEQ ID NO: 2994 - protein, 2094 aa, synthetic construct; identical to SEQ ID NO: 2773

SEQ ID NO: 2995 - protein, 2097 aa, synthetic construct
MPAAKRVKLDGGDKKYSIGLDIGTNSVGWAVITDEYKVPSKKFKVLGNTDRHSIKKNLIGALLFDSGETAEATRLKRTARRRYTRRKNRICYLQEIFSNEMAKVDDSFFHRLEESFLVEEDKKHERHPIFGNIVDEVAYHEKYPTIYHLRKKLVDSTDKADLRLIYLALAHMIKFRGHFLIEGDLNPDNSDVDKLFIQLVQTYNQLFEENPINASGVDAKAILSARLSKSRRLENLIAQLPGEKKNGLFGNLIALSLGLTPNFKSNFDLAEDAKLQLSKDTYDDDLDNLLAQIGDQYADLFLAAKNLSDAILLSDILRVNTEITKAPLSASMIKRYDEHHQDLTLLKALVRQQLPEKYKEIFFDQSKNGYAGYIDGGASQEEFYKFIKPILEKMDGTEELLVKLNREDLLRKQRTFDNGSIPHQIHLGELHAILRRQEDFYPFLKDNREKIEKILTFRIPYYVGPLARGNSRFAWMTRKSEETITPWNFEEVVDKGASAQSFIERMTNFDKNLPNEKVLPKHSLLYEYFTVYNELTKVKYVTEGMRKPAFLSGEQKKAIVDLLFKTNRKVTVKQLKEDYFKKIECFDSVEISGVEDRFNASLGTYHDLLKIIKDKDFLDNEENEDILEDIVLTLTLFEDREMIEERLKTYAHLFDDKVMKQLKRRRYTGWGRLSRKLINGIRDKQSGKTILDFLKSDGFANRNFMQLIHDDSLTFKEDIQKAQVSGQGDSLHEHIANLAGSPAIKKGILQTVKVVDELVKVMGRHKPENIVIEMARENQTTQKGQKNSRERMKRIEEGIKELGSQILKEHPVENTQLQNEKLYLYYLQNGRDMYVDQELDINRLSDYDVDHIVPQSFLKDDSIDNKVLTRSDKARGKSDNVPSEEVVKKMKNYWRQLLNAKLITQRKFDNLTKAERGGLSELDKAGFIKRQLVETRQITKHVAQILDSRMNTKYDENDKLIREVKVITLKSKLVSDFRKDFQFYKVREINNYHHAHDAYLNAVVGTALIKKYPKLESEFVYGDYKVYDVRKMIAKSEQEIGKATAKYFFYSNIMNFFKTEITLANGEIRKRPLIETNGETGEIVWDKGRDFATVRKVLSMPQVNIVKKTEVQTGGFSKESILPKRNSDKLIARKKDWDPKKYGGFDSPTVAYSVLVVAKVEKGKSKKLKSVKELLGITIMERSSFEKNPIDFLEAKGYKEVKKDLIIKLPKYSLFELENGRKRMLASAGELQKGNELALPSKYVNFLYLASHYEKLKGSPEDNEQKQLFVEQHKHYLDEIIEQISEFSKRVILADANLDKVLSAYNKHRDKPIREQAENIIHLFTLTNLGAPAAFKYFDTTIDRKRYTSTKEVLDATLIHQSITGLYETRIDLSQLGGDGGGSAGSAAGSGEFGGTLNIEDEHRLHETSKEPDVSLGSTWLSDFPQAWAETGGMGLAVRQAPLIIPLKATSTPVSIKQYPMSQEARLGIKPHIQRLLDQGILVPCQSPWNTPLLPVKKPGTNDYRPVQDLREVNKRVEDIHPTVPNPYNLLSGLPPSHQWYTVLDLKDAFFCLRLHPTSQPLFAFEWRDPEMGISGQLTWTRLPQGFKNSPTLFNEALHRDLADFRIQHPDLILLQYVDDLLLAATSELDCQQGTRALLQTLGNLGYRASAKKAQICQKQVKYLGYLLKEGQRWLTEARKETVMGQPTPKTPRQLREFLGTAGFCRLWIPGFAEMAAPLYPLTKPGTLFNWGPDQQKAYQEIKQALLTAPALGLPDLTKPFELFVDEKQGYAKGVLTQKLGPWRRPVAYLSKKLDPVAAGWPPCLRMVAAIAVLTKDAGKLTMGQPLVILAPHAVEALVKQPPDRWLSNARMTHYQALLLDTDRVQFGPVVALNPATLLPLPEEGLQHNCLDILAEAHGTRPDLTDQPLPDADHTWYTDGSSLLQEGQRKAGAAVTTETEVIWAKALPAGTSAQRAELIALTQALKMAEGKKLNVYTDSRYAFATAHIHGEIYRRRGWLTSEGKEIKNKDEILALLKALFLPKRLSIIHCPGHQKGHSAEARGNRMADQAARKAAITETPDTSTLLAGKRTADGSEFEKRTADGSEFESPKKKAKVE

SEQ ID NO: 2996 - protein, 2091 aa, synthetic construct
MPAAKRVKLDGGDKKYSIGLDIGTNSVGWAVITDEYKVPSKKFKVLGNTDRHSIKKNLIGALLFDSGETAEATRLKRTARRRYTRRKNRICYLQEIFSNEMAKVDDSFFHRLEESFLVEEDKKHERHPIFGNIVDEVAYHEKYPTIYHLRKKLVDSTDKADLRLIYLALAHMIKFRGHFLIEGDLNPDNSDVDKLFIQLVQTYNQLFEENPINASGVDAKAILSARLSKSRRLENLIAQLPGEKKNGLFGNLIALSLGLTPNFKSNFDLAEDAKLQLSKDTYDDDLDNLLAQIGDQYADLFLAAKNLSDAILLSDILRVNTEITKAPLSASMIKRYDEHHQDLTLLKALVRQQLPEKYKEIFFDQSKNGYAGYIDGGASQEEFYKFIKPILEKMDGTEELLVKLNREDLLRKQRTFDNGSIPHQIHLGELHAILRRQEDFYPFLKDNREKIEKILTFRIPYYVGPLARGNSRFAWMTRKSEETITPWNFEEVVDKGASAQSFIERMTNFDKNLPNEKVLPKHSLLYEYFTVYNELTKVKYVTEGMRKPAFLSGEQKKAIVDLLFKTNRKVTVKQLKEDYFKKIECFDSVEISGVEDRFNASLGTYHDLLKIIKDKDFLDNEENEDILEDIVLTLTLFEDREMIEERLKTYAHLFDDKVMKQLKRRRYTGWGRLSRKLINGIRDKQSGKTILDFLKSDGFANRNFMQLIHDDSLTFKEDIQKAQVSGQGDSLHEHIANLAGSPAIKKGILQTVKVVDELVKVMGRHKPENIVIEMARENQTTQKGQKNSRERMKRIEEGIKELGSQILKEHPVENTQLQNEKLYLYYLQNGRDMYVDQELDINRLSDYDVDHIVPQSFLKDDSIDNKVLTRSDKARGKSDNVPSEEVVKKMKNYWRQLLNAKLITQRKFDNLTKAERGGLSELDKAGFIKRQLVETRQITKHVAQILDSRMNTKYDENDKLIREVKVITLKSKLVSDFRKDFQFYKVREINNYHHAHDAYLNAVVGTALIKKYPKLESEFVYGDYKVYDVRKMIAKSEQEIGKATAKYFFYSNIMNFFKTEITLANGEIRKRPLIETNGETGEIVWDKGRDFATVRKVLSMPQVNIVKKTEVQTGGFSKESILPKRNSDKLIARKKDWDPKKYGGFDSPTVAYSVLVVAKVEKGKSKKLKSVKELLGITIMERSSFEKNPIDFLEAKGYKEVKKDLIIKLPKYSLFELENGRKRMLASAGELQKGNELALPSKYVNFLYLASHYEKLKGSPEDNEQKQLFVEQHKHYLDEIIEQISEFSKRVILADANLDKVLSAYNKHRDKPIREQAENIIHLFTLTNLGAPAAFKYFDTTIDRKRYTSTKEVLDATLIHQSITGLYETRIDLSQLGGDGGPAPGSSGGTLNIEDEHRLHETSKEPDVSLGSTWLSDFPQAWAETGGMGLAVRQAPLIIPLKATSTPVSIKQYPMSQEARLGIKPHIQRLLDQGILVPCQSPWNTPLLPVKKPGTNDYRPVQDLREVNKRVEDIHPTVPNPYNLLSGLPPSHQWYTVLDLKDAFFCLRLHPTSQPLFAFEWRDPEMGISGQLTWTRLPQGFKNSPTLFNEALHRDLADFRIQHPDLILLQYVDDLLLAATSELDCQQGTRALLQTLGNLGYRASAKKAQICQKQVKYLGYLLKEGQRWLTEARKETVMGQPTPKTPRQLREFLGTAGFCRLWIPGFAEMAAPLYPLTKPGTLFNWGPDQQKAYQEIKQALLTAPALGLPDLTKPFELFVDEKQGYAKGVLTQKLGPWRRPVAYLSKKLDPVAAGWPPCLRMVAAIAVLTKDAGKLTMGQPLVILAPHAVEALVKQPPDRWLSNARMTHYQALLLDTDRVQFGPVVALNPATLLPLPEEGLQHNCLDILAEAHGTRPDLTDQPLPDADHTWYTDGSSLLQEGQRKAGAAVTTETEVIWAKALPAGTSAQRAELIALTQALKMAEGKKLNVYTDSRYAFATAHIHGEIYRRRGWLTSEGKEIKNKDEILALLKALFLPKRLSIIHCPGHQKGHSAEARGNRMADQAARKAAITETPDTSTLLAGKRTADGSEFEKRTADGSEFESPKKKAKVE

SEQ ID NO: 2997 - protein, 2096 aa, synthetic construct
MPAAKRVKLDGGDKKYSIGLDIGTNSVGWAVITDEYKVPSKKFKVLGNTDRHSIKKNLIGALLFDSGETAEATRLKRTARRRYTRRKNRICYLQEIFSNEMAKVDDSFFHRLEESFLVEEDKKHERHPIFGNIVDEVAYHEKYPTIYHLRKKLVDSTDKADLRLIYLALAHMIKFRGHFLIEGDLNPDNSDVDKLFIQLVQTYNQLFEENPINASGVDAKAILSARLSKSRRLENLIAQLPGEKKNGLFGNLIALSLGLTPNFKSNFDLAEDAKLQLSKDTYDDDLDNLLAQIGDQYADLFLAAKNLSDAILLSDILRVNTEITKAPLSASMIKRYDEHHQDLTLLKALVRQQLPEKYKEIFFDQSKNGYAGYIDGGASQEEFYKFIKPILEKMDGTEELLVKLNREDLLRKQRTFDNGSIPHQIHLGELHAILRRQEDFYPFLKDNREKIEKILTFRIPYYVGPLARGNSRFAWMTRKSEETITPWNFEEVVDKGASAQSFIERMTNFDKNLPNEKVLPKHSLLYEYFTVYNELTKVKYVTEGMRKPAFLSGEQKKAIVDLLFKTNRKVTVKQLKEDYFKKIECFDSVEISGVEDRFNASLGTYHDLLKIIKDKDFLDNEENEDILEDIVLTLTLFEDREMIEERLKTYAHLFDDKVMKQLKRRRYTGWGRLSRKLINGIRDKQSGKTILDFLKSDGFANRNFMQLIHDDSLTFKEDIQKAQVSGQGDSLHEHIANLAGSPAIKKGILQTVKVVDELVKVMGRHKPENIVIEMARENQTTQKGQKNSRERMKRIEEGIKELGSQILKEHPVENTQLQNEKLYLYYLQNGRDMYVDQELDINRLSDYDVDHIVPQSFLKDDSIDNKVLTRSDKARGKSDNVPSEEVVKKMKNYWRQLLNAKLITQRKFDNLTKAERGGLSELDKAGFIKRQLVETRQITKHVAQILDSRMNTKYDENDKLIREVKVITLKSKLVSDFRKDFQFYKVREINNYHHAHDAYLNAVVGTALIKKYPKLESEFVYGDYKVYDVRKMIAKSEQEIGKATAKYFFYSNIMNFFKTEITLANGEIRKRPLIETNGETGEIVWDKGRDFATVRKVLSMPQVNIVKKTEVQTGGFSKESILPKRNSDKLIARKKDWDPKKYGGFDSPTVAYSVLVVAKVEKGKSKKLKSVKELLGITIMERSSFEKNPIDFLEAKGYKEVKKDLIIKLPKYSLFELENGRKRMLASAGELQKGNELALPSKYVNFLYLASHYEKLKGSPEDNEQKQLFVEQHKHYLDEIIEQISEFSKRVILADANLDKVLSAYNKHRDKPIREQAENIIHLFTLTNLGAPAAFKYFDTTIDRKRYTSTKEVLDATLIHQSITGLYETRIDLSQLGGDGGEAAAKGGGGSSGGTLNIEDEHRLHETSKEPDVSLGSTWLSDFPQAWAETGGMGLAVRQAPLIIPLKATSTPVSIKQYPMSQEARLGIKPHIQRLLDQGILVPCQSPWNTPLLPVKKPGTNDYRPVQDLREVNKRVEDIHPTVPNPYNLLSGLPPSHQWYTVLDLKDAFFCLRLHPTSQPLFAFEWRDPEMGISGQLTWTRLPQGFKNSPTLFNEALHRDLADFRIQHPDLILLQYVDDLLLAATSELDCQQGTRALLQTLGNLGYRASAKKAQICQKQVKYLGYLLKEGQRWLTEARKETVMGQPTPKTPRQLREFLGTAGFCRLWIPGFAEMAAPLYPLTKPGTLFNWGPDQQKAYQEIKQALLTAPALGLPDLTKPFELFVDEKQGYAKGVLTQKLGPWRRPVAYLSKKLDPVAAGWPPCLRMVAAIAVLTKDAGKLTMGQPLVILAPHAVEALVKQPPDRWLSNARMTHYQALLLDTDRVQFGPVVALNPATLLPLPEEGLQHNCLDILAEAHGTRPDLTDQPLPDADHTWYTDGSSLLQEGQRKAGAAVTTETEVIWAKALPAGTSAQRAELIALTQALKMAEGKKLNVYTDSRYAFATAHIHGEIYRRRGWLTSEGKEIKNKDEILALLKALFLPKRLSIIHCPGHQKGHSAEARGNRMADQAARKAAITETPDTSTLLAGKRTADGSEFEKRTADGSEFESPKKKAKVE

SEQ ID NO: 2998 - protein, 2100 aa, synthetic construct
MPAAKRVKLDGGDKKYSIGLDIGTNSVGWAVITDEYKVPSKKFKVLGNTDRHSIKKNLIGALLFDSGETAEATRLKRTARRRYTRRKNRICYLQEIFSNEMAKVDDSFFHRLEESFLVEEDKKHERHPIFGNIVDEVAYHEKYPTIYHLRKKLVDSTDKADLRLIYLALAHMIKFRGHFLIEGDLNPDNSDVDKLFIQLVQTYNQLFEENPINASGVDAKAILSARLSKSRRLENLIAQLPGEKKNGLFGNLIALSLGLTPNFKSNFDLAEDAKLQLSKDTYDDDLDNLLAQIGDQYADLFLAAKNLSDAILLSDILRVNTEITKAPLSASMIKRYDEHHQDLTLLKALVRQQLPEKYKEIFFDQSKNGYAGYIDGGASQEEFYKFIKPILEKMDGTEELLVKLNREDLLRKQRTFDNGSIPHQIHLGELHAILRRQEDFYPFLKDNREKIEKILTFRIPYYVGPLARGNSRFAWMTRKSEETITPWNFEEVVDKGASAQSFIERMTNFDKNLPNEKVLPKHSLLYEYFTVYNELTKVKYVTEGMRKPAFLSGEQKKAIVDLLFKTNRKVTVKQLKEDYFKKIECFDSVEISGVEDRFNASLGTYHDLLKIIKDKDFLDNEENEDILEDIVLTLTLFEDREMIEERLKTYAHLFDDKVMKQLKRRRYTGWGRLSRKLINGIRDKQSGKTILDFLKSDGFANRNFMQLIHDDSLTFKEDIQKAQVSGQGDSLHEHIANLAGSPAIKKGILQTVKVVDELVKVMGRHKPENIVIEMARENQTTQKGQKNSRERMKRIEEGIKELGSQILKEHPVENTQLQNEKLYLYYLQNGRDMYVDQELDINRLSDYDVDHIVPQSFLKDDSIDNKVLTRSDKARGKSDNVPSEEVVKKMKNYWRQLLNAKLITQRKFDNLTKAERGGLSELDKAGFIKRQLVETRQITKHVAQILDSRMNTKYDENDKLIREVKVITLKSKLVSDFRKDFQFYKVREINNYHHAHDAYLNAVVGTALIKKYPKLESEFVYGDYKVYDVRKMIAKSEQEIGKATAKYFFYSNIMNFFKTEITLANGEIRKRPLIETNGETGEIVWDKGRDFATVRKVLSMPQVNIVKKTEVQTGGFSKESILPKRNSDKLIARKKDWDPKKYGGFDSPTVAYSVLVVAKVEKGKSKKLKSVKELLGITIMERSSFEKNPIDFLEAKGYKEVKKDLIIKLPKYSLFELENGRKRMLASAGELQKGNELALPSKYVNFLYLASHYEKLKGSPEDNEQKQLFVEQHKHYLDEIIEQISEFSKRVILADANLDKVLSAYNKHRDKPIREQAENIIHLFTLTNLGAPAAFKYFDTTIDRKRYTSTKEVLDATLIHQSITGLYETRIDLSQLGGDGGGSSGSSGSSGSSGSSGGTLNIEDEHRLHETSKEPDVSLGSTWLSDFPQAWAETGGMGLAVRQAPLIIPLKATSTPVSIKQYPMSQEARLGIKPHIQRLLDQGILVPCQSPWNTPLLPVKKPGTNDYRPVQDLREVNKRVEDIHPTVPNPYNLLSGLPPSHQWYTVLDLKDAFFCLRLHPTSQPLFAFEWRDPEMGISGQLTWTRLPQGFKNSPTLFNEALHRDLADFRIQHPDLILLQYVDDLLLAATSELDCQQGTRALLQTLGNLGYRASAKKAQICQKQVKYLGYLLKEGQRWLTEARKETVMGQPTPKTPRQLREFLGTAGFCRLWIPGFAEMAAPLYPLTKPGTLFNWGPDQQKAYQEIKQALLTAPALGLPDLTKPFELFVDEKQGYAKGVLTQKLGPWRRPVAYLSKKLDPVAAGWPPCLRMVAAIAVLTKDAGKLTMGQPLVILAPHAVEALVKQPPDRWLSNARMTHYQALLLDTDRVQFGPVVALNPATLLPLPEEGLQHNCLDILAEAHGTRPDLTDQPLPDADHTWYTDGSSLLQEGQRKAGAAVTTETEVIWAKALPAGTSAQRAELIALTQALKMAEGKKLNVYTDSRYAFATAHIHGEIYRRRGWLTSEGKEIKNKDEILALLKALFLPKRLSIIHCPGHQKGHSAEARGNRMADQAARKAAITETPDTSTLLAGKRTADGSEFEKRTADGSEFESPKKKAKVE

SEQ ID NO: 2999 - protein, 2096 aa, synthetic construct; identical to SEQ ID NO: 2719

SEQ ID NO: 3000 - protein, 2088 aa, synthetic construct
MPAAKRVKLDGGDKKYSIGLDIGTNSVGWAVITDEYKVPSKKFKVLGNTDRHSIKKNLIGALLFDSGETAEATRLKRTARRRYTRRKNRICYLQEIFSNEMAKVDDSFFHRLEESFLVEEDKKHERHPIFGNIVDEVAYHEKYPTIYHLRKKLVDSTDKADLRLIYLALAHMIKFRGHFLIEGDLNPDNSDVDKLFIQLVQTYNQLFEENPINASGVDAKAILSARLSKSRRLENLIAQLPGEKKNGLFGNLIALSLGLTPNFKSNFDLAEDAKLQLSKDTYDDDLDNLLAQIGDQYADLFLAAKNLSDAILLSDILRVNTEITKAPLSASMIKRYDEHHQDLTLLKALVRQQLPEKYKEIFFDQSKNGYAGYIDGGASQEEFYKFIKPILEKMDGTEELLVKLNREDLLRKQRTFDNGSIPHQIHLGELHAILRRQEDFYPFLKDNREKIEKILTFRIPYYVGPLARGNSRFAWMTRKSEETITPWNFEEVVDKGASAQSFIERMTNFDKNLPNEKVLPKHSLLYEYFTVYNELTKVKYVTEGMRKPAFLSGEQKKAIVDLLFKTNRKVTVKQLKEDYFKKIECFDSVEISGVEDRFNASLGTYHDLLKIIKDKDFLDNEENEDILEDIVLTLTLFEDREMIEERLKTYAHLFDDKVMKQLKRRRYTGWGRLSRKLINGIRDKQSGKTILDFLKSDGFANRNFMQLIHDDSLTFKEDIQKAQVSGQGDSLHEHIANLAGSPAIKKGILQTVKVVDELVKVMGRHKPENIVIEMARENQTTQKGQKNSRERMKRIEEGIKELGSQILKEHPVENTQLQNEKLYLYYLQNGRDMYVDQELDINRLSDYDVDHIVPQSFLKDDSIDNKVLTRSDKARGKSDNVPSEEVVKKMKNYWRQLLNAKLITQRKFDNLTKAERGGLSELDKAGFIKRQLVETRQITKHVAQILDSRMNTKYDENDKLIREVKVITLKSKLVSDFRKDFQFYKVREINNYHHAHDAYLNAVVGTALIKKYPKLESEFVYGDYKVYDVRKMIAKSEQEIGKATAKYFFYSNIMNFFKTEITLANGEIRKRPLIETNGETGEIVWDKGRDFATVRKVLSMPQVNIVKKTEVQTGGFSKESILPKRNSDKLIARKKDWDPKKYGGFDSPTVAYSVLVVAKVEKGKSKKLKSVKELLGITIMERSSFEKNPIDFLEAKGYKEVKKDLIIKLPKYSLFELENGRKRMLASAGELQKGNELALPSKYVNFLYLASHYEKLKGSPEDNEQKQLFVEQHKHYLDEIIEQISEFSKRVILADANLDKVLSAYNKHRDKPIREQAENIIHLFTLTNLGAPAAFKYFDTTIDRKRYTSTKEVLDATLIHQSITGLYETRIDLSQLGGDGGGGSGGTLNIEDEHRLHETSKEPDVSLGSTWLSDFPQAWAETGGMGLAVRQAPLIIPLKATSTPVSIKQYPMSQEARLGIKPHIQRLLDQGILVPCQSPWNTPLLPVKKPGTNDYRPVQDLREVNKRVEDIHPTVPNPYNLLSGLPPSHQWYTVLDLKDAFFCLRLHPTSQPLFAFEWRDPEMGISGQLTWTRLPQGFKNSPTLFNEALHRDLADFRIQHPDLILLQYVDDLLLAATSELDCQQGTRALLQTLGNLGYRASAKKAQICQKQVKYLGYLLKEGQRWLTEARKETVMGQPTPKTPRQLREFLGTAGFCRLWIPGFAEMAAPLYPLTKPGTLFNWGPDQQKAYQEIKQALLTAPALGLPDLTKPFELFVDEKQGYAKGVLTQKLGPWRRPVAYLSKKLDPVAAGWPPCLRMVAAIAVLTKDAGKLTMGQPLVILAPHAVEALVKQPPDRWLSNARMTHYQALLLDTDRVQFGPVVALNPATLLPLPEEGLQHNCLDILAEAHGTRPDLTDQPLPDADHTWYTDGSSLLQEGQRKAGAAVTTETEVIWAKALPAGTSAQRAELIALTQALKMAEGKKLNVYTDSRYAFATAHIHGEIYRRRGWLTSEGKEIKNKDEILALLKALFLPKRLSIIHCPGHQKGHSAEARGNRMADQAARKAAITETPDTSTLLAGKRTADGSEFEKRTADGSEFESPKKKAKVE

SEQ ID NO: 3001 - protein, 2100 aa, synthetic construct; identical to SEQ ID NO: 2725

SEQ ID NO: 3002 - protein, 2093 aa, synthetic construct; identical to SEQ ID NO: 2740

SEQ ID NO: 3003 - protein, 2094 aa, synthetic construct; identical to SEQ ID NO: 2752

SEQ ID NO: 3004 - protein, 2097 aa, synthetic construct; identical to SEQ ID NO: 2763

SEQ ID NO: 3005 - protein, 2096 aa, synthetic construct
MPAAKRVKLDGGDKKYSIGLDIGTNSVGWAVITDEYKVPSKKFKVLGNTDRHSIKKNLIGALLFDSGETAEATRLKRTARRRYTRRKNRICYLQEIFSNEMAKVDDSFFHRLEESFLVEEDKKHERHPIFGNIVDEVAYHEKYPTIYHLRKKLVDSTDKADLRLIYLALAHMIKFRGHFLIEGDLNPDNSDVDKLFIQLVQTYNQLFEENPINASGVDAKAILSARLSKSRRLENLIAQLPGEKKNGLFGNLIALSLGLTPNFKSNFDLAEDAKLQLSKDTYDDDLDNLLAQIGDQYADLFLAAKNLSDAILLSDILRVNTEITKAPLSASMIKRYDEHHQDLTLLKALVRQQLPEKYKEIFFDQSKNGYAGYIDGGASQEEFYKFIKPILEKMDGTEELLVKLNREDLLRKQRTFDNGSIPHQIHLGELHAILRRQEDFYPFLKDNREKIEKILTFRIPYYVGPLARGNSRFAWMTRKSEETITPWNFEEVVDKGASAQSFIERMTNFDKNLPNEKVLPKHSLLYEYFTVYNELTKVKYVTEGMRKPAFLSGEQKKAIVDLLFKTNRKVTVKQLKEDYFKKIECFDSVEISGVEDRFNASLGTYHDLLKIIKDKDFLDNEENEDILEDIVLTLTLFEDREMIEERLKTYAHLFDDKVMKQLKRRRYTGWGRLSRKLINGIRDKQSGKTILDFLKSDGFANRNFMQLIHDDSLTFKEDIQKAQVSGQGDSLHEHIANLAGSPAIKKGILQTVKVVDELVKVMGRHKPENIVIEMARENQTTQKGQKNSRERMKRIEEGIKELGSQILKEHPVENTQLQNEKLYLYYLQNGRDMYVDQELDINRLSDYDVDHIVPQSFLKDDSIDNKVLTRSDKARGKSDNVPSEEVVKKMKNYWRQLLNAKLITQRKFDNLTKAERGGLSELDKAGFIKRQLVETRQITKHVAQILDSRMNTKYDENDKLIREVKVITLKSKLVSDFRKDFQFYKVREINNYHHAHDAYLNAVVGTALIKKYPKLESEFVYGDYKVYDVRKMIAKSEQEIGKATAKYFFYSNIMNFFKTEITLANGEIRKRPLIETNGETGEIVWDKGRDFATVRKVLSMPQVNIVKKTEVQTGGFSKESILPKRNSDKLIARKKDWDPKKYGGFDSPTVAYSVLVVAKVEKGKSKKLKSVKELLGITIMERSSFEKNPIDFLEAKGYKEVKKDLIIKLPKYSLFELENGRKRMLASAGELQKGNELALPSKYVNFLYLASHYEKLKGSPEDNEQKQLFVEQHKHYLDEIIEQISEFSKRVILADANLDKVLSAYNKHRDKPIREQAENIIHLFTLTNLGAPAAFKYFDTTIDRKRYTSTKEVLDATLIHQSITGLYETRIDLSQLGGDGGEAAAKPAPGSSGGTLNIEDEHRLHETSKEPDVSLGSTWLSDFPQAWAETGGMGLAVRQAPLIIPLKATSTPVSIKQYPMSQEARLGIKPHIQRLLDQGILVPCQSPWNTPLLPVKKPGTNDYRPVQDLREVNKRVEDIHPTVPNPYNLLSGLPPSHQWYTVLDLKDAFFCLRLHPTSQPLFAFEWRDPEMGISGQLTWTRLPQGFKNSPTLFNEALHRDLADFRIQHPDLILLQYVDDLLLAATSELDCQQGTRALLQTLGNLGYRASAKKAQICQKQVKYLGYLLKEGQRWLTEARKETVMGQPTPKTPRQLREFLGTAGFCRLWIPGFAEMAAPLYPLTKPGTLFNWGPDQQKAYQEIKQALLTAPALGLPDLTKPFELFVDEKQGYAKGVLTQKLGPWRRPVAYLSKKLDPVAAGWPPCLRMVAAIAVLTKDAGKLTMGQPLVILAPHAVEALVKQPPDRWLSNARMTHYQALLLDTDRVQFGPVVALNPATLLPLPEEGLQHNCLDILAEAHGTRPDLTDQPLPDADHTWYTDGSSLLQEGQRKAGAAVTTETEVIWAKALPAGTSAQRAELIALTQALKMAEGKKLNVYTDSRYAFATAHIHGEIYRRRGWLTSEGKEIKNKDEILALLKALFLPKRLSIIHCPGHQKGHSAEARGNRMADQAARKAAITETPDTSTLLAGKRTADGSEFEKRTADGSEFESPKKKAKVE

SEQ ID NO: 3006 - protein, 2089 aa, synthetic construct
MPAAKRVKLDGGDKKYSIGLDIGTNSVGWAVITDEYKVPSKKFKVLGNTDRHSIKKNLIGALLFDSGETAEATRLKRTARRRYTRRKNRICYLQEIFSNEMAKVDDSFFHRLEESFLVEEDKKHERHPIFGNIVDEVAYHEKYPTIYHLRKKLVDSTDKADLRLIYLALAHMIKFRGHFLIEGDLNPDNSDVDKLFIQLVQTYNQLFEENPINASGVDAKAILSARLSKSRRLENLIAQLPGEKKNGLFGNLIALSLGLTPNFKSNFDLAEDAKLQLSKDTYDDDLDNLLAQIGDQYADLFLAAKNLSDAILLSDILRVNTEITKAPLSASMIKRYDEHHQDLTLLKALVRQQLPEKYKEIFFDQSKNGYAGYIDGGASQEEFYKFIKPILEKMDGTEELLVKLNREDLLRKQRTFDNGSIPHQIHLGELHAILRRQEDFYPFLKDNREKIEKILTFRIPYYVGPLARGNSRFAWMTRKSEETITPWNFEEVVDKGASAQSFIERMTNFDKNLPNEKVLPKHSLLYEYFTVYNELTKVKYVTEGMRKPAFLSGEQKKAIVDLLFKTNRKVTVKQLKEDYFKKIECFDSVEISGVEDRFNASLGTYHDLLKIIKDKDFLDNEENEDILEDIVLTLTLFEDREMIEERLKTYAHLFDDKVMKQLKRRRYTGWGRLSRKLINGIRDKQSGKTILDFLKSDGFANRNFMQLIHDDSLTFKEDIQKAQVSGQGDSLHEHIANLAGSPAIKKGILQTVKVVDELVKVMGRHKPENIVIEMARENQTTQKGQKNSRERMKRIEEGIKELGSQILKEHPVENTQLQNEKLYLYYLQNGRDMYVDQELDINRLSDYDVDHIVPQSFLKDDSIDNKVLTRSDKARGKSDNVPSEEVVKKMKNYWRQLLNAKLITQRKFDNLTKAERGGLSELDKAGFIKRQLVETRQITKHVAQILDSRMNTKYDENDKLIREVKVITLKSKLVSDFRKDFQFYKVREINNYHHAHDAYLNAVVGTALIKKYPKLESEFVYGDYKVYDVRKMIAKSEQEIGKATAKYFFYSNIMNFFKTEITLANGEIRKRPLIETNGETGEIVWDKGRDFATVRKVLSMPQVNIVKKTEVQTGGFSKESILPKRNSDKLIARKKDWDPKKYGGFDSPTVAYSVLVVAKVEKGKSKKLKSVKELLGITIMERSSFEKNPIDFLEAKGYKEVKKDLIIKLPKYSLFELENGRKRMLASAGELQKGNELALPSKYVNFLYLASHYEKLKGSPEDNEQKQLFVEQHKHYLDEIIEQISEFSKRVILADANLDKVLSAYNKHRDKPIREQAENIIHLFTLTNLGAPAAFKYFDTTIDRKRYTSTKEVLDATLIHQSITGLYETRIDLSQLGGDGGGGGGGGTLNIEDEHRLHETSKEPDVSLGSTWLSDFPQAWAETGGMGLAVRQAPLIIPLKATSTPVSIKQYPMSQEARLGIKPHIQRLLDQGILVPCQSPWNTPLLPVKKPGTNDYRPVQDLREVNKRVEDIHPTVPNPYNLLSGLPPSHQWYTVLDLKDAFFCLRLHPTSQPLFAFEWRDPEMGISGQLTWTRLPQGFKNSPTLFNEALHRDLADFRIQHPDLILLQYVDDLLLAATSELDCQQGTRALLQTLGNLGYRASAKKAQICQKQVKYLGYLLKEGQRWLTEARKETVMGQPTPKTPRQLREFLGTAGFCRLWIPGFAEMAAPLYPLTKPGTLFNWGPDQQKAYQEIKQALLTAPALGLPDLTKPFELFVDEKQGYAKGVLTQKLGPWRRPVAYLSKKLDPVAAGWPPCLRMVAAIAVLTKDAGKLTMGQPLVILAPHAVEALVKQPPDRWLSNARMTHYQALLLDTDRVQFGPVVALNPATLLPLPEEGLQHNCLDILAEAHGTRPDLTDQPLPDADHTWYTDGSSLLQEGQRKAGAAVTTETEVIWAKALPAGTSAQRAELIALTQALKMAEGKKLNVYTDSRYAFATAHIHGEIYRRRGWLTSEGKEIKNKDEILALLKALFLPKRLSIIHCPGHQKGHSAEARGNRMADQAARKAAITETPDTSTLLAGKRTADGSEFEKRTADGSEFESPKKKAKVE

SEQ ID NO: 3007 - protein, 2096 aa, synthetic construct; identical to SEQ ID NO: 2748

SEQ ID NO: 3008 - protein, 2090 aa, synthetic construct; identical to SEQ ID NO: 2730

SEQ ID NO: 3009 - protein, 2096 aa, synthetic construct
MPAAKRVKLDGGDKKYSIGLDIGTNSVGWAVITDEYKVPSKKFKVLGNTDRHSIKKNLIGALLFDSGETAEATRLKRTARRRYTRRKNRICYLQEIFSNEMAKVDDSFFHRLEESFLVEEDKKHERHPIFGNIVDEVAYHEKYPTIYHLRKKLVDSTDKADLRLIYLALAHMIKFRGHFLIEGDLNPDNSDVDKLFIQLVQTYNQLFEENPINASGVDAKAILSARLSKSRRLENLIAQLPGEKKNGLFGNLIALSLGLTPNFKSNFDLAEDAKLQLSKDTYDDDLDNLLAQIGDQYADLFLAAKNLSDAILLSDILRVNTEITKAPLSASMIKRYDEHHQDLTLLKALVRQQLPEKYKEIFFDQSKNGYAGYIDGGASQEEFYKFIKPILEKMDGTEELLVKLNREDLLRKQRTFDNGSIPHQIHLGELHAILRRQEDFYPFLKDNREKIEKILTFRIPYYVGPLARGNSRFAWMTRKSEETITPWNFEEVVDKGASAQSFIERMTNFDKNLPNEKVLPKHSLLYEYFTVYNELTKVKYVTEGMRKPAFLSGEQKKAIVDLLFKTNRKVTVKQLKEDYFKKIECFDSVEISGVEDRFNASLGTYHDLLKIIKDKDFLDNEENEDILEDIVLTLTLFEDREMIEERLKTYAHLFDDKVMKQLKRRRYTGWGRLSRKLINGIRDKQSGKTILDFLKSDGFANRNFMQLIHDDSLTFKEDIQKAQVSGQGDSLHEHIANLAGSPAIKKGILQTVKVVDELVKVMGRHKPENIVIEMARENQTTQKGQKNSRERMKRIEEGIKELGSQILKEHPVENTQLQNEKLYLYYLQNGRDMYVDQELDINRLSDYDVDHIVPQSFLKDDSIDNKVLTRSDKARGKSDNVPSEEVVKKMKNYWRQLLNAKLITQRKFDNLTKAERGGLSELDKAGFIKRQLVETRQITKHVAQILDSRMNTKYDENDKLIREVKVITLKSKLVSDFRKDFQFYKVREINNYHHAHDAYLNAVVGTALIKKYPKLESEFVYGDYKVYDVRKMIAKSEQEIGKATAKYFFYSNIMNFFKTEITLANGEIRKRPLIETNGETGEIVWDKGRDFATVRKVLSMPQVNIVKKTEVQTGGFSKESILPKRNSDKLIARKKDWDPKKYGGFDSPTVAYSVLVVAKVEKGKSKKLKSVKELLGITIMERSSFEKNPIDFLEAKGYKEVKKDLIIKLPKYSLFELENGRKRMLASAGELQKGNELALPSKYVNFLYLASHYEKLKGSPEDNEQKQLFVEQHKHYLDEIIEQISEFSKRVILADANLDKVLSAYNKHRDKPIREQAENIIHLFTLTNLGAPAAFKYFDTTIDRKRYTSTKEVLDATLIHQSITGLYETRIDLSQLGGDGGPAPEAAAKGGGGGTLNIEDEHRLHETSKEPDVSLGSTWLSDFPQAWAETGGMGLAVRQAPLIIPLKATSTPVSIKQYPMSQEARLGIKPHIQRLLDQGILVPCQSPWNTPLLPVKKPGTNDYRPVQDLREVNKRVEDIHPTVPNPYNLLSGLPPSHQWYTVLDLKDAFFCLRLHPTSQPLFAFEWRDPEMGISGQLTWTRLPQGFKNSPTLFNEALHRDLADFRIQHPDLILLQYVDDLLLAATSELDCQQGTRALLQTLGNLGYRASAKKAQICQKQVKYLGYLLKEGQRWLTEARKETVMGQPTPKTPRQLREFLGTAGFCRLWIPGFAEMAAPLYPLTKPGTLFNWGPDQQKAYQEIKQALLTAPALGLPDLTKPFELFVDEKQGYAKGVLTQKLGPWRRPVAYLSKKLDPVAAGWPPCLRMVAAIAVLTKDAGKLTMGQPLVILAPHAVEALVKQPPDRWLSNARMTHYQALLLDTDRVQFGPVVALNPATLLPLPEEGLQHNCLDILAEAHGTRPDLTDQPLPDADHTWYTDGSSLLQEGQRKAGAAVTTETEVIWAKALPAGTSAQRAELIALTQALKMAEGKKLNVYTDSRYAFATAHIHGEIYRRRGWLTSEGKEIKNKDEILALLKALFLPKRLSIIHCPGHQKGHSAEARGNRMADQAARKAAITETPDTSTLLAGKRTADGSEFEKRTADGSEFESPKKKAKVE

SEQ ID NO: 3010 - protein, 2101 aa, synthetic construct
MPAAKRVKLDGGDKKYSIGLDIGTNSVGWAVITDEYKVPSKKFKVLGNTDRHSIKKNLIGALLFDSGETAEATRLKRTARRRYTRRKNRICYLQEIFSNEMAKVDDSFFHRLEESFLVEEDKKHERHPIFGNIVDEVAYHEKYPTIYHLRKKLVDSTDKADLRLIYLALAHMIKFRGHFLIEGDLNPDNSDVDKLFIQLVQTYNQLFEENPINASGVDAKAILSARLSKSRRLENLIAQLPGEKKNGLFGNLIALSLGLTPNFKSNFDLAEDAKLQLSKDTYDDDLDNLLAQIGDQYADLFLAAKNLSDAILLSDILRVNTEITKAPLSASMIKRYDEHHQDLTLLKALVRQQLPEKYKEIFFDQSKNGYAGYIDGGASQEEFYKFIKPILEKMDGTEELLVKLNREDLLRKQRTFDNGSIPHQIHLGELHAILRRQEDFYPFLKDNREKIEKILTFRIPYYVGPLARGNSRFAWMTRKSEETITPWNFEEVVDKGASAQSFIERMTNFDKNLPNEKVLPKHSLLYEYFTVYNELTKVKYVTEGMRKPAFLSGEQKKAIVDLLFKTNRKVTVKQLKEDYFKKIECFDSVEISGVEDRFNASLGTYHDLLKIIKDKDFLDNEENEDILEDIVLTLTLFEDREMIEERLKTYAHLFDDKVMKQLKRRRYTGWGRLSRKLINGIRDKQSGKTILDFLKSDGFANRNFMQLIHDDSLTFKEDIQKAQVSGQGDSLHEHIANLAGSPAIKKGILQTVKVVDELVKVMGRHKPENIVIEMARENQTTQKGQKNSRERMKRIEEGIKELGSQILKEHPVENTQLQNEKLYLYYLQNGRDMYVDQELDINRLSDYDVDHIVPQSFLKDDSIDNKVLTRSDKARGKSDNVPSEEVVKKMKNYWRQLLNAKLITQRKFDNLTKAERGGLSELDKAGFIKRQLVETRQITKHVAQILDSRMNTKYDENDKLIREVKVITLKSKLVSDFRKDFQFYKVREINNYHHAHDAYLNAVVGTALIKKYPKLESEFVYGDYKVYDVRKMIAKSEQEIGKATAKYFFYSNIMNFFKTEITLANGEIRKRPLIETNGETGEIVWDKGRDFATVRKVLSMPQVNIVKKTEVQTGGFSKESILPKRNSDKLIARKKDWDPKKYGGFDSPTVAYSVLVVAKVEKGKSKKLKSVKELLGITIMERSSFEKNPIDFLEAKGYKEVKKDLIIKLPKYSLFELENGRKRMLASAGELQKGNELALPSKYVNFLYLASHYEKLKGSPEDNEQKQLFVEQHKHYLDEIIEQISEFSKRVILADANLDKVLSAYNKHRDKPIREQAENIIHLFTLTNLGAPAAFKYFDTTIDRKRYTSTKEVLDATLIHQSITGLYETRIDLSQLGGDGGSGSETPGTSESATPESGGTLNIEDEHRLHETSKEPDVSLGSTWLSDFPQAWAETGGMGLAVRQAPLIIPLKATSTPVSIKQYPMSQEARLGIKPHIQRLLDQGILVPCQSPWNTPLLPVKKPGTNDYRPVQDLREVNKRVEDIHPTVPNPYNLLSGLPPSHQWYTVLDLKDAFFCLRLHPTSQPLFAFEWRDPEMGISGQLTWTRLPQGFKNSPTLFNEALHRDLADFRIQHPDLILLQYVDDLLLAATSELDCQQGTRALLQTLGNLGYRASAKKAQICQKQVKYLGYLLKEGQRWLTEARKETVMGQPTPKTPRQLREFLGTAGFCRLWIPGFAEMAAPLYPLTKPGTLFNWGPDQQKAYQEIKQALLTAPALGLPDLTKPFELFVDEKQGYAKGVLTQKLGPWRRPVAYLSKKLDPVAAGWPPCLRMVAAIAVLTKDAGKLTMGQPLVILAPHAVEALVKQPPDRWLSNARMTHYQALLLDTDRVQFGPVVALNPATLLPLPEEGLQHNCLDILAEAHGTRPDLTDQPLPDADHTWYTDGSSLLQEGQRKAGAAVTTETEVIWAKALPAGTSAQRAELIALTQALKMAEGKKLNVYTDSRYAFATAHIHGEIYRRRGWLTSEGKEIKNKDEILALLKALFLPKRLSIIHCPGHQKGHSAEARGNRMADQAARKAAITETPDTSTLLAGKRTADGSEFEKRTADGSEFESPKKKAKVE

SEQ ID NO: 3011 - protein, 2091 aa, synthetic construct
MPAAKRVKLDGGDKKYSIGLDIGTNSVGWAVITDEYKVPSKKFKVLGNTDRHSIKKNLIGALLFDSGETAEATRLKRTARRRYTRRKNRICYLQEIFSNEMAKVDDSFFHRLEESFLVEEDKKHERHPIFGNIVDEVAYHEKYPTIYHLRKKLVDSTDKADLRLIYLALAHMIKFRGHFLIEGDLNPDNSDVDKLFIQLVQTYNQLFEENPINASGVDAKAILSARLSKSRRLENLIAQLPGEKKNGLFGNLIALSLGLTPNFKSNFDLAEDAKLQLSKDTYDDDLDNLLAQIGDQYADLFLAAKNLSDAILLSDILRVNTEITKAPLSASMIKRYDEHHQDLTLLKALVRQQLPEKYKEIFFDQSKNGYAGYIDGGASQEEFYKFIKPILEKMDGTEELLVKLNREDLLRKQRTFDNGSIPHQIHLGELHAILRRQEDFYPFLKDNREKIEKILTFRIPYYVGPLARGNSRFAWMTRKSEETITPWNFEEVVDKGASAQSFIERMTNFDKNLPNEKVLPKHSLLYEYFTVYNELTKVKYVTEGMRKPAFLSGEQKKAIVDLLFKTNRKVTVKQLKEDYFKKIECFDSVEISGVEDRFNASLGTYHDLLKIIKDKDFLDNEENEDILEDIVLTLTLFEDREMIEERLKTYAHLFDDKVMKQLKRRRYTGWGRLSRKLINGIRDKQSGKTILDFLKSDGFANRNFMQLIHDDSLTFKEDIQKAQVSGQGDSLHEHIANLAGSPAIKKGILQTVKVVDELVKVMGRHKPENIVIEMARENQTTQKGQKNSRERMKRIEEGIKELGSQILKEHPVENTQLQNEKLYLYYLQNGRDMYVDQELDINRLSDYDVDHIVPQSFLKDDSIDNKVLTRSDKARGKSDNVPSEEVVKKMKNYWRQLLNAKLITQRKFDNLTKAERGGLSELDKAGFIKRQLVETRQITKHVAQILDSRMNTKYDENDKLIREVKVITLKSKLVSDFRKDFQFYKVREINNYHHAHDAYLNAVVGTALIKKYPKLESEFVYGDYKVYDVRKMIAKSEQEIGKATAKYFFYSNIMNFFKTEITLANGEIRKRPLIETNGETGEIVWDKGRDFATVRKVLSMPQVNIVKKTEVQTGGFSKESILPKRNSDKLIARKKDWDPKKYGGFDSPTVAYSVLVVAKVEKGKSKKLKSVKELLGITIMERSSFEKNPIDFLEAKGYKEVKKDLIIKLPKYSLFELENGRKRMLASAGELQKGNELALPSKYVNFLYLASHYEKLKGSPEDNEQKQLFVEQHKHYLDEIIEQISEFSKRVILADANLDKVLSAYNKHRDKPIREQAENIIHLFTLTNLGAPAAFKYFDTTIDRKRYTSTKEVLDATLIHQSITGLYETRIDLSQLGGDGGGGSGSSGGTLNIEDEHRLHETSKEPDVSLGSTWLSDFPQAWAETGGMGLAVRQAPLIIPLKATSTPVSIKQYPMSQEARLGIKPHIQRLLDQGILVPCQSPWNTPLLPVKKPGTNDYRPVQDLREVNKRVEDIHPTVPNPYNLLSGLPPSHQWYTVLDLKDAFFCLRLHPTSQPLFAFEWRDPEMGISGQLTWTRLPQGFKNSPTLFNEALHRDLADFRIQHPDLILLQYVDDLLLAATSELDCQQGTRALLQTLGNLGYRASAKKAQICQKQVKYLGYLLKEGQRWLTEARKETVMGQPTPKTPRQLREFLGTAGFCRLWIPGFAEMAAPLYPLTKPGTLFNWGPDQQKAYQEIKQALLTAPALGLPDLTKPFELFVDEKQGYAKGVLTQKLGPWRRPVAYLSKKLDPVAAGWPPCLRMVAAIAVLTKDAGKLTMGQPLVILAPHAVEALVKQPPDRWLSNARMTHYQALLLDTDRVQFGPVVALNPATLLPLPEEGLQHNCLDILAEAHGTRPDLTDQPLPDADHTWYTDGSSLLQEGQRKAGAAVTTETEVIWAKALPAGTSAQRAELIALTQALKMAEGKKLNVYTDSRYAFATAHIHGEIYRRRGWLTSEGKEIKNKDEILALLKALFLPKRLSIIHCPGHQKGHSAEARGNRMADQAARKAAITETPDTSTLLAGKRTADGSEFEKRTADGSEFESPKKKAKVE

SEQ ID NO: 3012 - protein, 2096 aa, synthetic construct; identical to SEQ ID NO: 2758

SEQ ID NO: 3013 - protein, 2094 aa, synthetic construct
MPAAKRVKLDGGDKKYSIGLDIGTNSVGWAVITDEYKVPSKKFKVLGNTDRHSIKKNLIGALLFDSGETAEATRLKRTARRRYTRRKNRICYLQEIFSNEMAKVDDSFFHRLEESFLVEEDKKHERHPIFGNIVDEVAYHEKYPTIYHLRKKLVDSTDKADLRLIYLALAHMIKFRGHFLIEGDLNPDNSDVDKLFIQLVQTYNQLFEENPINASGVDAKAILSARLSKSRRLENLIAQLPGEKKNGLFGNLIALSLGLTPNFKSNFDLAEDAKLQLSKDTYDDDLDNLLAQIGDQYADLFLAAKNLSDAILLSDILRVNTEITKAPLSASMIKRYDEHHQDLTLLKALVRQQLPEKYKEIFFDQSKNGYAGYIDGGASQEEFYKFIKPILEKMDGTEELLVKLNREDLLRKQRTFDNGSIPHQIHLGELHAILRRQEDFYPFLKDNREKIEKILTFRIPYYVGPLARGNSRFAWMTRKSEETITPWNFEEVVDKGASAQSFIERMTNFDKNLPNEKVLPKHSLLYEYFTVYNELTKVKYVTEGMRKPAFLSGEQKKAIVDLLFKTNRKVTVKQLKEDYFKKIECFDSVEISGVEDRFNASLGTYHDLLKIIKDKDFLDNEENEDILEDIVLTLTLFEDREMIEERLKTYAHLFDDKVMKQLKRRRYTGWGRLSRKLINGIRDKQSGKTILDFLKSDGFANRNFMQLIHDDSLTFKEDIQKAQVSGQGDSLHEHIANLAGSPAIKKGILQTVKVVDELVKVMGRHKPENIVIEMARENQTTQKGQKNSRERMKRIEEGIKELGSQILKEHPVENTQLQNEKLYLYYLQNGRDMYVDQELDINRLSDYDVDHIVPQSFLKDDSIDNKVLTRSDKARGKSDNVPSEEVVKKMKNYWRQLLNAKLITQRKFDNLTKAERGGLSELDKAGFIKRQLVETRQITKHVAQILDSRMNTKYDENDKLIREVKVITLKSKLVSDFRKDFQFYKVREINNYHHAHDAYLNAVVGTALIKKYPKLESEFVYGDYKVYDVRKMIAKSEQEIGKATAKYFFYSNIMNFFKTEITLANGEIRKRPLIETNGETGEIVWDKGRDFATVRKVLSMPQVNIVKKTEVQTGGFSKESILPKRNSDKLIARKKDWDPKKYGGFDSPTVAYSVLVVAKVEKGKSKKLKSVKELLGITIMERSSFEKNPIDFLEAKGYKEVKKDLIIKLPKYSLFELENGRKRMLASAGELQKGNELALPSKYVNFLYLASHYEKLKGSPEDNEQKQLFVEQHKHYLDEIIEQISEFSKRVILADANLDKVLSAYNKHRDKPIREQAENIIHLFTLTNLGAPAAFKYFDTTIDRKRYTSTKEVLDATLIHQSITGLYETRIDLSQLGGDGGPAPGGSGGGGGTLNIEDEHRLHETSKEPDVSLGSTWLSDFPQAWAETGGMGLAVRQAPLIIPLKATSTPVSIKQYPMSQEARLGIKPHIQRLLDQGILVPCQSPWNTPLLPVKKPGTNDYRPVQDLREVNKRVEDIHPTVPNPYNLLSGLPPSHQWYTVLDLKDAFFCLRLHPTSQPLFAFEWRDPEMGISGQLTWTRLPQGFKNSPTLFNEALHRDLADFRIQHPDLILLQYVDDLLLAATSELDCQQGTRALLQTLGNLGYRASAKKAQICQKQVKYLGYLLKEGQRWLTEARKETVMGQPTPKTPRQLREFLGTAGFCRLWIPGFAEMAAPLYPLTKPGTLFNWGPDQQKAYQEIKQALLTAPALGLPDLTKPFELFVDEKQGYAKGVLTQKLGPWRRPVAYLSKKLDPVAAGWPPCLRMVAAIAVLTKDAGKLTMGQPLVILAPHAVEALVKQPPDRWLSNARMTHYQALLLDTDRVQFGPVVALNPATLLPLPEEGLQHNCLDILAEAHGTRPDLTDQPLPDADHTWYTDGSSLLQEGQRKAGAAVTTETEVIWAKALPAGTSAQRAELIALTQALKMAEGKKLNVYTDSRYAFATAHIHGEIYRRRGWLTSEGKEIKNKDEILALLKALFLPKRLSIIHCPGHQKGHSAEARGNRMADQAARKAAITETPDTSTLLAGKRTADGSEFEKRTADGSEFESPKKKAKVE

SEQ ID NO: 3014 - protein, 2096 aa, synthetic construct; identical to SEQ ID NO: 2714

SEQ ID NO: 3015 - protein, 2093 aa, synthetic construct; identical to SEQ ID NO: 2718

SEQ ID NO: 3016 - protein, 2094 aa, synthetic construct; identical to SEQ ID NO: 2762

SEQ ID NO: 3017 - protein, 2095 aa, synthetic construct; identical to SEQ ID NO: 2749

SEQ ID NO: 3018 - protein, 2096 aa, synthetic construct; identical to SEQ ID NO: 2721

SEQ ID NO: 3019 - protein, 2096 aa, synthetic construct; identical to SEQ ID NO: 2747

SEQ ID NO: 3020 - protein, 2096 aa, synthetic construct; identical to SEQ ID NO: 2755

SEQ ID NO: 3021 - protein, 2096 aa, synthetic construct
MPAAKRVKLDGGDKKYSIGLDIGTNSVGWAVITDEYKVPSKKFKVLGNTDRHSIKKNLIGALLFDSGETAEATRLKRTARRRYTRRKNRICYLQEIFSNEMAKVDDSFFHRLEESFLVEEDKKHERHPIFGNIVDEVAYHEKYPTIYHLRKKLVDSTDKADLRLIYLALAHMIKFRGHFLIEGDLNPDNSDVDKLFIQLVQTYNQLFEENPINASGVDAKAILSARLSKSRRLENLIAQLPGEKKNGLFGNLIALSLGLTPNFKSNFDLAEDAKLQLSKDTYDDDLDNLLAQIGDQYADLFLAAKNLSDAILLSDILRVNTEITKAPLSASMIKRYDEHHQDLTLLKALVRQQLPEKYKEIFFDQSKNGYAGYIDGGASQEEFYKFIKPILEKMDGTEELLVKLNREDLLRKQRTFDNGSIPHQIHLGELHAILRRQEDFYPFLKDNREKIEKILTFRIPYYVGPLARGNSRFAWMTRKSEETITPWNFEEVVDKGASAQSFIERMTNFDKNLPNEKVLPKHSLLYEYFTVYNELTKVKYVTEGMRKPAFLSGEQKKAIVDLLFKTNRKVTVKQLKEDYFKKIECFDSVEISGVEDRFNASLGTYHDLLKIIKDKDFLDNEENEDILEDIVLTLTLFEDREMIEERLKTYAHLFDDKVMKQLKRRRYTGWGRLSRKLINGIRDKQSGKTILDFLKSDGFANRNFMQLIHDDSLTFKEDIQKAQVSGQGDSLHEHIANLAGSPAIKKGILQTVKVVDELVKVMGRHKPENIVIEMARENQTTQKGQKNSRERMKRIEEGIKELGSQILKEHPVENTQLQNEKLYLYYLQNGRDMYVDQELDINRLSDYDVDHIVPQSFLKDDSIDNKVLTRSDKARGKSDNVPSEEVVKKMKNYWRQLLNAKLITQRKFDNLTKAERGGLSELDKAGFIKRQLVETRQITKHVAQILDSRMNTKYDENDKLIREVKVITLKSKLVSDFRKDFQFYKVREINNYHHAHDAYLNAVVGTALIKKYPKLESEFVYGDYKVYDVRKMIAKSEQEIGKATAKYFFYSNIMNFFKTEITLANGEIRKRPLIETNGETGEIVWDKGRDFATVRKVLSMPQVNIVKKTEVQTGGFSKESILPKRNSDKLIARKKDWDPKKYGGFDSPTVAYSVLVVAKVEKGKSKKLKSVKELLGITIMERSSFEKNPIDFLEAKGYKEVKKDLIIKLPKYSLFELENGRKRMLASAGELQKGNELALPSKYVNFLYLASHYEKLKGSPEDNEQKQLFVEQHKHYLDEIIEQISEFSKRVILADANLDKVLSAYNKHRDKPIREQAENIIHLFTLTNLGAPAAFKYFDTTIDRKRYTSTKEVLDATLIHQSITGLYETRIDLSQLGGDGGEAAAKGSSGGSGGTLNIEDEHRLHETSKEPDVSLGSTWLSDFPQAWAETGGMGLAVRQAPLIIPLKATSTPVSIKQYPMSQEARLGIKPHIQRLLDQGILVPCQSPWNTPLLPVKKPGTNDYRPVQDLREVNKRVEDIHPTVPNPYNLLSGLPPSHQWYTVLDLKDAFFCLRLHPTSQPLFAFEWRDPEMGISGQLTWTRLPQGFKNSPTLFNEALHRDLADFRIQHPDLILLQYVDDLLLAATSELDCQQGTRALLQTLGNLGYRASAKKAQICQKQVKYLGYLLKEGQRWLTEARKETVMGQPTPKTPRQLREFLGTAGFCRLWIPGFAEMAAPLYPLTKPGTLFNWGPDQQKAYQEIKQALLTAPALGLPDLTKPFELFVDEKQGYAKGVLTQKLGPWRRPVAYLSKKLDPVAAGWPPCLRMVAAIAVLTKDAGKLTMGQPLVILAPHAVEALVKQPPDRWLSNARMTHYQALLLDTDRVQFGPVVALNPATLLPLPEEGLQHNCLDILAEAHGTRPDLTDQPLPDADHTWYTDGSSLLQEGQRKAGAAVTTETEVIWAKALPAGTSAQRAELIALTQALKMAEGKKLNVYTDSRYAFATAHIHGEIYRRRGWLTSEGKEIKNKDEILALLKALFLPKRLSIIHCPGHQKGHSAEARGNRMADQAARKAAITETPDTSTLLAGKRTADGSEFEKRTADGSEFESPKKKAKVE

SEQ ID NO: 3022 - protein, 2094 aa, synthetic construct
MPAAKRVKLDGGDKKYSIGLDIGTNSVGWAVITDEYKVPSKKFKVLGNTDRHSIKKNLIGALLFDSGETAEATRLKRTARRRYTRRKNRICYLQEIFSNEMAKVDDSFFHRLEESFLVEEDKKHERHPIFGNIVDEVAYHEKYPTIYHLRKKLVDSTDKADLRLIYLALAHMIKFRGHFLIEGDLNPDNSDVDKLFIQLVQTYNQLFEENPINASGVDAKAILSARLSKSRRLENLIAQLPGEKKNGLFGNLIALSLGLTPNFKSNFDLAEDAKLQLSKDTYDDDLDNLLAQIGDQYADLFLAAKNLSDAILLSDILRVNTEITKAPLSASMIKRYDEHHQDLTLLKALVRQQLPEKYKEIFFDQSKNGYAGYIDGGASQEEFYKFIKPILEKMDGTEELLVKLNREDLLRKQRTFDNGSIPHQIHLGELHAILRRQEDFYPFLKDNREKIEKILTFRIPYYVGPLARGNSRFAWMTRKSEETITPWNFEEVVDKGASAQSFIERMTNFDKNLPNEKVLPKHSLLYEYFTVYNELTKVKYVTEGMRKPAFLSGEQKKAIVDLLFKTNRKVTVKQLKEDYFKKIECFDSVEISGVEDRFNASLGTYHDLLKIIKDKDFLDNEENEDILEDIVLTLTLFEDREMIEERLKTYAHLFDDKVMKQLKRRRYTGWGRLSRKLINGIRDKQSGKTILDFLKSDGFANRNFMQLIHDDSLTFKEDIQKAQVSGQGDSLHEHIANLAGSPAIKKGILQTVKVVDELVKVMGRHKPENIVIEMARENQTTQKGQKNSRERMKRIEEGIKELGSQILKEHPVENTQLQNEKLYLYYLQNGRDMYVDQELDINRLSDYDVDHIVPQSFLKDDSIDNKVLTRSDKARGKSDNVPSEEVVKKMKNYWRQLLNAKLITQRKFDNLTKAERGGLSELDKAGFIKRQLVETRQITKHVAQILDSRMNTKYDENDKLIREVKVITLKSKLVSDFRKDFQFYKVREINNYHHAHDAYLNAVVGTALIKKYPKLESEFVYGDYKVYDVRKMIAKSEQEIGKATAKYFFYSNIMNFFKTEITLANGEIRKRPLIETNGETGEIVWDKGRDFATVRKVLSMPQVNIVKKTEVQTGGFSKESILPKRNSDKLIARKKDWDPKKYGGFDSPTVAYSVLVVAKVEKGKSKKLKSVKELLGITIMERSSFEKNPIDFLEAKGYKEVKKDLIIKLPKYSLFELENGRKRMLASAGELQKGNELALPSKYVNFLYLASHYEKLKGSPEDNEQKQLFVEQHKHYLDEIIEQISEFSKRVILADANLDKVLSAYNKHRDKPIREQAENIIHLFTLTNLGAPAAFKYFDTTIDRKRYTSTKEVLDATLIHQSITGLYETRIDLSQLGGDGGGGGGSSGGSGGTLNIEDEHRLHETSKEPDVSLGSTWLSDFPQAWAETGGMGLAVRQAPLIIPLKATSTPVSIKQYPMSQEARLGIKPHIQRLLDQGILVPCQSPWNTPLLPVKKPGTNDYRPVQDLREVNKRVEDIHPTVPNPYNLLSGLPPSHQWYTVLDLKDAFFCLRLHPTSQPLFAFEWRDPEMGISGQLTWTRLPQGFKNSPTLFNEALHRDLADFRIQHPDLILLQYVDDLLLAATSELDCQQGTRALLQTLGNLGYRASAKKAQICQKQVKYLGYLLKEGQRWLTEARKETVMGQPTPKTPRQLREFLGTAGFCRLWIPGFAEMAAPLYPLTKPGTLFNWGPDQQKAYQEIKQALLTAPALGLPDLTKPFELFVDEKQGYAKGVLTQKLGPWRRPVAYLSKKLDPVAAGWPPCLRMVAAIAVLTKDAGKLTMGQPLVILAPHAVEALVKQPPDRWLSNARMTHYQALLLDTDRVQFGPVVALNPATLLPLPEEGLQHNCLDILAEAHGTRPDLTDQPLPDADHTWYTDGSSLLQEGQRKAGAAVTTETEVIWAKALPAGTSAQRAELIALTQALKMAEGKKLNVYTDSRYAFATAHIHGEIYRRRGWLTSEGKEIKNKDEILALLKALFLPKRLSIIHCPGHQKGHSAEARGNRMADQAARKAAITETPDTSTLLAGKRTADGSEFEKRTADGSEFESPKKKAKVE

SEQ ID NO: 3023 - protein, 2096 aa, synthetic construct; identical to SEQ ID NO: 2759

SEQ ID NO: 3024 - protein, 2092 aa, synthetic construct
MPAAKRVKLDGGDKKYSIGLDIGTNSVGWAVITDEYKVPSKKFKVLGNTDRHSIKKNLIGALLFDSGETAEATRLKRTARRRYTRRKNRICYLQEIFSNEMAKVDDSFFHRLEESFLVEEDKKHERHPIFGNIVDEVAYHEKYPTIYHLRKKLVDSTDKADLRLIYLALAHMIKFRGHFLIEGDLNPDNSDVDKLFIQLVQTYNQLFEENPINASGVDAKAILSARLSKSRRLENLIAQLPGEKKNGLFGNLIALSLGLTPNFKSNFDLAEDAKLQLSKDTYDDDLDNLLAQIGDQYADLFLAAKNLSDAILLSDILRVNTEITKAPLSASMIKRYDEHHQDLTLLKALVRQQLPEKYKEIFFDQSKNGYAGYIDGGASQEEFYKFIKPILEKMDGTEELLVKLNREDLLRKQRTFDNGSIPHQIHLGELHAILRRQEDFYPFLKDNREKIEKILTFRIPYYVGPLARGNSRFAWMTRKSEETITPWNFEEVVDKGASAQSFIERMTNFDKNLPNEKVLPKHSLLYEYFTVYNELTKVKYVTEGMRKPAFLSGEQKKAIVDLLFKTNRKVTVKQLKEDYFKKIECFDSVEISGVEDRFNASLGTYHDLLKIIKDKDFLDNEENEDILEDIVLTLTLFEDREMIEERLKTYAHLFDDKVMKQLKRRRYTGWGRLSRKLINGIRDKQSGKTILDFLKSDGFANRNFMQLIHDDSLTFKEDIQKAQVSGQGDSLHEHIANLAGSPAIKKGILQTVKVVDELVKVMGRHKPENIVIEMARENQTTQKGQKNSRERMKRIEEGIKELGSQILKEHPVENTQLQNEKLYLYYLQNGRDMYVDQELDINRLSDYDVDHIVPQSFLKDDSIDNKVLTRSDKARGKSDNVPSEEVVKKMKNYWRQLLNAKLITQRKFDNLTKAERGGLSELDKAGFIKRQLVETRQITKHVAQILDSRMNTKYDENDKLIREVKVITLKSKLVSDFRKDFQFYKVREINNYHHAHDAYLNAVVGTALIKKYPKLESEFVYGDYKVYDVRKMIAKSEQEIGKATAKYFFYSNIMNFFKTEITLANGEIRKRPLIETNGETGEIVWDKGRDFATVRKVLSMPQVNIVKKTEVQTGGFSKESILPKRNSDKLIARKKDWDPKKYGGFDSPTVAYSVLVVAKVEKGKSKKLKSVKELLGITIMERSSFEKNPIDFLEAKGYKEVKKDLIIKLPKYSLFELENGRKRMLASAGELQKGNELALPSKYVNFLYLASHYEKLKGSPEDNEQKQLFVEQHKHYLDEIIEQISEFSKRVILADANLDKVLSAYNKHRDKPIREQAENIIHLFTLTNLGAPAAFKYFDTTIDRKRYTSTKEVLDATLIHQSITGLYETRIDLSQLGGDGGGGGGGGGGGTLNIEDEHRLHETSKEPDVSLGSTWLSDFPQAWAETGGMGLAVRQAPLIIPLKATSTPVSIKQYPMSQEARLGIKPHIQRLLDQGILVPCQSPWNTPLLPVKKPGTNDYRPVQDLREVNKRVEDIHPTVPNPYNLLSGLPPSHQWYTVLDLKDAFFCLRLHPTSQPLFAFEWRDPEMGISGQLTWTRLPQGFKNSPTLFNEALHRDLADFRIQHPDLILLQYVDDLLLAATSELDCQQGTRALLQTLGNLGYRASAKKAQICQKQVKYLGYLLKEGQRWLTEARKETVMGQPTPKTPRQLREFLGTAGFCRLWIPGFAEMAAPLYPLTKPGTLFNWGPDQQKAYQEIKQALLTAPALGLPDLTKPFELFVDEKQGYAKGVLTQKLGPWRRPVAYLSKKLDPVAAGWPPCLRMVAAIAVLTKDAGKLTMGQPLVILAPHAVEALVKQPPDRWLSNARMTHYQALLLDTDRVQFGPVVALNPATLLPLPEEGLQHNCLDILAEAHGTRPDLTDQPLPDADHTWYTDGSSLLQEGQRKAGAAVTTETEVIWAKALPAGTSAQRAELIALTQALKMAEGKKLNVYTDSRYAFATAHIHGEIYRRRGWLTSEGKEIKNKDEILALLKALFLPKRLSIIHCPGHQKGHSAEARGNRMADQAARKAAITETPDTSTLLAGKRTADGSEFEKRTADGSEFESPKKKAKVE

SEQ ID NO: 3025 - protein, 2094 aa, synthetic construct; identical to SEQ ID NO: 2742

SEQ ID NO: 3026 - protein, 2094 aa, synthetic construct; identical to SEQ ID NO: 2715

SEQ ID NO: 3027 - protein, 2097 aa, synthetic construct; identical to SEQ ID NO: 2728

SEQ ID NO: 3028 - protein, 2091 aa, synthetic construct; identical to SEQ ID NO: 2743

SEQ ID NO: 3029 - protein, 2090 aa, synthetic construct
MPAAKRVKLDGGDKKYSIGLDIGTNSVGWAVITDEYKVPSKKFKVLGNTDRHSIKKNLIGALLFDSGETAEATRLKRTARRRYTRRKNRICYLQEIFSNEMAKVDDSFFHRLEESFLVEEDKKHERHPIFGNIVDEVAYHEKYPTIYHLRKKLVDSTDKADLRLIYLALAHMIKFRGHFLIEGDLNPDNSDVDKLFIQLVQTYNQLFEENPINASGVDAKAILSARLSKSRRLENLIAQLPGEKKNGLFGNLIALSLGLTPNFKSNFDLAEDAKLQLSKDTYDDDLDNLLAQIGDQYADLFLAAKNLSDAILLSDILRVNTEITKAPLSASMIKRYDEHHQDLTLLKALVRQQLPEKYKEIFFDQSKNGYAGYIDGGASQEEFYKFIKPILEKMDGTEELLVKLNREDLLRKQRTFDNGSIPHQIHLGELHAILRRQEDFYPFLKDNREKIEKILTFRIPYYVGPLARGNSRFAWMTRKSEETITPWNFEEVVDKGASAQSFIERMTNFDKNLPNEKVLPKHSLLYEYFTVYNELTKVKYVTEGMRKPAFLSGEQKKAIVDLLFKTNRKVTVKQLKEDYFKKIECFDSVEISGVEDRFNASLGTYHDLLKIIKDKDFLDNEENEDILEDIVLTLTLFEDREMIEERLKTYAHLFDDKVMKQLKRRRYTGWGRLSRKLINGIRDKQSGKTILDFLKSDGFANRNFMQLIHDDSLTFKEDIQKAQVSGQGDSLHEHIANLAGSPAIKKGILQTVKVVDELVKVMGRHKPENIVIEMARENQTTQKGQKNSRERMKRIEEGIKELGSQILKEHPVENTQLQNEKLYLYYLQNGRDMYVDQELDINRLSDYDVDHIVPQSFLKDDSIDNKVLTRSDKARGKSDNVPSEEVVKKMKNYWRQLLNAKLITQRKFDNLTKAERGGLSELDKAGFIKRQLVETRQITKHVAQILDSRMNTKYDENDKLIREVKVITLKSKLVSDFRKDFQFYKVREINNYHHAHDAYLNAVVGTALIKKYPKLESEFVYGDYKVYDVRKMIAKSEQEIGKATAKYFFYSNIMNFFKTEITLANGEIRKRPLIETNGETGEIVWDKGRDFATVRKVLSMPQVNIVKKTEVQTGGFSKESILPKRNSDKLIARKKDWDPKKYGGFDSPTVAYSVLVVAKVEKGKSKKLKSVKELLGITIMERSSFEKNPIDFLEAKGYKEVKKDLIIKLPKYSLFELENGRKRMLASAGELQKGNELALPSKYVNFLYLASHYEKLKGSPEDNEQKQLFVEQHKHYLDEIIEQISEFSKRVILADANLDKVLSAYNKHRDKPIREQAENIIHLFTLTNLGAPAAFKYFDTTIDRKRYTSTKEVLDATLIHQSITGLYETRIDLSQLGGDGGPAPAPGGTLNIEDEHRLHETSKEPDVSLGSTWLSDFPQAWAETGGMGLAVRQAPLIIPLKATSTPVSIKQYPMSQEARLGIKPHIQRLLDQGILVPCQSPWNTPLLPVKKPGTNDYRPVQDLREVNKRVEDIHPTVPNPYNLLSGLPPSHQWYTVLDLKDAFFCLRLHPTSQPLFAFEWRDPEMGISGQLTWTRLPQGFKNSPTLFNEALHRDLADFRIQHPDLILLQYVDDLLLAATSELDCQQGTRALLQTLGNLGYRASAKKAQICQKQVKYLGYLLKEGQRWLTEARKETVMGQPTPKTPRQLREFLGTAGFCRLWIPGFAEMAAPLYPLTKPGTLFNWGPDQQKAYQEIKQALLTAPALGLPDLTKPFELFVDEKQGYAKGVLTQKLGPWRRPVAYLSKKLDPVAAGWPPCLRMVAAIAVLTKDAGKLTMGQPLVILAPHAVEALVKQPPDRWLSNARMTHYQALLLDTDRVQFGPVVALNPATLLPLPEEGLQHNCLDILAEAHGTRPDLTDQPLPDADHTWYTDGSSLLQEGQRKAGAAVTTETEVIWAKALPAGTSAQRAELIALTQALKMAEGKKLNVYTDSRYAFATAHIHGEIYRRRGWLTSEGKEIKNKDEILALLKALFLPKRLSIIHCPGHQKGHSAEARGNRMADQAARKAAITETPDTSTLLAGKRTADGSEFEKRTADGSEFESPKKKAKVE

SEQ ID NO: 3030 - protein, 2091 aa, synthetic construct; identical to SEQ ID NO: 2750

SEQ ID NO: 3031 - protein, 2094 aa, synthetic construct; identical to SEQ ID NO: 2768

SEQ ID NO: 3032 - protein, 2094 aa, synthetic construct; identical to SEQ ID NO: 2770

SEQ ID NO: 3033 - protein, 2091 aa, synthetic construct; identical to SEQ ID NO: 2779

SEQ ID NO: 3034 - protein, 2093 aa, synthetic construct; identical to SEQ ID NO: 2774

SEQ ID NO: 3035 - protein, 2103 aa, synthetic construct
MPAAKRVKLDGGDKKYSIGLDIGTNSVGWAVITDEYKVPSKKFKVLGNTDRHSIKKNLIGALLFDSGETAEATRLKRTARRRYTRRKNRICYLQEIFSNEMAKVDDSFFHRLEESFLVEEDKKHERHPIFGNIVDEVAYHEKYPTIYHLRKKLVDSTDKADLRLIYLALAHMIKFRGHFLIEGDLNPDNSDVDKLFIQLVQTYNQLFEENPINASGVDAKAILSARLSKSRRLENLIAQLPGEKKNGLFGNLIALSLGLTPNFKSNFDLAEDAKLQLSKDTYDDDLDNLLAQIGDQYADLFLAAKNLSDAILLSDILRVNTEITKAPLSASMIKRYDEHHQDLTLLKALVRQQLPEKYKEIFFDQSKNGYAGYIDGGASQEEFYKFIKPILEKMDGTEELLVKLNREDLLRKQRTFDNGSIPHQIHLGELHAILRRQEDFYPFLKDNREKIEKILTFRIPYYVGPLARGNSRFAWMTRKSEETITPWNFEEVVDKGASAQSFIERMTNFDKNLPNEKVLPKHSLLYEYFTVYNELTKVKYVTEGMRKPAFLSGEQKKAIVDLLFKTNRKVTVKQLKEDYFKKIECFDSVEISGVEDRFNASLGTYHDLLKIIKDKDFLDNEENEDILEDIVLTLTLFEDREMIEERLKTYAHLFDDKVMKQLKRRRYTGWGRLSRKLINGIRDKQSGKTILDFLKSDGFANRNFMQLIHDDSLTFKEDIQKAQVSGQGDSLHEHIANLAGSPAIKKGILQTVKVVDELVKVMGRHKPENIVIEMARENQTTQKGQKNSRERMKRIEEGIKELGSQILKEHPVENTQLQNEKLYLYYLQNGRDMYVDQELDINRLSDYDVDHIVPQSFLKDDSIDNKVLTRSDKARGKSDNVPSEEVVKKMKNYWRQLLNAKLITQRKFDNLTKAERGGLSELDKAGFIKRQLVETRQITKHVAQILDSRMNTKYDENDKLIREVKVITLKSKLVSDFRKDFQFYKVREINNYHHAHDAYLNAVVGTALIKKYPKLESEFVYGDYKVYDVRKMIAKSEQEIGKATAKYFFYSNIMNFFKTEITLANGEIRKRPLIETNGETGEIVWDKGRDFATVRKVLSMPQVNIVKKTEVQTGGFSKESILPKRNSDKLIARKKDWDPKKYGGFDSPTVAYSVLVVAKVEKGKSKKLKSVKELLGITIMERSSFEKNPIDFLEAKGYKEVKKDLIIKLPKYSLFELENGRKRMLASAGELQKGNELALPSKYVNFLYLASHYEKLKGSPEDNEQKQLFVEQHKHYLDEIIEQISEFSKRVILADANLDKVLSAYNKHRDKPIREQAENIIHLFTLTNLGAPAAFKYFDTTIDRKRYTSTKEVLDATLIHQSITGLYETRIDLSQLGGDGGGGSGGSGGSGGSGGSGGSGGTLNIEDEHRLHETSKEPDVSLGSTWLSDFPQAWAETGGMGLAVRQAPLIIPLKATSTPVSIKQYPMSQEARLGIKPHIQRLLDQGILVPCQSPWNTPLLPVKKPGTNDYRPVQDLREVNKRVEDIHPTVPNPYNLLSGLPPSHQWYTVLDLKDAFFCLRLHPTSQPLFAFEWRDPEMGISGQLTWTRLPQGFKNSPTLFNEALHRDLADFRIQHPDLILLQYVDDLLLAATSELDCQQGTRALLQTLGNLGYRASAKKAQICQKQVKYLGYLLKEGQRWLTEARKETVMGQPTPKTPRQLREFLGKAGFCRLFIPGFAEMAAPLYPLTKPGTLFNWGPDQQKAYQEIKQALLTAPALGLPDLTKPFELFVDEKQGYAKGVLTQKLGPWRRPVAYLSKKLDPVAAGWPPCLRMVAAIAVLTKDAGKLTMGQPLVILAPHAVEALVKQPPDRWLSNARMTHYQALLLDTDRVQFGPVVALNPATLLPLPEEGLQHNCLDILAEAHGTRPDLTDQPLPDADHTWYTDGSSLLQEGQRKAGAAVTTETEVIWAKALPAGTSAQRAELIALTQALKMAEGKKLNVYTDSRYAFATAHIHGEIYRRRGWLTSEGKEIKNKDEILALLKALFLPKRLSIIHCPGHQKGHSAEARGNRMADQAARKAAITETPDTSTLLAGKRTADGSEFEKRTADGSEFESPKKKAKVE

SEQ ID NO: 3036 - protein, 2105 aa, synthetic construct; identical to SEQ ID NO: 2844

SEQ ID NO: 3037 - protein, 2088 aa, synthetic construct; identical to SEQ ID NO: 2812

SEQ ID NO: 3038 - protein, 2103 aa, synthetic construct; identical to SEQ ID NO: 2816

SEQ ID NO: 3039 - protein, 2097 aa, synthetic construct; identical to SEQ ID NO: 2795

SEQ ID NO: 3040 - protein, 2096 aa, synthetic construct; identical to SEQ ID NO: 2831

SEQ ID NO: 3041 - protein, 2095 aa, synthetic construct; identical to SEQ ID NO: 2845

SEQ ID NO: 3042 - protein, 2094 aa, synthetic construct; identical to SEQ ID NO: 2818

SEQ ID NO: 3043 - protein, 2110 aa, synthetic construct; identical to SEQ ID NO: 2803

SEQ ID NO: 3044 - protein, 2091 aa, synthetic construct
MPAAKRVKLDGGDKKYSIGLDIGTNSVGWAVITDEYKVPSKKFKVLGNTDRHSIKKNLIGALLFDSGETAEATRLKRTARRRYTRRKNRICYLQEIFSNEMAKVDDSFFHRLEESFLVEEDKKHERHPIFGNIVDEVAYHEKYPTIYHLRKKLVDSTDKADLRLIYLALAHMIKFRGHFLIEGDLNPDNSDVDKLFIQLVQTYNQLFEENPINASGVDAKAILSARLSKSRRLENLIAQLPGEKKNGLFGNLIALSLGLTPNFKSNFDLAEDAKLQLSKDTYDDDLDNLLAQIGDQYADLFLAAKNLSDAILLSDILRVNTEITKAPLSASMIKRYDEHHQDLTLLKALVRQQLPEKYKEIFFDQSKNGYAGYIDGGASQEEFYKFIKPILEKMDGTEELLVKLNREDLLRKQRTFDNGSIPHQIHLGELHAILRRQEDFYPFLKDNREKIEKILTFRIPYYVGPLARGNSRFAWMTRKSEETITPWNFEEVVDKGASAQSFIERMTNFDKNLPNEKVLPKHSLLYEYFTVYNELTKVKYVTEGMRKPAFLSGEQKKAIVDLLFKTNRKVTVKQLKEDYFKKIECFDSVEISGVEDRFNASLGTYHDLLKIIKDKDFLDNEENEDILEDIVLTLTLFEDREMIEERLKTYAHLFDDKVMKQLKRRRYTGWGRLSRKLINGIRDKQSGKTILDFLKSDGFANRNFMQLIHDDSLTFKEDIQKAQVSGQGDSLHEHIANLAGSPAIKKGILQTVKVVDELVKVMGRHKPENIVIEMARENQTTQKGQKNSRERMKRIEEGIKELGSQILKEHPVENTQLQNEKLYLYYLQNGRDMYVDQELDINRLSDYDVDHIVPQSFLKDDSIDNKVLTRSDKARGKSDNVPSEEVVKKMKNYWRQLLNAKLITQRKFDNLTKAERGGLSELDKAGFIKRQLVETRQITKHVAQILDSRMNTKYDENDKLIREVKVITLKSKLVSDFRKDFQFYKVREINNYHHAHDAYLNAVVGTALIKKYPKLESEFVYGDYKVYDVRKMIAKSEQEIGKATAKYFFYSNIMNFFKTEITLANGEIRKRPLIETNGETGEIVWDKGRDFATVRKVLSMPQVNIVKKTEVQTGGFSKESILPKRNSDKLIARKKDWDPKKYGGFDSPTVAYSVLVVAKVEKGKSKKLKSVKELLGITIMERSSFEKNPIDFLEAKGYKEVKKDLIIKLPKYSLFELENGRKRMLASAGELQKGNELALPSKYVNFLYLASHYEKLKGSPEDNEQKQLFVEQHKHYLDEIIEQISEFSKRVILADANLDKVLSAYNKHRDKPIREQAENIIHLFTLTNLGAPAAFKYFDTTIDRKRYTSTKEVLDATLIHQSITGLYETRIDLSQLGGDGGGGGGGGGGTLNIEDEHRLHETSKEPDVSLGSTWLSDFPQAWAETGGMGLAVRQAPLIIPLKATSTPVSIKQYPMSQEARLGIKPHIQRLLDQGILVPCQSPWNTPLLPVKKPGTNDYRPVQDLREVNKRVEDIHPTVPNPYNLLSGLPPSHQWYTVLDLKDAFFCLRLHPTSQPLFAFEWRDPEMGISGQLTWTRLPQGFKNSPTLFNEALHRDLADFRIQHPDLILLQYVDDLLLAATSELDCQQGTRALLQTLGNLGYRASAKKAQICQKQVKYLGYLLKEGQRWLTEARKETVMGQPTPKTPRQLREFLGKAGFCRLFIPGFAEMAAPLYPLTKPGTLFNWGPDQQKAYQEIKQALLTAPALGLPDLTKPFELFVDEKQGYAKGVLTQKLGPWRRPVAYLSKKLDPVAAGWPPCLRMVAAIAVLTKDAGKLTMGQPLVILAPHAVEALVKQPPDRWLSNARMTHYQALLLDTDRVQFGPVVALNPATLLPLPEEGLQHNCLDILAEAHGTRPDLTDQPLPDADHTWYTDGSSLLQEGQRKAGAAVTTETEVIWAKALPAGTSAQRAELIALTQALKMAEGKKLNVYTDSRYAFATAHIHGEIYRRRGWLTSEGKEIKNKDEILALLKALFLPKRLSIIHCPGHQKGHSAEARGNRMADQAARKAAITETPDTSTLLAGKRTADGSEFEKRTADGSEFESPKKKAKVE

SEQ ID NO: 3045 - protein, 2096 aa, synthetic construct
MPAAKRVKLDGGDKKYSIGLDIGTNSVGWAVITDEYKVPSKKFKVLGNTDRHSIKKNLIGALLFDSGETAEATRLKRTARRRYTRRKNRICYLQEIFSNEMAKVDDSFFHRLEESFLVEEDKKHERHPIFGNIVDEVAYHEKYPTIYHLRKKLVDSTDKADLRLIYLALAHMIKFRGHFLIEGDLNPDNSDVDKLFIQLVQTYNQLFEENPINASGVDAKAILSARLSKSRRLENLIAQLPGEKKNGLFGNLIALSLGLTPNFKSNFDLAEDAKLQLSKDTYDDDLDNLLAQIGDQYADLFLAAKNLSDAILLSDILRVNTEITKAPLSASMIKRYDEHHQDLTLLKALVRQQLPEKYKEIFFDQSKNGYAGYIDGGASQEEFYKFIKPILEKMDGTEELLVKLNREDLLRKQRTFDNGSIPHQIHLGELHAILRRQEDFYPFLKDNREKIEKILTFRIPYYVGPLARGNSRFAWMTRKSEETITPWNFEEVVDKGASAQSFIERMTNFDKNLPNEKVLPKHSLLYEYFTVYNELTKVKYVTEGMRKPAFLSGEQKKAIVDLLFKTNRKVTVKQLKEDYFKKIECFDSVEISGVEDRFNASLGTYHDLLKIIKDKDFLDNEENEDILEDIVLTLTLFEDREMIEERLKTYAHLFDDKVMKQLKRRRYTGWGRLSRKLINGIRDKQSGKTILDFLKSDGFANRNFMQLIHDDSLTFKEDIQKAQVSGQGDSLHEHIANLAGSPAIKKGILQTVKVVDELVKVMGRHKPENIVIEMARENQTTQKGQKNSRERMKRIEEGIKELGSQILKEHPVENTQLQNEKLYLYYLQNGRDMYVDQELDINRLSDYDVDHIVPQSFLKDDSIDNKVLTRSDKARGKSDNVPSEEVVKKMKNYWRQLLNAKLITQRKFDNLTKAERGGLSELDKAGFIKRQLVETRQITKHVAQILDSRMNTKYDENDKLIREVKVITLKSKLVSDFRKDFQFYKVREINNYHHAHDAYLNAVVGTALIKKYPKLESEFVYGDYKVYDVRKMIAKSEQEIGKATAKYFFYSNIMNFFKTEITLANGEIRKRPLIETNGETGEIVWDKGRDFATVRKVLSMPQVNIVKKTEVQTGGFSKESILPKRNSDKLIARKKDWDPKKYGGFDSPTVAYSVLVVAKVEKGKSKKLKSVKELLGITIMERSSFEKNPIDFLEAKGYKEVKKDLIIKLPKYSLFELENGRKRMLASAGELQKGNELALPSKYVNFLYLASHYEKLKGSPEDNEQKQLFVEQHKHYLDEIIEQISEFSKRVILADANLDKVLSAYNKHRDKPIREQAENIIHLFTLTNLGAPAAFKYFDTTIDRKRYTSTKEVLDATLIHQSITGLYETRIDLSQLGGDGGGGGEAAAKGGSGGTLNIEDEHRLHETSKEPDVSLGSTWLSDFPQAWAETGGMGLAVRQAPLIIPLKATSTPVSIKQYPMSQEARLGIKPHIQRLLDQGILVPCQSPWNTPLLPVKKPGTNDYRPVQDLREVNKRVEDIHPTVPNPYNLLSGLPPSHQWYTVLDLKDAFFCLRLHPTSQPLFAFEWRDPEMGISGQLTWTRLPQGFKNSPTLFNEALHRDLADFRIQHPDLILLQYVDDLLLAATSELDCQQGTRALLQTLGNLGYRASAKKAQICQKQVKYLGYLLKEGQRWLTEARKETVMGQPTPKTPRQLREFLGKAGFCRLFIPGFAEMAAPLYPLTKPGTLFNWGPDQQKAYQEIKQALLTAPALGLPDLTKPFELFVDEKQGYAKGVLTQKLGPWRRPVAYLSKKLDPVAAGWPPCLRMVAAIAVLTKDAGKLTMGQPLVILAPHAVEALVKQPPDRWLSNARMTHYQALLLDTDRVQFGPVVALNPATLLPLPEEGLQHNCLDILAEAHGTRPDLTDQPLPDADHTWYTDGSSLLQEGQRKAGAAVTTETEVIWAKALPAGTSAQRAELIALTQALKMAEGKKLNVYTDSRYAFATAHIHGEIYRRRGWLTSEGKEIKNKDEILALLKALFLPKRLSIIHCPGHQKGHSAEARGNRMADQAARKAAITETPDTSTLLAGKRTADGSEFEKRTADGSEFESPKKKAKVE

SEQ ID NO: 3046 - protein, 2096 aa, synthetic construct; identical to SEQ ID NO: 2829

SEQ ID NO: 3047 - protein, 2094 aa, synthetic construct
MPAAKRVKLDGGDKKYSIGLDIGTNSVGWAVITDEYKVPSKKFKVLGNTDRHSIKKNLIGALLFDSGETAEATRLKRTARRRYTRRKNRICYLQEIFSNEMAKVDDSFFHRLEESFLVEEDKKHERHPIFGNIVDEVAYHEKYPTIYHLRKKLVDSTDKADLRLIYLALAHMIKFRGHFLIEGDLNPDNSDVDKLFIQLVQTYNQLFEENPINASGVDAKAILSARLSKSRRLENLIAQLPGEKKNGLFGNLIALSLGLTPNFKSNFDLAEDAKLQLSKDTYDDDLDNLLAQIGDQYADLFLAAKNLSDAILLSDILRVNTEITKAPLSASMIKRYDEHHQDLTLLKALVRQQLPEKYKEIFFDQSKNGYAGYIDGGASQEEFYKFIKPILEKMDGTEELLVKLNREDLLRKQRTFDNGSIPHQIHLGELHAILRRQEDFYPFLKDNREKIEKILTFRIPYYVGPLARGNSRFAWMTRKSEETITPWNFEEVVDKGASAQSFIERMTNFDKNLPNEKVLPKHSLLYEYFTVYNELTKVKYVTEGMRKPAFLSGEQKKAIVDLLFKTNRKVTVKQLKEDYFKKIECFDSVEISGVEDRFNASLGTYHDLLKIIKDKDFLDNEENEDILEDIVLTLTLFEDREMIEERLKTYAHLFDDKVMKQLKRRRYTGWGRLSRKLINGIRDKQSGKTILDFLKSDGFANRNFMQLIHDDSLTFKEDIQKAQVSGQGDSLHEHIANLAGSPAIKKGILQTVKVVDELVKVMGRHKPENIVIEMARENQTTQKGQKNSRERMKRIEEGIKELGSQILKEHPVENTQLQNEKLYLYYLQNGRDMYVDQELDINRLSDYDVDHIVPQSFLKDDSIDNKVLTRSDKARGKSDNVPSEEVVKKMKNYWRQLLNAKLITQRKFDNLTKAERGGLSELDKAGFIKRQLVETRQITKHVAQILDSRMNTKYDENDKLIREVKVITLKSKLVSDFRKDFQFYKVREINNYHHAHDAYLNAVVGTALIKKYPKLESEFVYGDYKVYDVRKMIAKSEQEIGKATAKYFFYSNIMNFFKTEITLANGEIRKRPLIETNGETGEIVWDKGRDFATVRKVLSMPQVNIVKKTEVQTGGFSKESILPKRNSDKLIARKKDWDPKKYGGFDSPTVAYSVLVVAKVEKGKSKKLKSVKELLGITIMERSSFEKNPIDFLEAKGYKEVKKDLIIKLPKYSLFELENGRKRMLASAGELQKGNELALPSKYVNFLYLASHYEKLKGSPEDNEQKQLFVEQHKHYLDEIIEQISEFSKRVILADANLDKVLSAYNKHRDKPIREQAENIIHLFTLTNLGAPAAFKYFDTTIDRKRYTSTKEVLDATLIHQSITGLYETRIDLSQLGGDGGGSSGGGGGSGGTLNIEDEHRLHETSKEPDVSLGSTWLSDFPQAWAETGGMGLAVRQAPLIIPLKATSTPVSIKQYPMSQEARLGIKPHIQRLLDQGILVPCQSPWNTPLLPVKKPGTNDYRPVQDLREVNKRVEDIHPTVPNPYNLLSGLPPSHQWYTVLDLKDAFFCLRLHPTSQPLFAFEWRDPEMGISGQLTWTRLPQGFKNSPTLFNEALHRDLADFRIQHPDLILLQYVDDLLLAATSELDCQQGTRALLQTLGNLGYRASAKKAQICQKQVKYLGYLLKEGQRWLTEARKETVMGQPTPKTPRQLREFLGKAGFCRLFIPGFAEMAAPLYPLTKPGTLFNWGPDQQKAYQEIKQALLTAPALGLPDLTKPFELFVDEKQGYAKGVLTQKLGPWRRPVAYLSKKLDPVAAGWPPCLRMVAAIAVLTKDAGKLTMGQPLVILAPHAVEALVKQPPDRWLSNARMTHYQALLLDTDRVQFGPVVALNPATLLPLPEEGLQHNCLDILAEAHGTRPDLTDQPLPDADHTWYTDGSSLLQEGQRKAGAAVTTETEVIWAKALPAGTSAQRAELIALTQALKMAEGKKLNVYTDSRYAFATAHIHGEIYRRRGWLTSEGKEIKNKDEILALLKALFLPKRLSIIHCPGHQKGHSAEARGNRMADQAARKAAITETPDTSTLLAGKRTADGSEFEKRTADGSEFESPKKKAKVE

SEQ ID NO: 3048 - protein, 2094 aa, synthetic construct; identical to SEQ ID NO: 2852

SEQ ID NO: 3049 - protein, 2097 aa, synthetic construct; identical to SEQ ID NO: 2814

SEQ ID NO: 3050 - protein, 2096 aa, synthetic construct
MPAAKRVKLDGGDKKYSIGLDIGTNSVGWAVITDEYKVPSKKFKVLGNTDRHSIKKNLIGALLFDSGETAEATRLKRTARRRYTRRKNRICYLQEIFSNEMAKVDDSFFHRLEESFLVEEDKKHERHPIFGNIVDEVAYHEKYPTIYHLRKKLVDSTDKADLRLIYLALAHMIKFRGHFLIEGDLNPDNSDVDKLFIQLVQTYNQLFEENPINASGVDAKAILSARLSKSRRLENLIAQLPGEKKNGLFGNLIALSLGLTPNFKSNFDLAEDAKLQLSKDTYDDDLDNLLAQIGDQYADLFLAAKNLSDAILLSDILRVNTEITKAPLSASMIKRYDEHHQDLTLLKALVRQQLPEKYKEIFFDQSKNGYAGYIDGGASQEEFYKFIKPILEKMDGTEELLVKLNREDLLRKQRTFDNGSIPHQIHLGELHAILRRQEDFYPFLKDNREKIEKILTFRIPYYVGPLARGNSRFAWMTRKSEETITPWNFEEVVDKGASAQSFIERMTNFDKNLPNEKVLPKHSLLYEYFTVYNELTKVKYVTEGMRKPAFLSGEQKKAIVDLLFKTNRKVTVKQLKEDYFKKIECFDSVEISGVEDRFNASLGTYHDLLKIIKDKDFLDNEENEDILEDIVLTLTLFEDREMIEERLKTYAHLFDDKVMKQLKRRRYTGWGRLSRKLINGIRDKQSGKTILDFLKSDGFANRNFMQLIHDDSLTFKEDIQKAQVSGQGDSLHEHIANLAGSPAIKKGILQTVKVVDELVKVMGRHKPENIVIEMARENQTTQKGQKNSRERMKRIEEGIKELGSQILKEHPVENTQLQNEKLYLYYLQNGRDMYVDQELDINRLSDYDVDHIVPQSFLKDDSIDNKVLTRSDKARGKSDNVPSEEVVKKMKNYWRQLLNAKLITQRKFDNLTKAERGGLSELDKAGFIKRQLVETRQITKHVAQILDSRMNTKYDENDKLIREVKVITLKSKLVSDFRKDFQFYKVREINNYHHAHDAYLNAVVGTALIKKYPKLESEFVYGDYKVYDVRKMIAKSEQEIGKATAKYFFYSNIMNFFKTEITLANGEIRKRPLIETNGETGEIVWDKGRDFATVRKVLSMPQVNIVKKTEVQTGGFSKESILPKRNSDKLIARKKDWDPKKYGGFDSPTVAYSVLVVAKVEKGKSKKLKSVKELLGITIMERSSFEKNPIDFLEAKGYKEVKKDLIIKLPKYSLFELENGRKRMLASAGELQKGNELALPSKYVNFLYLASHYEKLKGSPEDNEQKQLFVEQHKHYLDEIIEQISEFSKRVILADANLDKVLSAYNKHRDKPIREQAENIIHLFTLTNLGAPAAFKYFDTTIDRKRYTSTKEVLDATLIHQSITGLYETRIDLSQLGGDGGGGGEAAAKGSSGGTLNIEDEHRLHETSKEPDVSLGSTWLSDFPQAWAETGGMGLAVRQAPLIIPLKATSTPVSIKQYPMSQEARLGIKPHIQRLLDQGILVPCQSPWNTPLLPVKKPGTNDYRPVQDLREVNKRVEDIHPTVPNPYNLLSGLPPSHQWYTVLDLKDAFFCLRLHPTSQPLFAFEWRDPEMGISGQLTWTRLPQGFKNSPTLFNEALHRDLADFRIQHPDLILLQYVDDLLLAATSELDCQQGTRALLQTLGNLGYRASAKKAQICQKQVKYLGYLLKEGQRWLTEARKETVMGQPTPKTPRQLREFLGKAGFCRLFIPGFAEMAAPLYPLTKPGTLFNWGPDQQKAYQEIKQALLTAPALGLPDLTKPFELFVDEKQGYAKGVLTQKLGPWRRPVAYLSKKLDPVAAGWPPCLRMVAAIAVLTKDAGKLTMGQPLVILAPHAVEALVKQPPDRWLSNARMTHYQALLLDTDRVQFGPVVALNPATLLPLPEEGLQHNCLDILAEAHGTRPDLTDQPLPDADHTWYTDGSSLLQEGQRKAGAAVTTETEVIWAKALPAGTSAQRAELIALTQALKMAEGKKLNVYTDSRYAFATAHIHGEIYRRRGWLTSEGKEIKNKDEILALLKALFLPKRLSIIHCPGHQKGHSAEARGNRMADQAARKAAITETPDTSTLLAGKRTADGSEFEKRTADGSEFESPKKKAKVE

SEQ ID NO: 3051 - protein, 2096 aa, synthetic construct; identical to SEQ ID NO: 2785

SEQ ID NO: 3052 - protein, 2096 aa, synthetic construct; identical to SEQ ID NO: 2822

SEQ ID NO: 3053 - protein, 2096 aa, synthetic construct; identical to SEQ ID NO: 2817

SEQ ID NO: 3054 - protein, 2096 aa, synthetic construct; identical to SEQ ID NO: 2851

SEQ ID NO: 3055 - protein, 2091 aa, synthetic construct
MPAAKRVKLDGGDKKYSIGLDIGTNSVGWAVITDEYKVPSKKFKVLGNTDRHSIKKNLIGALLFDSGETAEATRLKRTARRRYTRRKNRICYLQEIFSNEMAKVDDSFFHRLEESFLVEEDKKHERHPIFGNIVDEVAYHEKYPTIYHLRKKLVDSTDKADLRLIYLALAHMIKFRGHFLIEGDLNPDNSDVDKLFIQLVQTYNQLFEENPINASGVDAKAILSARLSKSRRLENLIAQLPGEKKNGLFGNLIALSLGLTPNFKSNFDLAEDAKLQLSKDTYDDDLDNLLAQIGDQYADLFLAAKNLSDAILLSDILRVNTEITKAPLSASMIKRYDEHHQDLTLLKALVRQQLPEKYKEIFFDQSKNGYAGYIDGGASQEEFYKFIKPILEKMDGTEELLVKLNREDLLRKQRTFDNGSIPHQIHLGELHAILRRQEDFYPFLKDNREKIEKILTFRIPYYVGPLARGNSRFAWMTRKSEETITPWNFEEVVDKGASAQSFIERMTNFDKNLPNEKVLPKHSLLYEYFTVYNELTKVKYVTEGMRKPAFLSGEQKKAIVDLLFKTNRKVTVKQLKEDYFKKIECFDSVEISGVEDRFNASLGTYHDLLKIIKDKDFLDNEENEDILEDIVLTLTLFEDREMIEERLKTYAHLFDDKVMKQLKRRRYTGWGRLSRKLINGIRDKQSGKTILDFLKSDGFANRNFMQLIHDDSLTFKEDIQKAQVSGQGDSLHEHIANLAGSPAIKKGILQTVKVVDELVKVMGRHKPENIVIEMARENQTTQKGQKNSRERMKRIEEGIKELGSQILKEHPVENTQLQNEKLYLYYLQNGRDMYVDQELDINRLSDYDVDHIVPQSFLKDDSIDNKVLTRSDKARGKSDNVPSEEVVKKMKNYWRQLLNAKLITQRKFDNLTKAERGGLSELDKAGFIKRQLVETRQITKHVAQILDSRMNTKYDENDKLIREVKVITLKSKLVSDFRKDFQFYKVREINNYHHAHDAYLNAVVGTALIKKYPKLESEFVYGDYKVYDVRKMIAKSEQEIGKATAKYFFYSNIMNFFKTEITLANGEIRKRPLIETNGETGEIVWDKGRDFATVRKVLSMPQVNIVKKTEVQTGGFSKESILPKRNSDKLIARKKDWDPKKYGGFDSPTVAYSVLVVAKVEKGKSKKLKSVKELLGITIMERSSFEKNPIDFLEAKGYKEVKKDLIIKLPKYSLFELENGRKRMLASAGELQKGNELALPSKYVNFLYLASHYEKLKGSPEDNEQKQLFVEQHKHYLDEIIEQISEFSKRVILADANLDKVLSAYNKHRDKPIREQAENIIHLFTLTNLGAPAAFKYFDTTIDRKRYTSTKEVLDATLIHQSITGLYETRIDLSQLGGDGGGSSPAPGGTLNIEDEHRLHETSKEPDVSLGSTWLSDFPQAWAETGGMGLAVRQAPLIIPLKATSTPVSIKQYPMSQEARLGIKPHIQRLLDQGILVPCQSPWNTPLLPVKKPGTNDYRPVQDLREVNKRVEDIHPTVPNPYNLLSGLPPSHQWYTVLDLKDAFFCLRLHPTSQPLFAFEWRDPEMGISGQLTWTRLPQGFKNSPTLFNEALHRDLADFRIQHPDLILLQYVDDLLLAATSELDCQQGTRALLQTLGNLGYRASAKKAQICQKQVKYLGYLLKEGQRWLTEARKETVMGQPTPKTPRQLREFLGKAGFCRLFIPGFAEMAAPLYPLTKPGTLFNWGPDQQKAYQEIKQALLTAPALGLPDLTKPFELFVDEKQGYAKGVLTQKLGPWRRPVAYLSKKLDPVAAGWPPCLRMVAAIAVLTKDAGKLTMGQPLVILAPHAVEALVKQPPDRWLSNARMTHYQALLLDTDRVQFGPVVALNPATLLPLPEEGLQHNCLDILAEAHGTRPDLTDQPLPDADHTWYTDGSSLLQEGQRKAGAAVTTETEVIWAKALPAGTSAQRAELIALTQALKMAEGKKLNVYTDSRYAFATAHIHGEIYRRRGWLTSEGKEIKNKDEILALLKALFLPKRLSIIHCPGHQKGHSAEARGNRMADQAARKAAITETPDTSTLLAGKRTADGSEFEKRTADGSEFESPKKKAKVE

SEQ ID NO: 3056 - protein, 2094 aa, synthetic construct
MPAAKRVKLDGGDKKYSIGLDIGTNSVGWAVITDEYKVPSKKFKVLGNTDRHSIKKNLIGALLFDSGETAEATRLKRTARRRYTRRKNRICYLQEIFSNEMAKVDDSFFHRLEESFLVEEDKKHERHPIFGNIVDEVAYHEKYPTIYHLRKKLVDSTDKADLRLIYLALAHMIKFRGHFLIEGDLNPDNSDVDKLFIQLVQTYNQLFEENPINASGVDAKAILSARLSKSRRLENLIAQLPGEKKNGLFGNLIALSLGLTPNFKSNFDLAEDAKLQLSKDTYDDDLDNLLAQIGDQYADLFLAAKNLSDAILLSDILRVNTEITKAPLSASMIKRYDEHHQDLTLLKALVRQQLPEKYKEIFFDQSKNGYAGYIDGGASQEEFYKFIKPILEKMDGTEELLVKLNREDLLRKQRTFDNGSIPHQIHLGELHAILRRQEDFYPFLKDNREKIEKILTFRIPYYVGPLARGNSRFAWMTRKSEETITPWNFEEVVDKGASAQSFIERMTNFDKNLPNEKVLPKHSLLYEYFTVYNELTKVKYVTEGMRKPAFLSGEQKKAIVDLLFKTNRKVTVKQLKEDYFKKIECFDSVEISGVEDRFNASLGTYHDLLKIIKDKDFLDNEENEDILEDIVLTLTLFEDREMIEERLKTYAHLFDDKVMKQLKRRRYTGWGRLSRKLINGIRDKQSGKTILDFLKSDGFANRNFMQLIHDDSLTFKEDIQKAQVSGQGDSLHEHIANLAGSPAIKKGILQTVKVVDELVKVMGRHKPENIVIEMARENQTTQKGQKNSRERMKRIEEGIKELGSQILKEHPVENTQLQNEKLYLYYLQNGRDMYVDQELDINRLSDYDVDHIVPQSFLKDDSIDNKVLTRSDKARGKSDNVPSEEVVKKMKNYWRQLLNAKLITQRKFDNLTKAERGGLSELDKAGFIKRQLVETRQITKHVAQILDSRMNTKYDENDKLIREVKVITLKSKLVSDFRKDFQFYKVREINNYHHAHDAYLNAVVGTALIKKYPKLESEFVYGDYKVYDVRKMIAKSEQEIGKATAKYFFYSNIMNFFKTEITLANGEIRKRPLIETNGETGEIVWDKGRDFATVRKVLSMPQVNIVKKTEVQTGGFSKESILPKRNSDKLIARKKDWDPKKYGGFDSPTVAYSVLVVAKVEKGKSKKLKSVKELLGITIMERSSFEKNPIDFLEAKGYKEVKKDLIIKLPKYSLFELENGRKRMLASAGELQKGNELALPSKYVNFLYLASHYEKLKGSPEDNEQKQLFVEQHKHYLDEIIEQISEFSKRVILADANLDKVLSAYNKHRDKPIREQAENIIHLFTLTNLGAPAAFKYFDTTIDRKRYTSTKEVLDATLIHQSITGLYETRIDLSQLGGDGGGSSGGGPAPGGTLNIEDEHRLHETSKEPDVSLGSTWLSDFPQAWAETGGMGLAVRQAPLIIPLKATSTPVSIKQYPMSQEARLGIKPHIQRLLDQGILVPCQSPWNTPLLPVKKPGTNDYRPVQDLREVNKRVEDIHPTVPNPYNLLSGLPPSHQWYTVLDLKDAFFCLRLHPTSQPLFAFEWRDPEMGISGQLTWTRLPQGFKNSPTLFNEALHRDLADFRIQHPDLILLQYVDDLLLAATSELDCQQGTRALLQTLGNLGYRASAKKAQICQKQVKYLGYLLKEGQRWLTEARKETVMGQPTPKTPRQLREFLGKAGFCRLFIPGFAEMAAPLYPLTKPGTLFNWGPDQQKAYQEIKQALLTAPALGLPDLTKPFELFVDEKQGYAKGVLTQKLGPWRRPVAYLSKKLDPVAAGWPPCLRMVAAIAVLTKDAGKLTMGQPLVILAPHAVEALVKQPPDRWLSNARMTHYQALLLDTDRVQFGPVVALNPATLLPLPEEGLQHNCLDILAEAHGTRPDLTDQPLPDADHTWYTDGSSLLQEGQRKAGAAVTTETEVIWAKALPAGTSAQRAELIALTQALKMAEGKKLNVYTDSRYAFATAHIHGEIYRRRGWLTSEGKEIKNKDEILALLKALFLPKRLSIIHCPGHQKGHSAEARGNRMADQAARKAAITETPDTSTLLAGKRTADGSEFEKRTADGSEFESPKKKAKVE

SEQ ID NO: 3057 - protein, 2096 aa, synthetic construct; identical to SEQ ID NO: 2810

SEQ ID NO: 3058 - protein, 2091 aa, synthetic construct
MPAAKRVKLDGGDKKYSIGLDIGTNSVGWAVITDEYKVPSKKFKVLGNTDRHSIKKNLIGALLFDSGETAEATRLKRTARRRYTRRKNRICYLQEIFSNEMAKVDDSFFHRLEESFLVEEDKKHERHPIFGNIVDEVAYHEKYPTIYHLRKKLVDSTDKADLRLIYLALAHMIKFRGHFLIEGDLNPDNSDVDKLFIQLVQTYNQLFEENPINASGVDAKAILSARLSKSRRLENLIAQLPGEKKNGLFGNLIALSLGLTPNFKSNFDLAEDAKLQLSKDTYDDDLDNLLAQIGDQYADLFLAAKNLSDAILLSDILRVNTEITKAPLSASMIKRYDEHHQDLTLLKALVRQQLPEKYKEIFFDQSKNGYAGYIDGGASQEEFYKFIKPILEKMDGTEELLVKLNREDLLRKQRTFDNGSIPHQIHLGELHAILRRQEDFYPFLKDNREKIEKILTFRIPYYVGPLARGNSRFAWMTRKSEETITPWNFEEVVDKGASAQSFIERMTNFDKNLPNEKVLPKHSLLYEYFTVYNELTKVKYVTEGMRKPAFLSGEQKKAIVDLLFKTNRKVTVKQLKEDYFKKIECFDSVEISGVEDRFNASLGTYHDLLKIIKDKDFLDNEENEDILEDIVLTLTLFEDREMIEERLKTYAHLFDDKVMKQLKRRRYTGWGRLSRKLINGIRDKQSGKTILDFLKSDGFANRNFMQLIHDDSLTFKEDIQKAQVSGQGDSLHEHIANLAGSPAIKKGILQTVKVVDELVKVMGRHKPENIVIEMARENQTTQKGQKNSRERMKRIEEGIKELGSQILKEHPVENTQLQNEKLYLYYLQNGRDMYVDQELDINRLSDYDVDHIVPQSFLKDDSIDNKVLTRSDKARGKSDNVPSEEVVKKMKNYWRQLLNAKLITQRKFDNLTKAERGGLSELDKAGFIKRQLVETRQITKHVAQILDSRMNTKYDENDKLIREVKVITLKSKLVSDFRKDFQFYKVREINNYHHAHDAYLNAVVGTALIKKYPKLESEFVYGDYKVYDVRKMIAKSEQEIGKATAKYFFYSNIMNFFKTEITLANGEIRKRPLIETNGETGEIVWDKGRDFATVRKVLSMPQVNIVKKTEVQTGGFSKESILPKRNSDKLIARKKDWDPKKYGGFDSPTVAYSVLVVAKVEKGKSKKLKSVKELLGITIMERSSFEKNPIDFLEAKGYKEVKKDLIIKLPKYSLFELENGRKRMLASAGELQKGNELALPSKYVNFLYLASHYEKLKGSPEDNEQKQLFVEQHKHYLDEIIEQISEFSKRVILADANLDKVLSAYNKHRDKPIREQAENIIHLFTLTNLGAPAAFKYFDTTIDRKRYTSTKEVLDATLIHQSITGLYETRIDLSQLGGDGGGSSGGGGGTLNIEDEHRLHETSKEPDVSLGSTWLSDFPQAWAETGGMGLAVRQAPLIIPLKATSTPVSIKQYPMSQEARLGIKPHIQRLLDQGILVPCQSPWNTPLLPVKKPGTNDYRPVQDLREVNKRVEDIHPTVPNPYNLLSGLPPSHQWYTVLDLKDAFFCLRLHPTSQPLFAFEWRDPEMGISGQLTWTRLPQGFKNSPTLFNEALHRDLADFRIQHPDLILLQYVDDLLLAATSELDCQQGTRALLQTLGNLGYRASAKKAQICQKQVKYLGYLLKEGQRWLTEARKETVMGQPTPKTPRQLREFLGKAGFCRLFIPGFAEMAAPLYPLTKPGTLFNWGPDQQKAYQEIKQALLTAPALGLPDLTKPFELFVDEKQGYAKGVLTQKLGPWRRPVAYLSKKLDPVAAGWPPCLRMVAAIAVLTKDAGKLTMGQPLVILAPHAVEALVKQPPDRWLSNARMTHYQALLLDTDRVQFGPVVALNPATLLPLPEEGLQHNCLDILAEAHGTRPDLTDQPLPDADHTWYTDGSSLLQEGQRKAGAAVTTETEVIWAKALPAGTSAQRAELIALTQALKMAEGKKLNVYTDSRYAFATAHIHGEIYRRRGWLTSEGKEIKNKDEILALLKALFLPKRLSIIHCPGHQKGHSAEARGNRMADQAARKAAITETPDTSTLLAGKRTADGSEFEKRTADGSEFESPKKKAKVE

SEQ ID NO: 3059 - protein, 2094 aa, synthetic construct; identical to SEQ ID NO: 2804

SEQ ID NO: 3060 - protein, 2091 aa, synthetic construct
MPAAKRVKLDGGDKKYSIGLDIGTNSVGWAVITDEYKVPSKKFKVLGNTDRHSIKKNLIGALLFDSGETAEATRLKRTARRRYTRRKNRICYLQEIFSNEMAKVDDSFFHRLEESFLVEEDKKHERHPIFGNIVDEVAYHEKYPTIYHLRKKLVDSTDKADLRLIYLALAHMIKFRGHFLIEGDLNPDNSDVDKLFIQLVQTYNQLFEENPINASGVDAKAILSARLSKSRRLENLIAQLPGEKKNGLFGNLIALSLGLTPNFKSNFDLAEDAKLQLSKDTYDDDLDNLLAQIGDQYADLFLAAKNLSDAILLSDILRVNTEITKAPLSASMIKRYDEHHQDLTLLKALVRQQLPEKYKEIFFDQSKNGYAGYIDGGASQEEFYKFIKPILEKMDGTEELLVKLNREDLLRKQRTFDNGSIPHQIHLGELHAILRRQEDFYPFLKDNREKIEKILTFRIPYYVGPLARGNSRFAWMTRKSEETITPWNFEEVVDKGASAQSFIERMTNFDKNLPNEKVLPKHSLLYEYFTVYNELTKVKYVTEGMRKPAFLSGEQKKAIVDLLFKTNRKVTVKQLKEDYFKKIECFDSVEISGVEDRFNASLGTYHDLLKIIKDKDFLDNEENEDILEDIVLTLTLFEDREMIEERLKTYAHLFDDKVMKQLKRRRYTGWGRLSRKLINGIRDKQSGKTILDFLKSDGFANRNFMQLIHDDSLTFKEDIQKAQVSGQGDSLHEHIANLAGSPAIKKGILQTVKVVDELVKVMGRHKPENIVIEMARENQTTQKGQKNSRERMKRIEEGIKELGSQILKEHPVENTQLQNEKLYLYYLQNGRDMYVDQELDINRLSDYDVDHIVPQSFLKDDSIDNKVLTRSDKARGKSDNVPSEEVVKKMKNYWRQLLNAKLITQRKFDNLTKAERGGLSELDKAGFIKRQLVETRQITKHVAQILDSRMNTKYDENDKLIREVKVITLKSKLVSDFRKDFQFYKVREINNYHHAHDAYLNAVVGTALIKKYPKLESEFVYGDYKVYDVRKMIAKSEQEIGKATAKYFFYSNIMNFFKTEITLANGEIRKRPLIETNGETGEIVWDKGRDFATVRKVLSMPQVNIVKKTEVQTGGFSKESILPKRNSDKLIARKKDWDPKKYGGFDSPTVAYSVLVVAKVEKGKSKKLKSVKELLGITIMERSSFEKNPIDFLEAKGYKEVKKDLIIKLPKYSLFELENGRKRMLASAGELQKGNELALPSKYVNFLYLASHYEKLKGSPEDNEQKQLFVEQHKHYLDEIIEQISEFSKRVILADANLDKVLSAYNKHRDKPIREQAENIIHLFTLTNLGAPAAFKYFDTTIDRKRYTSTKEVLDATLIHQSITGLYETRIDLSQLGGDGGPAPGGSGGTLNIEDEHRLHETSKEPDVSLGSTWLSDFPQAWAETGGMGLAVRQAPLIIPLKATSTPVSIKQYPMSQEARLGIKPHIQRLLDQGILVPCQSPWNTPLLPVKKPGTNDYRPVQDLREVNKRVEDIHPTVPNPYNLLSGLPPSHQWYTVLDLKDAFFCLRLHPTSQPLFAFEWRDPEMGISGQLTWTRLPQGFKNSPTLFNEALHRDLADFRIQHPDLILLQYVDDLLLAATSELDCQQGTRALLQTLGNLGYRASAKKAQICQKQVKYLGYLLKEGQRWLTEARKETVMGQPTPKTPRQLREFLGKAGFCRLFIPGFAEMAAPLYPLTKPGTLFNWGPDQQKAYQEIKQALLTAPALGLPDLTKPFELFVDEKQGYAKGVLTQKLGPWRRPVAYLSKKLDPVAAGWPPCLRMVAAIAVLTKDAGKLTMGQPLVILAPHAVEALVKQPPDRWLSNARMTHYQALLLDTDRVQFGPVVALNPATLLPLPEEGLQHNCLDILAEAHGTRPDLTDQPLPDADHTWYTDGSSLLQEGQRKAGAAVTTETEVIWAKALPAGTSAQRAELIALTQALKMAEGKKLNVYTDSRYAFATAHIHGEIYRRRGWLTSEGKEIKNKDEILALLKALFLPKRLSIIHCPGHQKGHSAEARGNRMADQAARKAAITETPDTSTLLAGKRTADGSEFEKRTADGSEFESPKKKAKVE

SEQ ID NO: 3061 - protein, 2093 aa, synthetic construct
MPAAKRVKLDGGDKKYSIGLDIGTNSVGWAVITDEYKVPSKKFKVLGNTDRHSIKKNLIGALLFDSGETAEATRLKRTARRRYTRRKNRICYLQEIFSNEMAKVDDSFFHRLEESFLVEEDKKHERHPIFGNIVDEVAYHEKYPTIYHLRKKLVDSTDKADLRLIYLALAHMIKFRGHFLIEGDLNPDNSDVDKLFIQLVQTYNQLFEENPINASGVDAKAILSARLSKSRRLENLIAQLPGEKKNGLFGNLIALSLGLTPNFKSNFDLAEDAKLQLSKDTYDDDLDNLLAQIGDQYADLFLAAKNLSDAILLSDILRVNTEITKAPLSASMIKRYDEHHQDLTLLKALVRQQLPEKYKEIFFDQSKNGYAGYIDGGASQEEFYKFIKPILEKMDGTEELLVKLNREDLLRKQRTFDNGSIPHQIHLGELHAILRRQEDFYPFLKDNREKIEKILTFRIPYYVGPLARGNSRFAWMTRKSEETITPWNFEEVVDKGASAQSFIERMTNFDKNLPNEKVLPKHSLLYEYFTVYNELTKVKYVTEGMRKPAFLSGEQKKAIVDLLFKTNRKVTVKQLKEDYFKKIECFDSVEISGVEDRFNASLGTYHDLLKIIKDKDFLDNEENEDILEDIVLTLTLFEDREMIEERLKTYAHLFDDKVMKQLKRRRYTGWGRLSRKLINGIRDKQSGKTILDFLKSDGFANRNFMQLIHDDSLTFKEDIQKAQVSGQGDSLHEHIANLAGSPAIKKGILQTVKVVDELVKVMGRHKPENIVIEMARENQTTQKGQKNSRERMKRIEEGIKELGSQILKEHPVENTQLQNEKLYLYYLQNGRDMYVDQELDINRLSDYDVDHIVPQSFLKDDSIDNKVLTRSDKARGKSDNVPSEEVVKKMKNYWRQLLNAKLITQRKFDNLTKAERGGLSELDKAGFIKRQLVETRQITKHVAQILDSRMNTKYDENDKLIREVKVITLKSKLVSDFRKDFQFYKVREINNYHHAHDAYLNAVVGTALIKKYPKLESEFVYGDYKVYDVRKMIAKSEQEIGKATAKYFFYSNIMNFFKTEITLANGEIRKRPLIETNGETGEIVWDKGRDFATVRKVLSMPQVNIVKKTEVQTGGFSKESILPKRNSDKLIARKKDWDPKKYGGFDSPTVAYSVLVVAKVEKGKSKKLKSVKELLGITIMERSSFEKNPIDFLEAKGYKEVKKDLIIKLPKYSLFELENGRKRMLASAGELQKGNELALPSKYVNFLYLASHYEKLKGSPEDNEQKQLFVEQHKHYLDEIIEQISEFSKRVILADANLDKVLSAYNKHRDKPIREQAENIIHLFTLTNLGAPAAFKYFDTTIDRKRYTSTKEVLDATLIHQSITGLYETRIDLSQLGGDGGPAPEAAAKGGTLNIEDEHRLHETSKEPDVSLGSTWLSDFPQAWAETGGMGLAVRQAPLIIPLKATSTPVSIKQYPMSQEARLGIKPHIQRLLDQGILVPCQSPWNTPLLPVKKPGTNDYRPVQDLREVNKRVEDIHPTVPNPYNLLSGLPPSHQWYTVLDLKDAFFCLRLHPTSQPLFAFEWRDPEMGISGQLTWTRLPQGFKNSPTLFNEALHRDLADFRIQHPDLILLQYVDDLLLAATSELDCQQGTRALLQTLGNLGYRASAKKAQICQKQVKYLGYLLKEGQRWLTEARKETVMGQPTPKTPRQLREFLGKAGFCRLFIPGFAEMAAPLYPLTKPGTLFNWGPDQQKAYQEIKQALLTAPALGLPDLTKPFELFVDEKQGYAKGVLTQKLGPWRRPVAYLSKKLDPVAAGWPPCLRMVAAIAVLTKDAGKLTMGQPLVILAPHAVEALVKQPPDRWLSNARMTHYQALLLDTDRVQFGPVVALNPATLLPLPEEGLQHNCLDILAEAHGTRPDLTDQPLPDADHTWYTDGSSLLQEGQRKAGAAVTTETEVIWAKALPAGTSAQRAELIALTQALKMAEGKKLNVYTDSRYAFATAHIHGEIYRRRGWLTSEGKEIKNKDEILALLKALFLPKRLSIIHCPGHQKGHSAEARGNRMADQAARKAAITETPDTSTLLAGKRTADGSEFEKRTADGSEFESPKKKAKVE

SEQ ID NO: 3062 - protein, 2093 aa, synthetic construct; identical to SEQ ID NO: 2828

SEQ ID NO: 3063 - protein, 2105 aa, synthetic construct
MPAAKRVKLDGGDKKYSIGLDIGTNSVGWAVITDEYKVPSKKFKVLGNTDRHSIKKNLIGALLFDSGETAEATRLKRTARRRYTRRKNRICYLQEIFSNEMAKVDDSFFHRLEESFLVEEDKKHERHPIFGNIVDEVAYHEKYPTIYHLRKKLVDSTDKADLRLIYLALAHMIKFRGHFLIEGDLNPDNSDVDKLFIQLVQTYNQLFEENPINASGVDAKAILSARLSKSRRLENLIAQLPGEKKNGLFGNLIALSLGLTPNFKSNFDLAEDAKLQLSKDTYDDDLDNLLAQIGDQYADLFLAAKNLSDAILLSDILRVNTEITKAPLSASMIKRYDEHHQDLTLLKALVRQQLPEKYKEIFFDQSKNGYAGYIDGGASQEEFYKFIKPILEKMDGTEELLVKLNREDLLRKQRTFDNGSIPHQIHLGELHAILRRQEDFYPFLKDNREKIEKILTFRIPYYVGPLARGNSRFAWMTRKSEETITPWNFEEVVDKGASAQSFIERMTNFDKNLPNEKVLPKHSLLYEYFTVYNELTKVKYVTEGMRKPAFLSGEQKKAIVDLLFKTNRKVTVKQLKEDYFKKIECFDSVEISGVEDRFNASLGTYHDLLKIIKDKDFLDNEENEDILEDIVLTLTLFEDREMIEERLKTYAHLFDDKVMKQLKRRRYTGWGRLSRKLINGIRDKQSGKTILDFLKSDGFANRNFMQLIHDDSLTFKEDIQKAQVSGQGDSLHEHIANLAGSPAIKKGILQTVKVVDELVKVMGRHKPENIVIEMARENQTTQKGQKNSRERMKRIEEGIKELGSQILKEHPVENTQLQNEKLYLYYLQNGRDMYVDQELDINRLSDYDVDHIVPQSFLKDDSIDNKVLTRSDKARGKSDNVPSEEVVKKMKNYWRQLLNAKLITQRKFDNLTKAERGGLSELDKAGFIKRQLVETRQITKHVAQILDSRMNTKYDENDKLIREVKVITLKSKLVSDFRKDFQFYKVREINNYHHAHDAYLNAVVGTALIKKYPKLESEFVYGDYKVYDVRKMIAKSEQEIGKATAKYFFYSNIMNFFKTEITLANGEIRKRPLIETNGETGEIVWDKGRDFATVRKVLSMPQVNIVKKTEVQTGGFSKESILPKRNSDKLIARKKDWDPKKYGGFDSPTVAYSVLVVAKVEKGKSKKLKSVKELLGITIMERSSFEKNPIDFLEAKGYKEVKKDLIIKLPKYSLFELENGRKRMLASAGELQKGNELALPSKYVNFLYLASHYEKLKGSPEDNEQKQLFVEQHKHYLDEIIEQISEFSKRVILADANLDKVLSAYNKHRDKPIREQAENIIHLFTLTNLGAPAAFKYFDTTIDRKRYTSTKEVLDATLIHQSITGLYETRIDLSQLGGDGGGGGGSGGGGSGGGGSGGGGSGGTLNIEDEHRLHETSKEPDVSLGSTWLSDFPQAWAETGGMGLAVRQAPLIIPLKATSTPVSIKQYPMSQEARLGIKPHIQRLLDQGILVPCQSPWNTPLLPVKKPGTNDYRPVQDLREVNKRVEDIHPTVPNPYNLLSGLPPSHQWYTVLDLKDAFFCLRLHPTSQPLFAFEWRDPEMGISGQLTWTRLPQGFKNSPTLFNEALHRDLADFRIQHPDLILLQYVDDLLLAATSELDCQQGTRALLQTLGNLGYRASAKKAQICQKQVKYLGYLLKEGQRWLTEARKETVMGQPTPKTPRQLREFLGKAGFCRLFIPGFAEMAAPLYPLTKPGTLFNWGPDQQKAYQEIKQALLTAPALGLPDLTKPFELFVDEKQGYAKGVLTQKLGPWRRPVAYLSKKLDPVAAGWPPCLRMVAAIAVLTKDAGKLTMGQPLVILAPHAVEALVKQPPDRWLSNARMTHYQALLLDTDRVQFGPVVALNPATLLPLPEEGLQHNCLDILAEAHGTRPDLTDQPLPDADHTWYTDGSSLLQEGQRKAGAAVTTETEVIWAKALPAGTSAQRAELIALTQALKMAEGKKLNVYTDSRYAFATAHIHGEIYRRRGWLTSEGKEIKNKDEILALLKALFLPKRLSIIHCPGHQKGHSAEARGNRMADQAARKAAITETPDTSTLLAGKRTADGSEFEKRTADGSEFESPKKKAKVE

SEQ ID NO: 3064 - protein, 2094 aa, synthetic construct
MPAAKRVKLDGGDKKYSIGLDIGTNSVGWAVITDEYKVPSKKFKVLGNTDRHSIKKNLIGALLFDSGETAEATRLKRTARRRYTRRKNRICYLQEIFSNEMAKVDDSFFHRLEESFLVEEDKKHERHPIFGNIVDEVAYHEKYPTIYHLRKKLVDSTDKADLRLIYLALAHMIKFRGHFLIEGDLNPDNSDVDKLFIQLVQTYNQLFEENPINASGVDAKAILSARLSKSRRLENLIAQLPGEKKNGLFGNLIALSLGLTPNFKSNFDLAEDAKLQLSKDTYDDDLDNLLAQIGDQYADLFLAAKNLSDAILLSDILRVNTEITKAPLSASMIKRYDEHHQDLTLLKALVRQQLPEKYKEIFFDQSKNGYAGYIDGGASQEEFYKFIKPILEKMDGTEELLVKLNREDLLRKQRTFDNGSIPHQIHLGELHAILRRQEDFYPFLKDNREKIEKILTFRIPYYVGPLARGNSRFAWMTRKSEETITPWNFEEVVDKGASAQSFIERMTNFDKNLPNEKVLPKHSLLYEYFTVYNELTKVKYVTEGMRKPAFLSGEQKKAIVDLLFKTNRKVTVKQLKEDYFKKIECFDSVEISGVEDRFNASLGTYHDLLKIIKDKDFLDNEENEDILEDIVLTLTLFEDREMIEERLKTYAHLFDDKVMKQLKRRRYTGWGRLSRKLINGIRDKQSGKTILDFLKSDGFANRNFMQLIHDDSLTFKEDIQKAQVSGQGDSLHEHIANLAGSPAIKKGILQTVKVVDELVKVMGRHKPENIVIEMARENQTTQKGQKNSRERMKRIEEGIKELGSQILKEHPVENTQLQNEKLYLYYLQNGRDMYVDQELDINRLSDYDVDHIVPQSFLKDDSIDNKVLTRSDKARGKSDNVPSEEVVKKMKNYWRQLLNAKLITQRKFDNLTKAERGGLSELDKAGFIKRQLVETRQITKHVAQILDSRMNTKYDENDKLIREVKVITLKSKLVSDFRKDFQFYKVREINNYHHAHDAYLNAVVGTALIKKYPKLESEFVYGDYKVYDVRKMIAKSEQEIGKATAKYFFYSNIMNFFKTEITLANGEIRKRPLIETNGETGEIVWDKGRDFATVRKVLSMPQVNIVKKTEVQTGGFSKESILPKRNSDKLIARKKDWDPKKYGGFDSPTVAYSVLVVAKVEKGKSKKLKSVKELLGITIMERSSFEKNPIDFLEAKGYKEVKKDLIIKLPKYSLFELENGRKRMLASAGELQKGNELALPSKYVNFLYLASHYEKLKGSPEDNEQKQLFVEQHKHYLDEIIEQISEFSKRVILADANLDKVLSAYNKHRDKPIREQAENIIHLFTLTNLGAPAAFKYFDTTIDRKRYTSTKEVLDATLIHQSITGLYETRIDLSQLGGDGGPAPGGSGSSGGTLNIEDEHRLHETSKEPDVSLGSTWLSDFPQAWAETGGMGLAVRQAPLIIPLKATSTPVSIKQYPMSQEARLGIKPHIQRLLDQGILVPCQSPWNTPLLPVKKPGTNDYRPVQDLREVNKRVEDIHPTVPNPYNLLSGLPPSHQWYTVLDLKDAFFCLRLHPTSQPLFAFEWRDPEMGISGQLTWTRLPQGFKNSPTLFNEALHRDLADFRIQHPDLILLQYVDDLLLAATSELDCQQGTRALLQTLGNLGYRASAKKAQICQKQVKYLGYLLKEGQRWLTEARKETVMGQPTPKTPRQLREFLGKAGFCRLFIPGFAEMAAPLYPLTKPGTLFNWGPDQQKAYQEIKQALLTAPALGLPDLTKPFELFVDEKQGYAKGVLTQKLGPWRRPVAYLSKKLDPVAAGWPPCLRMVAAIAVLTKDAGKLTMGQPLVILAPHAVEALVKQPPDRWLSNARMTHYQALLLDTDRVQFGPVVALNPATLLPLPEEGLQHNCLDILAEAHGTRPDLTDQPLPDADHTWYTDGSSLLQEGQRKAGAAVTTETEVIWAKALPAGTSAQRAELIALTQALKMAEGKKLNVYTDSRYAFATAHIHGEIYRRRGWLTSEGKEIKNKDEILALLKALFLPKRLSIIHCPGHQKGHSAEARGNRMADQAARKAAITETPDTSTLLAGKRTADGSEFEKRTADGSEFESPKKKAKVE

SEQ ID NO: 3065 - protein, 2090 aa, synthetic construct; identical to SEQ ID NO: 2825

SEQ ID NO: 3066 - protein, 2090 aa, synthetic construct
MPAAKRVKLDGGDKKYSIGLDIGTNSVGWAVITDEYKVPSKKFKVLGNTDRHSIKKNLIGALLFDSGETAEATRLKRTARRRYTRRKNRICYLQEIFSNEMAKVDDSFFHRLEESFLVEEDKKHERHPIFGNIVDEVAYHEKYPTIYHLRKKLVDSTDKADLRLIYLALAHMIKFRGHFLIEGDLNPDNSDVDKLFIQLVQTYNQLFEENPINASGVDAKAILSARLSKSRRLENLIAQLPGEKKNGLFGNLIALSLGLTPNFKSNFDLAEDAKLQLSKDTYDDDLDNLLAQIGDQYADLFLAAKNLSDAILLSDILRVNTEITKAPLSASMIKRYDEHHQDLTLLKALVRQQLPEKYKEIFFDQSKNGYAGYIDGGASQEEFYKFIKPILEKMDGTEELLVKLNREDLLRKQRTFDNGSIPHQIHLGELHAILRRQEDFYPFLKDNREKIEKILTFRIPYYVGPLARGNSRFAWMTRKSEETITPWNFEEVVDKGASAQSFIERMTNFDKNLPNEKVLPKHSLLYEYFTVYNELTKVKYVTEGMRKPAFLSGEQKKAIVDLLFKTNRKVTVKQLKEDYFKKIECFDSVEISGVEDRFNASLGTYHDLLKIIKDKDFLDNEENEDILEDIVLTLTLFEDREMIEERLKTYAHLFDDKVMKQLKRRRYTGWGRLSRKLINGIRDKQSGKTILDFLKSDGFANRNFMQLIHDDSLTFKEDIQKAQVSGQGDSLHEHIANLAGSPAIKKGILQTVKVVDELVKVMGRHKPENIVIEMARENQTTQKGQKNSRERMKRIEEGIKELGSQILKEHPVENTQLQNEKLYLYYLQNGRDMYVDQELDINRLSDYDVDHIVPQSFLKDDSIDNKVLTRSDKARGKSDNVPSEEVVKKMKNYWRQLLNAKLITQRKFDNLTKAERGGLSELDKAGFIKRQLVETRQITKHVAQILDSRMNTKYDENDKLIREVKVITLKSKLVSDFRKDFQFYKVREINNYHHAHDAYLNAVVGTALIKKYPKLESEFVYGDYKVYDVRKMIAKSEQEIGKATAKYFFYSNIMNFFKTEITLANGEIRKRPLIETNGETGEIVWDKGRDFATVRKVLSMPQVNIVKKTEVQTGGFSKESILPKRNSDKLIARKKDWDPKKYGGFDSPTVAYSVLVVAKVEKGKSKKLKSVKELLGITIMERSSFEKNPIDFLEAKGYKEVKKDLIIKLPKYSLFELENGRKRMLASAGELQKGNELALPSKYVNFLYLASHYEKLKGSPEDNEQKQLFVEQHKHYLDEIIEQISEFSKRVILADANLDKVLSAYNKHRDKPIREQAENIIHLFTLTNLGAPAAFKYFDTTIDRKRYTSTKEVLDATLIHQSITGLYETRIDLSQLGGDGGPAPAPGGTLNIEDEHRLHETSKEPDVSLGSTWLSDFPQAWAETGGMGLAVRQAPLIIPLKATSTPVSIKQYPMSQEARLGIKPHIQRLLDQGILVPCQSPWNTPLLPVKKPGTNDYRPVQDLREVNKRVEDIHPTVPNPYNLLSGLPPSHQWYTVLDLKDAFFCLRLHPTSQPLFAFEWRDPEMGISGQLTWTRLPQGFKNSPTLFNEALHRDLADFRIQHPDLILLQYVDDLLLAATSELDCQQGTRALLQTLGNLGYRASAKKAQICQKQVKYLGYLLKEGQRWLTEARKETVMGQPTPKTPRQLREFLGKAGFCRLFIPGFAEMAAPLYPLTKPGTLFNWGPDQQKAYQEIKQALLTAPALGLPDLTKPFELFVDEKQGYAKGVLTQKLGPWRRPVAYLSKKLDPVAAGWPPCLRMVAAIAVLTKDAGKLTMGQPLVILAPHAVEALVKQPPDRWLSNARMTHYQALLLDTDRVQFGPVVALNPATLLPLPEEGLQHNCLDILAEAHGTRPDLTDQPLPDADHTWYTDGSSLLQEGQRKAGAAVTTETEVIWAKALPAGTSAQRAELIALTQALKMAEGKKLNVYTDSRYAFATAHIHGEIYRRRGWLTSEGKEIKNKDEILALLKALFLPKRLSIIHCPGHQKGHSAEARGNRMADQAARKAAITETPDTSTLLAGKRTADGSEFEKRTADGSEFESPKKKAKVE

SEQ ID NO: 3067 - protein, 2096 aa, synthetic construct; identical to SEQ ID NO: 2787

SEQ ID NO: 3068 - protein, 2096 aa, synthetic construct
MPAAKRVKLDGGDKKYSIGLDIGTNSVGWAVITDEYKVPSKKFKVLGNTDRHSIKKNLIGALLFDSGETAEATRLKRTARRRYTRRKNRICYLQEIFSNEMAKVDDSFFHRLEESFLVEEDKKHERHPIFGNIVDEVAYHEKYPTIYHLRKKLVDSTDKADLRLIYLALAHMIKFRGHFLIEGDLNPDNSDVDKLFIQLVQTYNQLFEENPINASGVDAKAILSARLSKSRRLENLIAQLPGEKKNGLFGNLIALSLGLTPNFKSNFDLAEDAKLQLSKDTYDDDLDNLLAQIGDQYADLFLAAKNLSDAILLSDILRVNTEITKAPLSASMIKRYDEHHQDLTLLKALVRQQLPEKYKEIFFDQSKNGYAGYIDGGASQEEFYKFIKPILEKMDGTEELLVKLNREDLLRKQRTFDNGSIPHQIHLGELHAILRRQEDFYPFLKDNREKIEKILTFRIPYYVGPLARGNSRFAWMTRKSEETITPWNFEEVVDKGASAQSFIERMTNFDKNLPNEKVLPKHSLLYEYFTVYNELTKVKYVTEGMRKPAFLSGEQKKAIVDLLFKTNRKVTVKQLKEDYFKKIECFDSVEISGVEDRFNASLGTYHDLLKIIKDKDFLDNEENEDILEDIVLTLTLFEDREMIEERLKTYAHLFDDKVMKQLKRRRYTGWGRLSRKLINGIRDKQSGKTILDFLKSDGFANRNFMQLIHDDSLTFKEDIQKAQVSGQGDSLHEHIANLAGSPAIKKGILQTVKVVDELVKVMGRHKPENIVIEMARENQTTQKGQKNSRERMKRIEEGIKELGSQILKEHPVENTQLQNEKLYLYYLQNGRDMYVDQELDINRLSDYDVDHIVPQSFLKDDSIDNKVLTRSDKARGKSDNVPSEEVVKKMKNYWRQLLNAKLITQRKFDNLTKAERGGLSELDKAGFIKRQLVETRQITKHVAQILDSRMNTKYDENDKLIREVKVITLKSKLVSDFRKDFQFYKVREINNYHHAHDAYLNAVVGTALIKKYPKLESEFVYGDYKVYDVRKMIAKSEQEIGKATAKYFFYSNIMNFFKTEITLANGEIRKRPLIETNGETGEIVWDKGRDFATVRKVLSMPQVNIVKKTEVQTGGFSKESILPKRNSDKLIARKKDWDPKKYGGFDSPTVAYSVLVVAKVEKGKSKKLKSVKELLGITIMERSSFEKNPIDFLEAKGYKEVKKDLIIKLPKYSLFELENGRKRMLASAGELQKGNELALPSKYVNFLYLASHYEKLKGSPEDNEQKQLFVEQHKHYLDEIIEQISEFSKRVILADANLDKVLSAYNKHRDKPIREQAENIIHLFTLTNLGAPAAFKYFDTTIDRKRYTSTKEVLDATLIHQSITGLYETRIDLSQLGGDGGPAPEAAAKGGGGGTLNIEDEHRLHETSKEPDVSLGSTWLSDFPQAWAETGGMGLAVRQAPLIIPLKATSTPVSIKQYPMSQEARLGIKPHIQRLLDQGILVPCQSPWNTPLLPVKKPGTNDYRPVQDLREVNKRVEDIHPTVPNPYNLLSGLPPSHQWYTVLDLKDAFFCLRLHPTSQPLFAFEWRDPEMGISGQLTWTRLPQGFKNSPTLFNEALHRDLADFRIQHPDLILLQYVDDLLLAATSELDCQQGTRALLQTLGNLGYRASAKKAQICQKQVKYLGYLLKEGQRWLTEARKETVMGQPTPKTPRQLREFLGKAGFCRLFIPGFAEMAAPLYPLTKPGTLFNWGPDQQKAYQEIKQALLTAPALGLPDLTKPFELFVDEKQGYAKGVLTQKLGPWRRPVAYLSKKLDPVAAGWPPCLRMVAAIAVLTKDAGKLTMGQPLVILAPHAVEALVKQPPDRWLSNARMTHYQALLLDTDRVQFGPVVALNPATLLPLPEEGLQHNCLDILAEAHGTRPDLTDQPLPDADHTWYTDGSSLLQEGQRKAGAAVTTETEVIWAKALPAGTSAQRAELIALTQALKMAEGKKLNVYTDSRYAFATAHIHGEIYRRRGWLTSEGKEIKNKDEILALLKALFLPKRLSIIHCPGHQKGHSAEARGNRMADQAARKAAITETPDTSTLLAGKRTADGSEFEKRTADGSEFESPKKKAKVE

SEQ ID NO: 3069 - protein, 2088 aa, synthetic construct
MPAAKRVKLDGGDKKYSIGLDIGTNSVGWAVITDEYKVPSKKFKVLGNTDRHSIKKNLIGALLFDSGETAEATRLKRTARRRYTRRKNRICYLQEIFSNEMAKVDDSFFHRLEESFLVEEDKKHERHPIFGNIVDEVAYHEKYPTIYHLRKKLVDSTDKADLRLIYLALAHMIKFRGHFLIEGDLNPDNSDVDKLFIQLVQTYNQLFEENPINASGVDAKAILSARLSKSRRLENLIAQLPGEKKNGLFGNLIALSLGLTPNFKSNFDLAEDAKLQLSKDTYDDDLDNLLAQIGDQYADLFLAAKNLSDAILLSDILRVNTEITKAPLSASMIKRYDEHHQDLTLLKALVRQQLPEKYKEIFFDQSKNGYAGYIDGGASQEEFYKFIKPILEKMDGTEELLVKLNREDLLRKQRTFDNGSIPHQIHLGELHAILRRQEDFYPFLKDNREKIEKILTFRIPYYVGPLARGNSRFAWMTRKSEETITPWNFEEVVDKGASAQSFIERMTNFDKNLPNEKVLPKHSLLYEYFTVYNELTKVKYVTEGMRKPAFLSGEQKKAIVDLLFKTNRKVTVKQLKEDYFKKIECFDSVEISGVEDRFNASLGTYHDLLKIIKDKDFLDNEENEDILEDIVLTLTLFEDREMIEERLKTYAHLFDDKVMKQLKRRRYTGWGRLSRKLINGIRDKQSGKTILDFLKSDGFANRNFMQLIHDDSLTFKEDIQKAQVSGQGDSLHEHIANLAGSPAIKKGILQTVKVVDELVKVMGRHKPENIVIEMARENQTTQKGQKNSRERMKRIEEGIKELGSQILKEHPVENTQLQNEKLYLYYLQNGRDMYVDQELDINRLSDYDVDHIVPQSFLKDDSIDNKVLTRSDKARGKSDNVPSEEVVKKMKNYWRQLLNAKLITQRKFDNLTKAERGGLSELDKAGFIKRQLVETRQITKHVAQILDSRMNTKYDENDKLIREVKVITLKSKLVSDFRKDFQFYKVREINNYHHAHDAYLNAVVGTALIKKYPKLESEFVYGDYKVYDVRKMIAKSEQEIGKATAKYFFYSNIMNFFKTEITLANGEIRKRPLIETNGETGEIVWDKGRDFATVRKVLSMPQVNIVKKTEVQTGGFSKESILPKRNSDKLIARKKDWDPKKYGGFDSPTVAYSVLVVAKVEKGKSKKLKSVKELLGITIMERSSFEKNPIDFLEAKGYKEVKKDLIIKLPKYSLFELENGRKRMLASAGELQKGNELALPSKYVNFLYLASHYEKLKGSPEDNEQKQLFVEQHKHYLDEIIEQISEFSKRVILADANLDKVLSAYNKHRDKPIREQAENIIHLFTLTNLGAPAAFKYFDTTIDRKRYTSTKEVLDATLIHQSITGLYETRIDLSQLGGDGGGSSGGTLNIEDEHRLHETSKEPDVSLGSTWLSDFPQAWAETGGMGLAVRQAPLIIPLKATSTPVSIKQYPMSQEARLGIKPHIQRLLDQGILVPCQSPWNTPLLPVKKPGTNDYRPVQDLREVNKRVEDIHPTVPNPYNLLSGLPPSHQWYTVLDLKDAFFCLRLHPTSQPLFAFEWRDPEMGISGQLTWTRLPQGFKNSPTLFNEALHRDLADFRIQHPDLILLQYVDDLLLAATSELDCQQGTRALLQTLGNLGYRASAKKAQICQKQVKYLGYLLKEGQRWLTEARKETVMGQPTPKTPRQLREFLGKAGFCRLFIPGFAEMAAPLYPLTKPGTLFNWGPDQQKAYQEIKQALLTAPALGLPDLTKPFELFVDEKQGYAKGVLTQKLGPWRRPVAYLSKKLDPVAAGWPPCLRMVAAIAVLTKDAGKLTMGQPLVILAPHAVEALVKQPPDRWLSNARMTHYQALLLDTDRVQFGPVVALNPATLLPLPEEGLQHNCLDILAEAHGTRPDLTDQPLPDADHTWYTDGSSLLQEGQRKAGAAVTTETEVIWAKALPAGTSAQRAELIALTQALKMAEGKKLNVYTDSRYAFATAHIHGEIYRRRGWLTSEGKEIKNKDEILALLKALFLPKRLSIIHCPGHQKGHSAEARGNRMADQAARKAAITETPDTSTLLAGKRTADGSEFEKRTADGSEFESPKKKAKVE

SEQ ID NO: 3070 - protein, 2094 aa, synthetic construct; identical to SEQ ID NO: 2809

SEQ ID NO: 3071 - protein, 2097 aa, synthetic construct; identical to SEQ ID NO: 2806

SEQ ID NO: 3072 - protein, 2096 aa, synthetic construct
MPAAKRVKLDGGDKKYSIGLDIGTNSVGWAVITDEYKVPSKKFKVLGNTDRHSIKKNLIGALLFDSGETAEATRLKRTARRRYTRRKNRICYLQEIFSNEMAKVDDSFFHRLEESFLVEEDKKHERHPIFGNIVDEVAYHEKYPTIYHLRKKLVDSTDKADLRLIYLALAHMIKFRGHFLIEGDLNPDNSDVDKLFIQLVQTYNQLFEENPINASGVDAKAILSARLSKSRRLENLIAQLPGEKKNGLFGNLIALSLGLTPNFKSNFDLAEDAKLQLSKDTYDDDLDNLLAQIGDQYADLFLAAKNLSDAILLSDILRVNTEITKAPLSASMIKRYDEHHQDLTLLKALVRQQLPEKYKEIFFDQSKNGYAGYIDGGASQEEFYKFIKPILEKMDGTEELLVKLNREDLLRKQRTFDNGSIPHQIHLGELHAILRRQEDFYPFLKDNREKIEKILTFRIPYYVGPLARGNSRFAWMTRKSEETITPWNFEEVVDKGASAQSFIERMTNFDKNLPNEKVLPKHSLLYEYFTVYNELTKVKYVTEGMRKPAFLSGEQKKAIVDLLFKTNRKVTVKQLKEDYFKKIECFDSVEISGVEDRFNASLGTYHDLLKIIKDKDFLDNEENEDILEDIVLTLTLFEDREMIEERLKTYAHLFDDKVMKQLKRRRYTGWGRLSRKLINGIRDKQSGKTILDFLKSDGFANRNFMQLIHDDSLTFKEDIQKAQVSGQGDSLHEHIANLAGSPAIKKGILQTVKVVDELVKVMGRHKPENIVIEMARENQTTQKGQKNSRERMKRIEEGIKELGSQILKEHPVENTQLQNEKLYLYYLQNGRDMYVDQELDINRLSDYDVDHIVPQSFLKDDSIDNKVLTRSDKARGKSDNVPSEEVVKKMKNYWRQLLNAKLITQRKFDNLTKAERGGLSELDKAGFIKRQLVETRQITKHVAQILDSRMNTKYDENDKLIREVKVITLKSKLVSDFRKDFQFYKVREINNYHHAHDAYLNAVVGTALIKKYPKLESEFVYGDYKVYDVRKMIAKSEQEIGKATAKYFFYSNIMNFFKTEITLANGEIRKRPLIETNGETGEIVWDKGRDFATVRKVLSMPQVNIVKKTEVQTGGFSKESILPKRNSDKLIARKKDWDPKKYGGFDSPTVAYSVLVVAKVEKGKSKKLKSVKELLGITIMERSSFEKNPIDFLEAKGYKEVKKDLIIKLPKYSLFELENGRKRMLASAGELQKGNELALPSKYVNFLYLASHYEKLKGSPEDNEQKQLFVEQHKHYLDEIIEQISEFSKRVILADANLDKVLSAYNKHRDKPIREQAENIIHLFTLTNLGAPAAFKYFDTTIDRKRYTSTKEVLDATLIHQSITGLYETRIDLSQLGGDGGGSSEAAAKGGGGGTLNIEDEHRLHETSKEPDVSLGSTWLSDFPQAWAETGGMGLAVRQAPLIIPLKATSTPVSIKQYPMSQEARLGIKPHIQRLLDQGILVPCQSPWNTPLLPVKKPGTNDYRPVQDLREVNKRVEDIHPTVPNPYNLLSGLPPSHQWYTVLDLKDAFFCLRLHPTSQPLFAFEWRDPEMGISGQLTWTRLPQGFKNSPTLFNEALHRDLADFRIQHPDLILLQYVDDLLLAATSELDCQQGTRALLQTLGNLGYRASAKKAQICQKQVKYLGYLLKEGQRWLTEARKETVMGQPTPKTPRQLREFLGKAGFCRLFIPGFAEMAAPLYPLTKPGTLFNWGPDQQKAYQEIKQALLTAPALGLPDLTKPFELFVDEKQGYAKGVLTQKLGPWRRPVAYLSKKLDPVAAGWPPCLRMVAAIAVLTKDAGKLTMGQPLVILAPHAVEALVKQPPDRWLSNARMTHYQALLLDTDRVQFGPVVALNPATLLPLPEEGLQHNCLDILAEAHGTRPDLTDQPLPDADHTWYTDGSSLLQEGQRKAGAAVTTETEVIWAKALPAGTSAQRAELIALTQALKMAEGKKLNVYTDSRYAFATAHIHGEIYRRRGWLTSEGKEIKNKDEILALLKALFLPKRLSIIHCPGHQKGHSAEARGNRMADQAARKAAITETPDTSTLLAGKRTADGSEFEKRTADGSEFESPKKKAKVE

SEQ ID NO: 3073 - protein, 2091 aa, synthetic construct
MPAAKRVKLDGGDKKYSIGLDIGTNSVGWAVITDEYKVPSKKFKVLGNTDRHSIKKNLIGALLFDSGETAEATRLKRTARRRYTRRKNRICYLQEIFSNEMAKVDDSFFHRLEESFLVEEDKKHERHPIFGNIVDEVAYHEKYPTIYHLRKKLVDSTDKADLRLIYLALAHMIKFRGHFLIEGDLNPDNSDVDKLFIQLVQTYNQLFEENPINASGVDAKAILSARLSKSRRLENLIAQLPGEKKNGLFGNLIALSLGLTPNFKSNFDLAEDAKLQLSKDTYDDDLDNLLAQIGDQYADLFLAAKNLSDAILLSDILRVNTEITKAPLSASMIKRYDEHHQDLTLLKALVRQQLPEKYKEIFFDQSKNGYAGYIDGGASQEEFYKFIKPILEKMDGTEELLVKLNREDLLRKQRTFDNGSIPHQIHLGELHAILRRQEDFYPFLKDNREKIEKILTFRIPYYVGPLARGNSRFAWMTRKSEETITPWNFEEVVDKGASAQSFIERMTNFDKNLPNEKVLPKHSLLYEYFTVYNELTKVKYVTEGMRKPAFLSGEQKKAIVDLLFKTNRKVTVKQLKEDYFKKIECFDSVEISGVEDRFNASLGTYHDLLKIIKDKDFLDNEENEDILEDIVLTLTLFEDREMIEERLKTYAHLFDDKVMKQLKRRRYTGWGRLSRKLINGIRDKQSGKTILDFLKSDGFANRNFMQLIHDDSLTFKEDIQKAQVSGQGDSLHEHIANLAGSPAIKKGILQTVKVVDELVKVMGRHKPENIVIEMARENQTTQKGQKNSRERMKRIEEGIKELGSQILKEHPVENTQLQNEKLYLYYLQNGRDMYVDQELDINRLSDYDVDHIVPQSFLKDDSIDNKVLTRSDKARGKSDNVPSEEVVKKMKNYWRQLLNAKLITQRKFDNLTKAERGGLSELDKAGFIKRQLVETRQITKHVAQILDSRMNTKYDENDKLIREVKVITLKSKLVSDFRKDFQFYKVREINNYHHAHDAYLNAVVGTALIKKYPKLESEFVYGDYKVYDVRKMIAKSEQEIGKATAKYFFYSNIMNFFKTEITLANGEIRKRPLIETNGETGEIVWDKGRDFATVRKVLSMPQVNIVKKTEVQTGGFSKESILPKRNSDKLIARKKDWDPKKYGGFDSPTVAYSVLVVAKVEKGKSKKLKSVKELLGITIMERSSFEKNPIDFLEAKGYKEVKKDLIIKLPKYSLFELENGRKRMLASAGELQKGNELALPSKYVNFLYLASHYEKLKGSPEDNEQKQLFVEQHKHYLDEIIEQISEFSKRVILADANLDKVLSAYNKHRDKPIREQAENIIHLFTLTNLGAPAAFKYFDTTIDRKRYTSTKEVLDATLIHQSITGLYETRIDLSQLGGDGGGGGPAPGGTLNIEDEHRLHETSKEPDVSLGSTWLSDFPQAWAETGGMGLAVRQAPLIIPLKATSTPVSIKQYPMSQEARLGIKPHIQRLLDQGILVPCQSPWNTPLLPVKKPGTNDYRPVQDLREVNKRVEDIHPTVPNPYNLLSGLPPSHQWYTVLDLKDAFFCLRLHPTSQPLFAFEWRDPEMGISGQLTWTRLPQGFKNSPTLFNEALHRDLADFRIQHPDLILLQYVDDLLLAATSELDCQQGTRALLQTLGNLGYRASAKKAQICQKQVKYLGYLLKEGQRWLTEARKETVMGQPTPKTPRQLREFLGKAGFCRLFIPGFAEMAAPLYPLTKPGTLFNWGPDQQKAYQEIKQALLTAPALGLPDLTKPFELFVDEKQGYAKGVLTQKLGPWRRPVAYLSKKLDPVAAGWPPCLRMVAAIAVLTKDAGKLTMGQPLVILAPHAVEALVKQPPDRWLSNARMTHYQALLLDTDRVQFGPVVALNPATLLPLPEEGLQHNCLDILAEAHGTRPDLTDQPLPDADHTWYTDGSSLLQEGQRKAGAAVTTETEVIWAKALPAGTSAQRAELIALTQALKMAEGKKLNVYTDSRYAFATAHIHGEIYRRRGWLTSEGKEIKNKDEILALLKALFLPKRLSIIHCPGHQKGHSAEARGNRMADQAARKAAITETPDTSTLLAGKRTADGSEFEKRTADGSEFESPKKKAKVE

SEQ ID NO: 3074 - protein, 2091 aa, synthetic construct; identical to SEQ ID NO: 2853

SEQ ID NO: 3075 - protein, 2094 aa, synthetic construct
MPAAKRVKLDGGDKKYSIGLDIGTNSVGWAVITDEYKVPSKKFKVLGNTDRHSIKKNLIGALLFDSGETAEATRLKRTARRRYTRRKNRICYLQEIFSNEMAKVDDSFFHRLEESFLVEEDKKHERHPIFGNIVDEVAYHEKYPTIYHLRKKLVDSTDKADLRLIYLALAHMIKFRGHFLIEGDLNPDNSDVDKLFIQLVQTYNQLFEENPINASGVDAKAILSARLSKSRRLENLIAQLPGEKKNGLFGNLIALSLGLTPNFKSNFDLAEDAKLQLSKDTYDDDLDNLLAQIGDQYADLFLAAKNLSDAILLSDILRVNTEITKAPLSASMIKRYDEHHQDLTLLKALVRQQLPEKYKEIFFDQSKNGYAGYIDGGASQEEFYKFIKPILEKMDGTEELLVKLNREDLLRKQRTFDNGSIPHQIHLGELHAILRRQEDFYPFLKDNREKIEKILTFRIPYYVGPLARGNSRFAWMTRKSEETITPWNFEEVVDKGASAQSFIERMTNFDKNLPNEKVLPKHSLLYEYFTVYNELTKVKYVTEGMRKPAFLSGEQKKAIVDLLFKTNRKVTVKQLKEDYFKKIECFDSVEISGVEDRFNASLGTYHDLLKIIKDKDFLDNEENEDILEDIVLTLTLFEDREMIEERLKTYAHLFDDKVMKQLKRRRYTGWGRLSRKLINGIRDKQSGKTILDFLKSDGFANRNFMQLIHDDSLTFKEDIQKAQVSGQGDSLHEHIANLAGSPAIKKGILQTVKVVDELVKVMGRHKPENIVIEMARENQTTQKGQKNSRERMKRIEEGIKELGSQILKEHPVENTQLQNEKLYLYYLQNGRDMYVDQELDINRLSDYDVDHIVPQSFLKDDSIDNKVLTRSDKARGKSDNVPSEEVVKKMKNYWRQLLNAKLITQRKFDNLTKAERGGLSELDKAGFIKRQLVETRQITKHVAQILDSRMNTKYDENDKLIREVKVITLKSKLVSDFRKDFQFYKVREINNYHHAHDAYLNAVVGTALIKKYPKLESEFVYGDYKVYDVRKMIAKSEQEIGKATAKYFFYSNIMNFFKTEITLANGEIRKRPLIETNGETGEIVWDKGRDFATVRKVLSMPQVNIVKKTEVQTGGFSKESILPKRNSDKLIARKKDWDPKKYGGFDSPTVAYSVLVVAKVEKGKSKKLKSVKELLGITIMERSSFEKNPIDFLEAKGYKEVKKDLIIKLPKYSLFELENGRKRMLASAGELQKGNELALPSKYVNFLYLASHYEKLKGSPEDNEQKQLFVEQHKHYLDEIIEQISEFSKRVILADANLDKVLSAYNKHRDKPIREQAENIIHLFTLTNLGAPAAFKYFDTTIDRKRYTSTKEVLDATLIHQSITGLYETRIDLSQLGGDGGGSSGGSPAPGGTLNIEDEHRLHETSKEPDVSLGSTWLSDFPQAWAETGGMGLAVRQAPLIIPLKATSTPVSIKQYPMSQEARLGIKPHIQRLLDQGILVPCQSPWNTPLLPVKKPGTNDYRPVQDLREVNKRVEDIHPTVPNPYNLLSGLPPSHQWYTVLDLKDAFFCLRLHPTSQPLFAFEWRDPEMGISGQLTWTRLPQGFKNSPTLFNEALHRDLADFRIQHPDLILLQYVDDLLLAATSELDCQQGTRALLQTLGNLGYRASAKKAQICQKQVKYLGYLLKEGQRWLTEARKETVMGQPTPKTPRQLREFLGKAGFCRLFIPGFAEMAAPLYPLTKPGTLFNWGPDQQKAYQEIKQALLTAPALGLPDLTKPFELFVDEKQGYAKGVLTQKLGPWRRPVAYLSKKLDPVAAGWPPCLRMVAAIAVLTKDAGKLTMGQPLVILAPHAVEALVKQPPDRWLSNARMTHYQALLLDTDRVQFGPVVALNPATLLPLPEEGLQHNCLDILAEAHGTRPDLTDQPLPDADHTWYTDGSSLLQEGQRKAGAAVTTETEVIWAKALPAGTSAQRAELIALTQALKMAEGKKLNVYTDSRYAFATAHIHGEIYRRRGWLTSEGKEIKNKDEILALLKALFLPKRLSIIHCPGHQKGHSAEARGNRMADQAARKAAITETPDTSTLLAGKRTADGSEFEKRTADGSEFESPKKKAKVE

SEQ ID NO: 3076 - protein, 2091 aa, synthetic construct; identical to SEQ ID NO: 2780

SEQ ID NO: 3077 - protein, 2101 aa, synthetic construct; identical to SEQ ID NO: 2858

SEQ ID NO: 3078 - protein, 2093 aa, synthetic construct; identical to SEQ ID NO: 2821

SEQ ID NO: 3079 - protein, 2100 aa, synthetic construct; identical to SEQ ID NO: 2788

SEQ ID NO: 3080 - protein, 2096 aa, synthetic construct
MPAAKRVKLDGGDKKYSIGLDIGTNSVGWAVITDEYKVPSKKFKVLGNTDRHSIKKNLIGALLFDSGETAEATRLKRTARRRYTRRKNRICYLQEIFSNEMAKVDDSFFHRLEESFLVEEDKKHERHPIFGNIVDEVAYHEKYPTIYHLRKKLVDSTDKADLRLIYLALAHMIKFRGHFLIEGDLNPDNSDVDKLFIQLVQTYNQLFEENPINASGVDAKAILSARLSKSRRLENLIAQLPGEKKNGLFGNLIALSLGLTPNFKSNFDLAEDAKLQLSKDTYDDDLDNLLAQIGDQYADLFLAAKNLSDAILLSDILRVNTEITKAPLSASMIKRYDEHHQDLTLLKALVRQQLPEKYKEIFFDQSKNGYAGYIDGGASQEEFYKFIKPILEKMDGTEELLVKLNREDLLRKQRTFDNGSIPHQIHLGELHAILRRQEDFYPFLKDNREKIEKILTFRIPYYVGPLARGNSRFAWMTRKSEETITPWNFEEVVDKGASAQSFIERMTNFDKNLPNEKVLPKHSLLYEYFTVYNELTKVKYVTEGMRKPAFLSGEQKKAIVDLLFKTNRKVTVKQLKEDYFKKIECFDSVEISGVEDRFNASLGTYHDLLKIIKDKDFLDNEENEDILEDIVLTLTLFEDREMIEERLKTYAHLFDDKVMKQLKRRRYTGWGRLSRKLINGIRDKQSGKTILDFLKSDGFANRNFMQLIHDDSLTFKEDIQKAQVSGQGDSLHEHIANLAGSPAIKKGILQTVKVVDELVKVMGRHKPENIVIEMARENQTTQKGQKNSRERMKRIEEGIKELGSQILKEHPVENTQLQNEKLYLYYLQNGRDMYVDQELDINRLSDYDVDHIVPQSFLKDDSIDNKVLTRSDKARGKSDNVPSEEVVKKMKNYWRQLLNAKLITQRKFDNLTKAERGGLSELDKAGFIKRQLVETRQITKHVAQILDSRMNTKYDENDKLIREVKVITLKSKLVSDFRKDFQFYKVREINNYHHAHDAYLNAVVGTALIKKYPKLESEFVYGDYKVYDVRKMIAKSEQEIGKATAKYFFYSNIMNFFKTEITLANGEIRKRPLIETNGETGEIVWDKGRDFATVRKVLSMPQVNIVKKTEVQTGGFSKESILPKRNSDKLIARKKDWDPKKYGGFDSPTVAYSVLVVAKVEKGKSKKLKSVKELLGITIMERSSFEKNPIDFLEAKGYKEVKKDLIIKLPKYSLFELENGRKRMLASAGELQKGNELALPSKYVNFLYLASHYEKLKGSPEDNEQKQLFVEQHKHYLDEIIEQISEFSKRVILADANLDKVLSAYNKHRDKPIREQAENIIHLFTLTNLGAPAAFKYFDTTIDRKRYTSTKEVLDATLIHQSITGLYETRIDLSQLGGDGGEAAAKPAPGGSGGTLNIEDEHRLHETSKEPDVSLGSTWLSDFPQAWAETGGMGLAVRQAPLIIPLKATSTPVSIKQYPMSQEARLGIKPHIQRLLDQGILVPCQSPWNTPLLPVKKPGTNDYRPVQDLREVNKRVEDIHPTVPNPYNLLSGLPPSHQWYTVLDLKDAFFCLRLHPTSQPLFAFEWRDPEMGISGQLTWTRLPQGFKNSPTLFNEALHRDLADFRIQHPDLILLQYVDDLLLAATSELDCQQGTRALLQTLGNLGYRASAKKAQICQKQVKYLGYLLKEGQRWLTEARKETVMGQPTPKTPRQLREFLGKAGFCRLFIPGFAEMAAPLYPLTKPGTLFNWGPDQQKAYQEIKQALLTAPALGLPDLTKPFELFVDEKQGYAKGVLTQKLGPWRRPVAYLSKKLDPVAAGWPPCLRMVAAIAVLTKDAGKLTMGQPLVILAPHAVEALVKQPPDRWLSNARMTHYQALLLDTDRVQFGPVVALNPATLLPLPEEGLQHNCLDILAEAHGTRPDLTDQPLPDADHTWYTDGSSLLQEGQRKAGAAVTTETEVIWAKALPAGTSAQRAELIALTQALKMAEGKKLNVYTDSRYAFATAHIHGEIYRRRGWLTSEGKEIKNKDEILALLKALFLPKRLSIIHCPGHQKGHSAEARGNRMADQAARKAAITETPDTSTLLAGKRTADGSEFEKRTADGSEFESPKKKAKVE

SEQ ID NO: 3081 - protein, 2115 aa, synthetic construct; identical to SEQ ID NO: 2827

SEQ ID NO: 3082 - protein, 2093 aa, synthetic construct; identical to SEQ ID NO: 2856

SEQ ID NO: 3083 - protein, 2096 aa, synthetic construct; identical to SEQ ID NO: 2786

SEQ ID NO: 3084 - protein, 2098 aa, synthetic construct; identical to SEQ ID NO: 2797

SEQ ID NO: 3085 - protein, 2096 aa, synthetic construct; identical to SEQ ID NO: 2830

SEQ ID NO: 3086 - protein, 2094 aa, synthetic construct
MPAAKRVKLDGGDKKYSIGLDIGTNSVGWAVITDEYKVPSKKFKVLGNTDRHSIKKNLIGALLFDSGETAEATRLKRTARRRYTRRKNRICYLQEIFSNEMAKVDDSFFHRLEESFLVEEDKKHERHPIFGNIVDEVAYHEKYPTIYHLRKKLVDSTDKADLRLIYLALAHMIKFRGHFLIEGDLNPDNSDVDKLFIQLVQTYNQLFEENPINASGVDAKAILSARLSKSRRLENLIAQLPGEKKNGLFGNLIALSLGLTPNFKSNFDLAEDAKLQLSKDTYDDDLDNLLAQIGDQYADLFLAAKNLSDAILLSDILRVNTEITKAPLSASMIKRYDEHHQDLTLLKALVRQQLPEKYKEIFFDQSKNGYAGYIDGGASQEEFYKFIKPILEKMDGTEELLVKLNREDLLRKQRTFDNGSIPHQIHLGELHAILRRQEDFYPFLKDNREKIEKILTFRIPYYVGPLARGNSRFAWMTRKSEETITPWNFEEVVDKGASAQSFIERMTNFDKNLPNEKVLPKHSLLYEYFTVYNELTKVKYVTEGMRKPAFLSGEQKKAIVDLLFKTNRKVTVKQLKEDYFKKIECFDSVEISGVEDRFNASLGTYHDLLKIIKDKDFLDNEENEDILEDIVLTLTLFEDREMIEERLKTYAHLFDDKVMKQLKRRRYTGWGRLSRKLINGIRDKQSGKTILDFLKSDGFANRNFMQLIHDDSLTFKEDIQKAQVSGQGDSLHEHIANLAGSPAIKKGILQTVKVVDELVKVMGRHKPENIVIEMARENQTTQKGQKNSRERMKRIEEGIKELGSQILKEHPVENTQLQNEKLYLYYLQNGRDMYVDQELDINRLSDYDVDHIVPQSFLKDDSIDNKVLTRSDKARGKSDNVPSEEVVKKMKNYWRQLLNAKLITQRKFDNLTKAERGGLSELDKAGFIKRQLVETRQITKHVAQILDSRMNTKYDENDKLIREVKVITLKSKLVSDFRKDFQFYKVREINNYHHAHDAYLNAVVGTALIKKYPKLESEFVYGDYKVYDVRKMIAKSEQEIGKATAKYFFYSNIMNFFKTEITLANGEIRKRPLIETNGETGEIVWDKGRDFATVRKVLSMPQVNIVKKTEVQTGGFSKESILPKRNSDKLIARKKDWDPKKYGGFDSPTVAYSVLVVAKVEKGKSKKLKSVKELLGITIMERSSFEKNPIDFLEAKGYKEVKKDLIIKLPKYSLFELENGRKRMLASAGELQKGNELALPSKYVNFLYLASHYEKLKGSPEDNEQKQLFVEQHKHYLDEIIEQISEFSKRVILADANLDKVLSAYNKHRDKPIREQAENIIHLFTLTNLGAPAAFKYFDTTIDRKRYTSTKEVLDATLIHQSITGLYETRIDLSQLGGDGGPAPAPAPAPGGTLNIEDEHRLHETSKEPDVSLGSTWLSDFPQAWAETGGMGLAVRQAPLIIPLKATSTPVSIKQYPMSQEARLGIKPHIQRLLDQGILVPCQSPWNTPLLPVKKPGTNDYRPVQDLREVNKRVEDIHPTVPNPYNLLSGLPPSHQWYTVLDLKDAFFCLRLHPTSQPLFAFEWRDPEMGISGQLTWTRLPQGFKNSPTLFNEALHRDLADFRIQHPDLILLQYVDDLLLAATSELDCQQGTRALLQTLGNLGYRASAKKAQICQKQVKYLGYLLKEGQRWLTEARKETVMGQPTPKTPRQLREFLGKAGFCRLFIPGFAEMAAPLYPLTKPGTLFNWGPDQQKAYQEIKQALLTAPALGLPDLTKPFELFVDEKQGYAKGVLTQKLGPWRRPVAYLSKKLDPVAAGWPPCLRMVAAIAVLTKDAGKLTMGQPLVILAPHAVEALVKQPPDRWLSNARMTHYQALLLDTDRVQFGPVVALNPATLLPLPEEGLQHNCLDILAEAHGTRPDLTDQPLPDADHTWYTDGSSLLQEGQRKAGAAVTTETEVIWAKALPAGTSAQRAELIALTQALKMAEGKKLNVYTDSRYAFATAHIHGEIYRRRGWLTSEGKEIKNKDEILALLKALFLPKRLSIIHCPGHQKGHSAEARGNRMADQAARKAAITETPDTSTLLAGKRTADGSEFEKRTADGSEFESPKKKAKVE

SEQ ID NO: 3087 - protein, 2091 aa, synthetic construct; identical to SEQ ID NO: 2808

SEQ ID NO: 3088 - protein, 2096 aa, synthetic construct; identical to SEQ ID NO: 2857

SEQ ID NO: 3089 - protein, 2091 aa, synthetic construct; identical to SEQ ID NO: 2855

SEQ ID NO: 3090 - protein, 2094 aa, synthetic construct; identical to SEQ ID NO: 2847

SEQ ID NO: 3091 - protein, 2096 aa, synthetic construct; identical to SEQ ID NO: 2798

SEQ ID NO: 3092 - protein, 2100 aa, synthetic construct; identical to SEQ ID NO: 2819

SEQ ID NO: 3093 - protein, 2094 aa, synthetic construct; identical to SEQ ID NO: 2835

SEQ ID NO: 3094 - protein, 2089 aa, synthetic construct
MPAAKRVKLDGGDKKYSIGLDIGTNSVGWAVITDEYKVPSKKFKVLGNTDRHSIKKNLIGALLFDSGETAEATRLKRTARRRYTRRKNRICYLQEIFSNEMAKVDDSFFHRLEESFLVEEDKKHERHPIFGNIVDEVAYHEKYPTIYHLRKKLVDSTDKADLRLIYLALAHMIKFRGHFLIEGDLNPDNSDVDKLFIQLVQTYNQLFEENPINASGVDAKAILSARLSKSRRLENLIAQLPGEKKNGLFGNLIALSLGLTPNFKSNFDLAEDAKLQLSKDTYDDDLDNLLAQIGDQYADLFLAAKNLSDAILLSDILRVNTEITKAPLSASMIKRYDEHHQDLTLLKALVRQQLPEKYKEIFFDQSKNGYAGYIDGGASQEEFYKFIKPILEKMDGTEELLVKLNREDLLRKQRTFDNGSIPHQIHLGELHAILRRQEDFYPFLKDNREKIEKILTFRIPYYVGPLARGNSRFAWMTRKSEETITPWNFEEVVDKGASAQSFIERMTNFDKNLPNEKVLPKHSLLYEYFTVYNELTKVKYVTEGMRKPAFLSGEQKKAIVDLLFKTNRKVTVKQLKEDYFKKIECFDSVEISGVEDRFNASLGTYHDLLKIIKDKDFLDNEENEDILEDIVLTLTLFEDREMIEERLKTYAHLFDDKVMKQLKRRRYTGWGRLSRKLINGIRDKQSGKTILDFLKSDGFANRNFMQLIHDDSLTFKEDIQKAQVSGQGDSLHEHIANLAGSPAIKKGILQTVKVVDELVKVMGRHKPENIVIEMARENQTTQKGQKNSRERMKRIEEGIKELGSQILKEHPVENTQLQNEKLYLYYLQNGRDMYVDQELDINRLSDYDVDHIVPQSFLKDDSIDNKVLTRSDKARGKSDNVPSEEVVKKMKNYWRQLLNAKLITQRKFDNLTKAERGGLSELDKAGFIKRQLVETRQITKHVAQILDSRMNTKYDENDKLIREVKVITLKSKLVSDFRKDFQFYKVREINNYHHAHDAYLNAVVGTALIKKYPKLESEFVYGDYKVYDVRKMIAKSEQEIGKATAKYFFYSNIMNFFKTEITLANGEIRKRPLIETNGETGEIVWDKGRDFATVRKVLSMPQVNIVKKTEVQTGGFSKESILPKRNSDKLIARKKDWDPKKYGGFDSPTVAYSVLVVAKVEKGKSKKLKSVKELLGITIMERSSFEKNPIDFLEAKGYKEVKKDLIIKLPKYSLFELENGRKRMLASAGELQKGNELALPSKYVNFLYLASHYEKLKGSPEDNEQKQLFVEQHKHYLDEIIEQISEFSKRVILADANLDKVLSAYNKHRDKPIREQAENIIHLFTLTNLGAPAAFKYFDTTIDRKRYTSTKEVLDATLIHQSITGLYETRIDLSQLGGDGGGGGGGGTLNIEDEHRLHETSKEPDVSLGSTWLSDFPQAWAETGGMGLAVRQAPLIIPLKATSTPVSIKQYPMSQEARLGIKPHIQRLLDQGILVPCQSPWNTPLLPVKKPGTNDYRPVQDLREVNKRVEDIHPTVPNPYNLLSGLPPSHQWYTVLDLKDAFFCLRLHPTSQPLFAFEWRDPEMGISGQLTWTRLPQGFKNSPTLFNEALHRDLADFRIQHPDLILLQYVDDLLLAATSELDCQQGTRALLQTLGNLGYRASAKKAQICQKQVKYLGYLLKEGQRWLTEARKETVMGQPTPKTPRQLREFLGKAGFCRLFIPGFAEMAAPLYPLTKPGTLFNWGPDQQKAYQEIKQALLTAPALGLPDLTKPFELFVDEKQGYAKGVLTQKLGPWRRPVAYLSKKLDPVAAGWPPCLRMVAAIAVLTKDAGKLTMGQPLVILAPHAVEALVKQPPDRWLSNARMTHYQALLLDTDRVQFGPVVALNPATLLPLPEEGLQHNCLDILAEAHGTRPDLTDQPLPDADHTWYTDGSSLLQEGQRKAGAAVTTETEVIWAKALPAGTSAQRAELIALTQALKMAEGKKLNVYTDSRYAFATAHIHGEIYRRRGWLTSEGKEIKNKDEILALLKALFLPKRLSIIHCPGHQKGHSAEARGNRMADQAARKAAITETPDTSTLLAGKRTADGSEFEKRTADGSEFESPKKKAKVE

SEQ ID NO: 3095 - protein, 2088 aa, synthetic construct
MPAAKRVKLDGGDKKYSIGLDIGTNSVGWAVITDEYKVPSKKFKVLGNTDRHSIKKNLIGALLFDSGETAEATRLKRTARRRYTRRKNRICYLQEIFSNEMAKVDDSFFHRLEESFLVEEDKKHERHPIFGNIVDEVAYHEKYPTIYHLRKKLVDSTDKADLRLIYLALAHMIKFRGHFLIEGDLNPDNSDVDKLFIQLVQTYNQLFEENPINASGVDAKAILSARLSKSRRLENLIAQLPGEKKNGLFGNLIALSLGLTPNFKSNFDLAEDAKLQLSKDTYDDDLDNLLAQIGDQYADLFLAAKNLSDAILLSDILRVNTEITKAPLSASMIKRYDEHHQDLTLLKALVRQQLPEKYKEIFFDQSKNGYAGYIDGGASQEEFYKFIKPILEKMDGTEELLVKLNREDLLRKQRTFDNGSIPHQIHLGELHAILRRQEDFYPFLKDNREKIEKILTFRIPYYVGPLARGNSRFAWMTRKSEETITPWNFEEVVDKGASAQSFIERMTNFDKNLPNEKVLPKHSLLYEYFTVYNELTKVKYVTEGMRKPAFLSGEQKKAIVDLLFKTNRKVTVKQLKEDYFKKIECFDSVEISGVEDRFNASLGTYHDLLKIIKDKDFLDNEENEDILEDIVLTLTLFEDREMIEERLKTYAHLFDDKVMKQLKRRRYTGWGRLSRKLINGIRDKQSGKTILDFLKSDGFANRNFMQLIHDDSLTFKEDIQKAQVSGQGDSLHEHIANLAGSPAIKKGILQTVKVVDELVKVMGRHKPENIVIEMARENQTTQKGQKNSRERMKRIEEGIKELGSQILKEHPVENTQLQNEKLYLYYLQNGRDMYVDQELDINRLSDYDVDHIVPQSFLKDDSIDNKVLTRSDKARGKSDNVPSEEVVKKMKNYWRQLLNAKLITQRKFDNLTKAERGGLSELDKAGFIKRQLVETRQITKHVAQILDSRMNTKYDENDKLIREVKVITLKSKLVSDFRKDFQFYKVREINNYHHAHDAYLNAVVGTALIKKYPKLESEFVYGDYKVYDVRKMIAKSEQEIGKATAKYFFYSNIMNFFKTEITLANGEIRKRPLIETNGETGEIVWDKGRDFATVRKVLSMPQVNIVKKTEVQTGGFSKESILPKRNSDKLIARKKDWDPKKYGGFDSPTVAYSVLVVAKVEKGKSKKLKSVKELLGITIMERSSFEKNPIDFLEAKGYKEVKKDLIIKLPKYSLFELENGRKRMLASAGELQKGNELALPSKYVNFLYLASHYEKLKGSPEDNEQKQLFVEQHKHYLDEIIEQISEFSKRVILADANLDKVLSAYNKHRDKPIREQAENIIHLFTLTNLGAPAAFKYFDTTIDRKRYTSTKEVLDATLIHQSITGLYETRIDLSQLGGDGGGGSGGTLNIEDEHRLHETSKEPDVSLGSTWLSDFPQAWAETGGMGLAVRQAPLIIPLKATSTPVSIKQYPMSQEARLGIKPHIQRLLDQGILVPCQSPWNTPLLPVKKPGTNDYRPVQDLREVNKRVEDIHPTVPNPYNLLSGLPPSHQWYTVLDLKDAFFCLRLHPTSQPLFAFEWRDPEMGISGQLTWTRLPQGFKNSPTLFNEALHRDLADFRIQHPDLILLQYVDDLLLAATSELDCQQGTRALLQTLGNLGYRASAKKAQICQKQVKYLGYLLKEGQRWLTEARKETVMGQPTPKTPRQLREFLGKAGFCRLFIPGFAEMAAPLYPLTKPGTLFNWGPDQQKAYQEIKQALLTAPALGLPDLTKPFELFVDEKQGYAKGVLTQKLGPWRRPVAYLSKKLDPVAAGWPPCLRMVAAIAVLTKDAGKLTMGQPLVILAPHAVEALVKQPPDRWLSNARMTHYQALLLDTDRVQFGPVVALNPATLLPLPEEGLQHNCLDILAEAHGTRPDLTDQPLPDADHTWYTDGSSLLQEGQRKAGAAVTTETEVIWAKALPAGTSAQRAELIALTQALKMAEGKKLNVYTDSRYAFATAHIHGEIYRRRGWLTSEGKEIKNKDEILALLKALFLPKRLSIIHCPGHQKGHSAEARGNRMADQAARKAAITETPDTSTLLAGKRTADGSEFEKRTADGSEFESPKKKAKVE

SEQ ID NO: 3096 - protein, 2092 aa, synthetic construct; identical to SEQ ID NO: 2790

SEQ ID NO: 3097 - protein, 2093 aa, synthetic construct; identical to SEQ ID NO: 2849

SEQ ID NO: 3098 - protein, 2094 aa, synthetic construct; identical to SEQ ID NO: 2793

SEQ ID NO: 3099 - protein, 2100 aa, synthetic construct; identical to SEQ ID NO: 2836

SEQ ID NO: 3100 - protein, 2092 aa, synthetic construct
MPAAKRVKLDGGDKKYSIGLDIGTNSVGWAVITDEYKVPSKKFKVLGNTDRHSIKKNLIGALLFDSGETAEATRLKRTARRRYTRRKNRICYLQEIFSNEMAKVDDSFFHRLEESFLVEEDKKHERHPIFGNIVDEVAYHEKYPTIYHLRKKLVDSTDKADLRLIYLALAHMIKFRGHFLIEGDLNPDNSDVDKLFIQLVQTYNQLFEENPINASGVDAKAILSARLSKSRRLENLIAQLPGEKKNGLFGNLIALSLGLTPNFKSNFDLAEDAKLQLSKDTYDDDLDNLLAQIGDQYADLFLAAKNLSDAILLSDILRVNTEITKAPLSASMIKRYDEHHQDLTLLKALVRQQLPEKYKEIFFDQSKNGYAGYIDGGASQEEFYKFIKPILEKMDGTEELLVKLNREDLLRKQRTFDNGSIPHQIHLGELHAILRRQEDFYPFLKDNREKIEKILTFRIPYYVGPLARGNSRFAWMTRKSEETITPWNFEEVVDKGASAQSFIERMTNFDKNLPNEKVLPKHSLLYEYFTVYNELTKVKYVTEGMRKPAFLSGEQKKAIVDLLFKTNRKVTVKQLKEDYFKKIECFDSVEISGVEDRFNASLGTYHDLLKIIKDKDFLDNEENEDILEDIVLTLTLFEDREMIEERLKTYAHLFDDKVMKQLKRRRYTGWGRLSRKLINGIRDKQSGKTILDFLKSDGFANRNFMQLIHDDSLTFKEDIQKAQVSGQGDSLHEHIANLAGSPAIKKGILQTVKVVDELVKVMGRHKPENIVIEMARENQTTQKGQKNSRERMKRIEEGIKELGSQILKEHPVENTQLQNEKLYLYYLQNGRDMYVDQELDINRLSDYDVDHIVPQSFLKDDSIDNKVLTRSDKARGKSDNVPSEEVVKKMKNYWRQLLNAKLITQRKFDNLTKAERGGLSELDKAGFIKRQLVETRQITKHVAQILDSRMNTKYDENDKLIREVKVITLKSKLVSDFRKDFQFYKVREINNYHHAHDAYLNAVVGTALIKKYPKLESEFVYGDYKVYDVRKMIAKSEQEIGKATAKYFFYSNIMNFFKTEITLANGEIRKRPLIETNGETGEIVWDKGRDFATVRKVLSMPQVNIVKKTEVQTGGFSKESILPKRNSDKLIARKKDWDPKKYGGFDSPTVAYSVLVVAKVEKGKSKKLKSVKELLGITIMERSSFEKNPIDFLEAKGYKEVKKDLIIKLPKYSLFELENGRKRMLASAGELQKGNELALPSKYVNFLYLASHYEKLKGSPEDNEQKQLFVEQHKHYLDEIIEQISEFSKRVILADANLDKVLSAYNKHRDKPIREQAENIIHLFTLTNLGAPAAFKYFDTTIDRKRYTSTKEVLDATLIHQSITGLYETRIDLSQLGGDGGPAPAPAPGGTLNIEDEHRLHETSKEPDVSLGSTWLSDFPQAWAETGGMGLAVRQAPLIIPLKATSTPVSIKQYPMSQEARLGIKPHIQRLLDQGILVPCQSPWNTPLLPVKKPGTNDYRPVQDLREVNKRVEDIHPTVPNPYNLLSGLPPSHQWYTVLDLKDAFFCLRLHPTSQPLFAFEWRDPEMGISGQLTWTRLPQGFKNSPTLFNEALHRDLADFRIQHPDLILLQYVDDLLLAATSELDCQQGTRALLQTLGNLGYRASAKKAQICQKQVKYLGYLLKEGQRWLTEARKETVMGQPTPKTPRQLREFLGKAGFCRLFIPGFAEMAAPLYPLTKPGTLFNWGPDQQKAYQEIKQALLTAPALGLPDLTKPFELFVDEKQGYAKGVLTQKLGPWRRPVAYLSKKLDPVAAGWPPCLRMVAAIAVLTKDAGKLTMGQPLVILAPHAVEALVKQPPDRWLSNARMTHYQALLLDTDRVQFGPVVALNPATLLPLPEEGLQHNCLDILAEAHGTRPDLTDQPLPDADHTWYTDGSSLLQEGQRKAGAAVTTETEVIWAKALPAGTSAQRAELIALTQALKMAEGKKLNVYTDSRYAFATAHIHGEIYRRRGWLTSEGKEIKNKDEILALLKALFLPKRLSIIHCPGHQKGHSAEARGNRMADQAARKAAITETPDTSTLLAGKRTADGSEFEKRTADGSEFESPKKKAKVE

SEQ ID NO: 3101 - protein, 2094 aa, synthetic construct; identical to SEQ ID NO: 2846

SEQ ID NO: 3102 - protein, 2096 aa, synthetic construct; identical to SEQ ID NO: 2842

SEQ ID NO: 3103 - protein, 2096 aa, synthetic construct; identical to SEQ ID NO: 2815

SEQ ID NO: 3104 - protein, 2096 aa, synthetic construct
MPAAKRVKLDGGDKKYSIGLDIGTNSVGWAVITDEYKVPSKKFKVLGNTDRHSIKKNLIGALLFDSGETAEATRLKRTARRRYTRRKNRICYLQEIFSNEMAKVDDSFFHRLEESFLVEEDKKHERHPIFGNIVDEVAYHEKYPTIYHLRKKLVDSTDKADLRLIYLALAHMIKFRGHFLIEGDLNPDNSDVDKLFIQLVQTYNQLFEENPINASGVDAKAILSARLSKSRRLENLIAQLPGEKKNGLFGNLIALSLGLTPNFKSNFDLAEDAKLQLSKDTYDDDLDNLLAQIGDQYADLFLAAKNLSDAILLSDILRVNTEITKAPLSASMIKRYDEHHQDLTLLKALVRQQLPEKYKEIFFDQSKNGYAGYIDGGASQEEFYKFIKPILEKMDGTEELLVKLNREDLLRKQRTFDNGSIPHQIHLGELHAILRRQEDFYPFLKDNREKIEKILTFRIPYYVGPLARGNSRFAWMTRKSEETITPWNFEEVVDKGASAQSFIERMTNFDKNLPNEKVLPKHSLLYEYFTVYNELTKVKYVTEGMRKPAFLSGEQKKAIVDLLFKTNRKVTVKQLKEDYFKKIECFDSVEISGVEDRFNASLGTYHDLLKIIKDKDFLDNEENEDILEDIVLTLTLFEDREMIEERLKTYAHLFDDKVMKQLKRRRYTGWGRLSRKLINGIRDKQSGKTILDFLKSDGFANRNFMQLIHDDSLTFKEDIQKAQVSGQGDSLHEHIANLAGSPAIKKGILQTVKVVDELVKVMGRHKPENIVIEMARENQTTQKGQKNSRERMKRIEEGIKELGSQILKEHPVENTQLQNEKLYLYYLQNGRDMYVDQELDINRLSDYDVDHIVPQSFLKDDSIDNKVLTRSDKARGKSDNVPSEEVVKKMKNYWRQLLNAKLITQRKFDNLTKAERGGLSELDKAGFIKRQLVETRQITKHVAQILDSRMNTKYDENDKLIREVKVITLKSKLVSDFRKDFQFYKVREINNYHHAHDAYLNAVVGTALIKKYPKLESEFVYGDYKVYDVRKMIAKSEQEIGKATAKYFFYSNIMNFFKTEITLANGEIRKRPLIETNGETGEIVWDKGRDFATVRKVLSMPQVNIVKKTEVQTGGFSKESILPKRNSDKLIARKKDWDPKKYGGFDSPTVAYSVLVVAKVEKGKSKKLKSVKELLGITIMERSSFEKNPIDFLEAKGYKEVKKDLIIKLPKYSLFELENGRKRMLASAGELQKGNELALPSKYVNFLYLASHYEKLKGSPEDNEQKQLFVEQHKHYLDEIIEQISEFSKRVILADANLDKVLSAYNKHRDKPIREQAENIIHLFTLTNLGAPAAFKYFDTTIDRKRYTSTKEVLDATLIHQSITGLYETRIDLSQLGGDGGPAPEAAAKGSSGGTLNIEDEHRLHETSKEPDVSLGSTWLSDFPQAWAETGGMGLAVRQAPLIIPLKATSTPVSIKQYPMSQEARLGIKPHIQRLLDQGILVPCQSPWNTPLLPVKKPGTNDYRPVQDLREVNKRVEDIHPTVPNPYNLLSGLPPSHQWYTVLDLKDAFFCLRLHPTSQPLFAFEWRDPEMGISGQLTWTRLPQGFKNSPTLFNEALHRDLADFRIQHPDLILLQYVDDLLLAATSELDCQQGTRALLQTLGNLGYRASAKKAQICQKQVKYLGYLLKEGQRWLTEARKETVMGQPTPKTPRQLREFLGKAGFCRLFIPGFAEMAAPLYPLTKPGTLFNWGPDQQKAYQEIKQALLTAPALGLPDLTKPFELFVDEKQGYAKGVLTQKLGPWRRPVAYLSKKLDPVAAGWPPCLRMVAAIAVLTKDAGKLTMGQPLVILAPHAVEALVKQPPDRWLSNARMTHYQALLLDTDRVQFGPVVALNPATLLPLPEEGLQHNCLDILAEAHGTRPDLTDQPLPDADHTWYTDGSSLLQEGQRKAGAAVTTETEVIWAKALPAGTSAQRAELIALTQALKMAEGKKLNVYTDSRYAFATAHIHGEIYRRRGWLTSEGKEIKNKDEILALLKALFLPKRLSIIHCPGHQKGHSAEARGNRMADQAARKAAITETPDTSTLLAGKRTADGSEFEKRTADGSEFESPKKKAKVE

SEQ ID NO: 3105 - protein, 2096 aa, synthetic construct
MPAAKRVKLDGGDKKYSIGLDIGTNSVGWAVITDEYKVPSKKFKVLGNTDRHSIKKNLIGALLFDSGETAEATRLKRTARRRYTRRKNRICYLQEIFSNEMAKVDDSFFHRLEESFLVEEDKKHERHPIFGNIVDEVAYHEKYPTIYHLRKKLVDSTDKADLRLIYLALAHMIKFRGHFLIEGDLNPDNSDVDKLFIQLVQTYNQLFEENPINASGVDAKAILSARLSKSRRLENLIAQLPGEKKNGLFGNLIALSLGLTPNFKSNFDLAEDAKLQLSKDTYDDDLDNLLAQIGDQYADLFLAAKNLSDAILLSDILRVNTEITKAPLSASMIKRYDEHHQDLTLLKALVRQQLPEKYKEIFFDQSKNGYAGYIDGGASQEEFYKFIKPILEKMDGTEELLVKLNREDLLRKQRTFDNGSIPHQIHLGELHAILRRQEDFYPFLKDNREKIEKILTFRIPYYVGPLARGNSRFAWMTRKSEETITPWNFEEVVDKGASAQSFIERMTNFDKNLPNEKVLPKHSLLYEYFTVYNELTKVKYVTEGMRKPAFLSGEQKKAIVDLLFKTNRKVTVKQLKEDYFKKIECFDSVEISGVEDRFNASLGTYHDLLKIIKDKDFLDNEENEDILEDIVLTLTLFEDREMIEERLKTYAHLFDDKVMKQLKRRRYTGWGRLSRKLINGIRDKQSGKTILDFLKSDGFANRNFMQLIHDDSLTFKEDIQKAQVSGQGDSLHEHIANLAGSPAIKKGILQTVKVVDELVKVMGRHKPENIVIEMARENQTTQKGQKNSRERMKRIEEGIKELGSQILKEHPVENTQLQNEKLYLYYLQNGRDMYVDQELDINRLSDYDVDHIVPQSFLKDDSIDNKVLTRSDKARGKSDNVPSEEVVKKMKNYWRQLLNAKLITQRKFDNLTKAERGGLSELDKAGFIKRQLVETRQITKHVAQILDSRMNTKYDENDKLIREVKVITLKSKLVSDFRKDFQFYKVREINNYHHAHDAYLNAVVGTALIKKYPKLESEFVYGDYKVYDVRKMIAKSEQEIGKATAKYFFYSNIMNFFKTEITLANGEIRKRPLIETNGETGEIVWDKGRDFATVRKVLSMPQVNIVKKTEVQTGGFSKESILPKRNSDKLIARKKDWDPKKYGGFDSPTVAYSVLVVAKVEKGKSKKLKSVKELLGITIMERSSFEKNPIDFLEAKGYKEVKKDLIIKLPKYSLFELENGRKRMLASAGELQKGNELALPSKYVNFLYLASHYEKLKGSPEDNEQKQLFVEQHKHYLDEIIEQISEFSKRVILADANLDKVLSAYNKHRDKPIREQAENIIHLFTLTNLGAPAAFKYFDTTIDRKRYTSTKEVLDATLIHQSITGLYETRIDLSQLGGDGGGSSEAAAKPAPGGTLNIEDEHRLHETSKEPDVSLGSTWLSDFPQAWAETGGMGLAVRQAPLIIPLKATSTPVSIKQYPMSQEARLGIKPHIQRLLDQGILVPCQSPWNTPLLPVKKPGTNDYRPVQDLREVNKRVEDIHPTVPNPYNLLSGLPPSHQWYTVLDLKDAFFCLRLHPTSQPLFAFEWRDPEMGISGQLTWTRLPQGFKNSPTLFNEALHRDLADFRIQHPDLILLQYVDDLLLAATSELDCQQGTRALLQTLGNLGYRASAKKAQICQKQVKYLGYLLKEGQRWLTEARKETVMGQPTPKTPRQLREFLGKAGFCRLFIPGFAEMAAPLYPLTKPGTLFNWGPDQQKAYQEIKQALLTAPALGLPDLTKPFELFVDEKQGYAKGVLTQKLGPWRRPVAYLSKKLDPVAAGWPPCLRMVAAIAVLTKDAGKLTMGQPLVILAPHAVEALVKQPPDRWLSNARMTHYQALLLDTDRVQFGPVVALNPATLLPLPEEGLQHNCLDILAEAHGTRPDLTDQPLPDADHTWYTDGSSLLQEGQRKAGAAVTTETEVIWAKALPAGTSAQRAELIALTQALKMAEGKKLNVYTDSRYAFATAHIHGEIYRRRGWLTSEGKEIKNKDEILALLKALFLPKRLSIIHCPGHQKGHSAEARGNRMADQAARKAAITETPDTSTLLAGKRTADGSEFEKRTADGSEFESPKKKAKVE

SEQ ID NO: 3106 - protein, 2094 aa, synthetic construct
MPAAKRVKLDGGDKKYSIGLDIGTNSVGWAVITDEYKVPSKKFKVLGNTDRHSIKKNLIGALLFDSGETAEATRLKRTARRRYTRRKNRICYLQEIFSNEMAKVDDSFFHRLEESFLVEEDKKHERHPIFGNIVDEVAYHEKYPTIYHLRKKLVDSTDKADLRLIYLALAHMIKFRGHFLIEGDLNPDNSDVDKLFIQLVQTYNQLFEENPINASGVDAKAILSARLSKSRRLENLIAQLPGEKKNGLFGNLIALSLGLTPNFKSNFDLAEDAKLQLSKDTYDDDLDNLLAQIGDQYADLFLAAKNLSDAILLSDILRVNTEITKAPLSASMIKRYDEHHQDLTLLKALVRQQLPEKYKEIFFDQSKNGYAGYIDGGASQEEFYKFIKPILEKMDGTEELLVKLNREDLLRKQRTFDNGSIPHQIHLGELHAILRRQEDFYPFLKDNREKIEKILTFRIPYYVGPLARGNSRFAWMTRKSEETITPWNFEEVVDKGASAQSFIERMTNFDKNLPNEKVLPKHSLLYEYFTVYNELTKVKYVTEGMRKPAFLSGEQKKAIVDLLFKTNRKVTVKQLKEDYFKKIECFDSVEISGVEDRFNASLGTYHDLLKIIKDKDFLDNEENEDILEDIVLTLTLFEDREMIEERLKTYAHLFDDKVMKQLKRRRYTGWGRLSRKLINGIRDKQSGKTILDFLKSDGFANRNFMQLIHDDSLTFKEDIQKAQVSGQGDSLHEHIANLAGSPAIKKGILQTVKVVDELVKVMGRHKPENIVIEMARENQTTQKGQKNSRERMKRIEEGIKELGSQILKEHPVENTQLQNEKLYLYYLQNGRDMYVDQELDINRLSDYDVDHIVPQSFLKDDSIDNKVLTRSDKARGKSDNVPSEEVVKKMKNYWRQLLNAKLITQRKFDNLTKAERGGLSELDKAGFIKRQLVETRQITKHVAQILDSRMNTKYDENDKLIREVKVITLKSKLVSDFRKDFQFYKVREINNYHHAHDAYLNAVVGTALIKKYPKLESEFVYGDYKVYDVRKMIAKSEQEIGKATAKYFFYSNIMNFFKTEITLANGEIRKRPLIETNGETGEIVWDKGRDFATVRKVLSMPQVNIVKKTEVQTGGFSKESILPKRNSDKLIARKKDWDPKKYGGFDSPTVAYSVLVVAKVEKGKSKKLKSVKELLGITIMERSSFEKNPIDFLEAKGYKEVKKDLIIKLPKYSLFELENGRKRMLASAGELQKGNELALPSKYVNFLYLASHYEKLKGSPEDNEQKQLFVEQHKHYLDEIIEQISEFSKRVILADANLDKVLSAYNKHRDKPIREQAENIIHLFTLTNLGAPAAFKYFDTTIDRKRYTSTKEVLDATLIHQSITGLYETRIDLSQLGGDGGPAPGSSGGSGGTLNIEDEHRLHETSKEPDVSLGSTWLSDFPQAWAETGGMGLAVRQAPLIIPLKATSTPVSIKQYPMSQEARLGIKPHIQRLLDQGILVPCQSPWNTPLLPVKKPGTNDYRPVQDLREVNKRVEDIHPTVPNPYNLLSGLPPSHQWYTVLDLKDAFFCLRLHPTSQPLFAFEWRDPEMGISGQLTWTRLPQGFKNSPTLFNEALHRDLADFRIQHPDLILLQYVDDLLLAATSELDCQQGTRALLQTLGNLGYRASAKKAQICQKQVKYLGYLLKEGQRWLTEARKETVMGQPTPKTPRQLREFLGKAGFCRLFIPGFAEMAAPLYPLTKPGTLFNWGPDQQKAYQEIKQALLTAPALGLPDLTKPFELFVDEKQGYAKGVLTQKLGPWRRPVAYLSKKLDPVAAGWPPCLRMVAAIAVLTKDAGKLTMGQPLVILAPHAVEALVKQPPDRWLSNARMTHYQALLLDTDRVQFGPVVALNPATLLPLPEEGLQHNCLDILAEAHGTRPDLTDQPLPDADHTWYTDGSSLLQEGQRKAGAAVTTETEVIWAKALPAGTSAQRAELIALTQALKMAEGKKLNVYTDSRYAFATAHIHGEIYRRRGWLTSEGKEIKNKDEILALLKALFLPKRLSIIHCPGHQKGHSAEARGNRMADQAARKAAITETPDTSTLLAGKRTADGSEFEKRTADGSEFESPKKKAKVE

SEQ ID NO: 3107 - protein, 2091 aa, synthetic construct; identical to SEQ ID NO: 2820

SEQ ID NO: 3108 - protein, 2096 aa, synthetic construct; identical to SEQ ID NO: 2782

SEQ ID NO: 3109 - protein, 2096 aa, synthetic construct; identical to SEQ ID NO: 2860

SEQ ID NO: 3110 - protein, 2095 aa, synthetic construct
MPAAKRVKLDGGDKKYSIGLDIGTNSVGWAVITDEYKVPSKKFKVLGNTDRHSIKKNLIGALLFDSGETAEATRLKRTARRRYTRRKNRICYLQEIFSNEMAKVDDSFFHRLEESFLVEEDKKHERHPIFGNIVDEVAYHEKYPTIYHLRKKLVDSTDKADLRLIYLALAHMIKFRGHFLIEGDLNPDNSDVDKLFIQLVQTYNQLFEENPINASGVDAKAILSARLSKSRRLENLIAQLPGEKKNGLFGNLIALSLGLTPNFKSNFDLAEDAKLQLSKDTYDDDLDNLLAQIGDQYADLFLAAKNLSDAILLSDILRVNTEITKAPLSASMIKRYDEHHQDLTLLKALVRQQLPEKYKEIFFDQSKNGYAGYIDGGASQEEFYKFIKPILEKMDGTEELLVKLNREDLLRKQRTFDNGSIPHQIHLGELHAILRRQEDFYPFLKDNREKIEKILTFRIPYYVGPLARGNSRFAWMTRKSEETITPWNFEEVVDKGASAQSFIERMTNFDKNLPNEKVLPKHSLLYEYFTVYNELTKVKYVTEGMRKPAFLSGEQKKAIVDLLFKTNRKVTVKQLKEDYFKKIECFDSVEISGVEDRFNASLGTYHDLLKIIKDKDFLDNEENEDILEDIVLTLTLFEDREMIEERLKTYAHLFDDKVMKQLKRRRYTGWGRLSRKLINGIRDKQSGKTILDFLKSDGFANRNFMQLIHDDSLTFKEDIQKAQVSGQGDSLHEHIANLAGSPAIKKGILQTVKVVDELVKVMGRHKPENIVIEMARENQTTQKGQKNSRERMKRIEEGIKELGSQILKEHPVENTQLQNEKLYLYYLQNGRDMYVDQELDINRLSDYDVDHIVPQSFLKDDSIDNKVLTRSDKARGKSDNVPSEEVVKKMKNYWRQLLNAKLITQRKFDNLTKAERGGLSELDKAGFIKRQLVETRQITKHVAQILDSRMNTKYDENDKLIREVKVITLKSKLVSDFRKDFQFYKVREINNYHHAHDAYLNAVVGTALIKKYPKLESEFVYGDYKVYDVRKMIAKSEQEIGKATAKYFFYSNIMNFFKTEITLANGEIRKRPLIETNGETGEIVWDKGRDFATVRKVLSMPQVNIVKKTEVQTGGFSKESILPKRNSDKLIARKKDWDPKKYGGFDSPTVAYSVLVVAKVEKGKSKKLKSVKELLGITIMERSSFEKNPIDFLEAKGYKEVKKDLIIKLPKYSLFELENGRKRMLASAGELQKGNELALPSKYVNFLYLASHYEKLKGSPEDNEQKQLFVEQHKHYLDEIIEQISEFSKRVILADANLDKVLSAYNKHRDKPIREQAENIIHLFTLTNLGAPAAFKYFDTTIDRKRYTSTKEVLDATLIHQSITGLYETRIDLSQLGGDGGGGGGSGGGGSGGTLNIEDEHRLHETSKEPDVSLGSTWLSDFPQAWAETGGMGLAVRQAPLIIPLKATSTPVSIKQYPMSQEARLGIKPHIQRLLDQGILVPCQSPWNTPLLPVKKPGTNDYRPVQDLREVNKRVEDIHPTVPNPYNLLSGLPPSHQWYTVLDLKDAFFCLRLHPTSQPLFAFEWRDPEMGISGQLTWTRLPQGFKNSPTLFNEALHRDLADFRIQHPDLILLQYVDDLLLAATSELDCQQGTRALLQTLGNLGYRASAKKAQICQKQVKYLGYLLKEGQRWLTEARKETVMGQPTPKTPRQLREFLGKAGFCRLFIPGFAEMAAPLYPLTKPGTLFNWGPDQQKAYQEIKQALLTAPALGLPDLTKPFELFVDEKQGYAKGVLTQKLGPWRRPVAYLSKKLDPVAAGWPPCLRMVAAIAVLTKDAGKLTMGQPLVILAPHAVEALVKQPPDRWLSNARMTHYQALLLDTDRVQFGPVVALNPATLLPLPEEGLQHNCLDILAEAHGTRPDLTDQPLPDADHTWYTDGSSLLQEGQRKAGAAVTTETEVIWAKALPAGTSAQRAELIALTQALKMAEGKKLNVYTDSRYAFATAHIHGEIYRRRGWLTSEGKEIKNKDEILALLKALFLPKRLSIIHCPGHQKGHSAEARGNRMADQAARKAAITETPDTSTLLAGKRTADGSEFEKRTADGSEFESPKKKAKVE

SEQ ID NO: 3111 - protein, 2094 aa, synthetic construct; identical to SEQ ID NO: 2800

SEQ ID NO: 3112 - protein, 2096 aa, synthetic construct; identical to SEQ ID NO: 2792

SEQ ID NO: 3113 - protein, 2091 aa, synthetic construct
MPAAKRVKLDGGDKKYSIGLDIGTNSVGWAVITDEYKVPSKKFKVLGNTDRHSIKKNLIGALLFDSGETAEATRLKRTARRRYTRRKNRICYLQEIFSNEMAKVDDSFFHRLEESFLVEEDKKHERHPIFGNIVDEVAYHEKYPTIYHLRKKLVDSTDKADLRLIYLALAHMIKFRGHFLIEGDLNPDNSDVDKLFIQLVQTYNQLFEENPINASGVDAKAILSARLSKSRRLENLIAQLPGEKKNGLFGNLIALSLGLTPNFKSNFDLAEDAKLQLSKDTYDDDLDNLLAQIGDQYADLFLAAKNLSDAILLSDILRVNTEITKAPLSASMIKRYDEHHQDLTLLKALVRQQLPEKYKEIFFDQSKNGYAGYIDGGASQEEFYKFIKPILEKMDGTEELLVKLNREDLLRKQRTFDNGSIPHQIHLGELHAILRRQEDFYPFLKDNREKIEKILTFRIPYYVGPLARGNSRFAWMTRKSEETITPWNFEEVVDKGASAQSFIERMTNFDKNLPNEKVLPKHSLLYEYFTVYNELTKVKYVTEGMRKPAFLSGEQKKAIVDLLFKTNRKVTVKQLKEDYFKKIECFDSVEISGVEDRFNASLGTYHDLLKIIKDKDFLDNEENEDILEDIVLTLTLFEDREMIEERLKTYAHLFDDKVMKQLKRRRYTGWGRLSRKLINGIRDKQSGKTILDFLKSDGFANRNFMQLIHDDSLTFKEDIQKAQVSGQGDSLHEHIANLAGSPAIKKGILQTVKVVDELVKVMGRHKPENIVIEMARENQTTQKGQKNSRERMKRIEEGIKELGSQILKEHPVENTQLQNEKLYLYYLQNGRDMYVDQELDINRLSDYDVDHIVPQSFLKDDSIDNKVLTRSDKARGKSDNVPSEEVVKKMKNYWRQLLNAKLITQRKFDNLTKAERGGLSELDKAGFIKRQLVETRQITKHVAQILDSRMNTKYDENDKLIREVKVITLKSKLVSDFRKDFQFYKVREINNYHHAHDAYLNAVVGTALIKKYPKLESEFVYGDYKVYDVRKMIAKSEQEIGKATAKYFFYSNIMNFFKTEITLANGEIRKRPLIETNGETGEIVWDKGRDFATVRKVLSMPQVNIVKKTEVQTGGFSKESILPKRNSDKLIARKKDWDPKKYGGFDSPTVAYSVLVVAKVEKGKSKKLKSVKELLGITIMERSSFEKNPIDFLEAKGYKEVKKDLIIKLPKYSLFELENGRKRMLASAGELQKGNELALPSKYVNFLYLASHYEKLKGSPEDNEQKQLFVEQHKHYLDEIIEQISEFSKRVILADANLDKVLSAYNKHRDKPIREQAENIIHLFTLTNLGAPAAFKYFDTTIDRKRYTSTKEVLDATLIHQSITGLYETRIDLSQLGGDGGGGSGSSGGTLNIEDEHRLHETSKEPDVSLGSTWLSDFPQAWAETGGMGLAVRQAPLIIPLKATSTPVSIKQYPMSQEARLGIKPHIQRLLDQGILVPCQSPWNTPLLPVKKPGTNDYRPVQDLREVNKRVEDIHPTVPNPYNLLSGLPPSHQWYTVLDLKDAFFCLRLHPTSQPLFAFEWRDPEMGISGQLTWTRLPQGFKNSPTLFNEALHRDLADFRIQHPDLILLQYVDDLLLAATSELDCQQGTRALLQTLGNLGYRASAKKAQICQKQVKYLGYLLKEGQRWLTEARKETVMGQPTPKTPRQLREFLGKAGFCRLFIPGFAEMAAPLYPLTKPGTLFNWGPDQQKAYQEIKQALLTAPALGLPDLTKPFELFVDEKQGYAKGVLTQKLGPWRRPVAYLSKKLDPVAAGWPPCLRMVAAIAVLTKDAGKLTMGQPLVILAPHAVEALVKQPPDRWLSNARMTHYQALLLDTDRVQFGPVVALNPATLLPLPEEGLQHNCLDILAEAHGTRPDLTDQPLPDADHTWYTDGSSLLQEGQRKAGAAVTTETEVIWAKALPAGTSAQRAELIALTQALKMAEGKKLNVYTDSRYAFATAHIHGEIYRRRGWLTSEGKEIKNKDEILALLKALFLPKRLSIIHCPGHQKGHSAEARGNRMADQAARKAAITETPDTSTLLAGKRTADGSEFEKRTADGSEFESPKKKAKVE

SEQ ID NO: 3114 - protein, 2090 aa, synthetic construct; identical to SEQ ID NO: 2834

SEQ ID NO: 3115 - protein, 2096 aa, synthetic construct
MPAAKRVKLDGGDKKYSIGLDIGTNSVGWAVITDEYKVPSKKFKVLGNTDRHSIKKNLIGALLFDSGETAEATRLKRTARRRYTRRKNRICYLQEIFSNEMAKVDDSFFHRLEESFLVEEDKKHERHPIFGNIVDEVAYHEKYPTIYHLRKKLVDSTDKADLRLIYLALAHMIKFRGHFLIEGDLNPDNSDVDKLFIQLVQTYNQLFEENPINASGVDAKAILSARLSKSRRLENLIAQLPGEKKNGLFGNLIALSLGLTPNFKSNFDLAEDAKLQLSKDTYDDDLDNLLAQIGDQYADLFLAAKNLSDAILLSDILRVNTEITKAPLSASMIKRYDEHHQDLTLLKALVRQQLPEKYKEIFFDQSKNGYAGYIDGGASQEEFYKFIKPILEKMDGTEELLVKLNREDLLRKQRTFDNGSIPHQIHLGELHAILRRQEDFYPFLKDNREKIEKILTFRIPYYVGPLARGNSRFAWMTRKSEETITPWNFEEVVDKGASAQSFIERMTNFDKNLPNEKVLPKHSLLYEYFTVYNELTKVKYVTEGMRKPAFLSGEQKKAIVDLLFKTNRKVTVKQLKEDYFKKIECFDSVEISGVEDRFNASLGTYHDLLKIIKDKDFLDNEENEDILEDIVLTLTLFEDREMIEERLKTYAHLFDDKVMKQLKRRRYTGWGRLSRKLINGIRDKQSGKTILDFLKSDGFANRNFMQLIHDDSLTFKEDIQKAQVSGQGDSLHEHIANLAGSPAIKKGILQTVKVVDELVKVMGRHKPENIVIEMARENQTTQKGQKNSRERMKRIEEGIKELGSQILKEHPVENTQLQNEKLYLYYLQNGRDMYVDQELDINRLSDYDVDHIVPQSFLKDDSIDNKVLTRSDKARGKSDNVPSEEVVKKMKNYWRQLLNAKLITQRKFDNLTKAERGGLSELDKAGFIKRQLVETRQITKHVAQILDSRMNTKYDENDKLIREVKVITLKSKLVSDFRKDFQFYKVREINNYHHAHDAYLNAVVGTALIKKYPKLESEFVYGDYKVYDVRKMIAKSEQEIGKATAKYFFYSNIMNFFKTEITLANGEIRKRPLIETNGETGEIVWDKGRDFATVRKVLSMPQVNIVKKTEVQTGGFSKESILPKRNSDKLIARKKDWDPKKYGGFDSPTVAYSVLVVAKVEKGKSKKLKSVKELLGITIMERSSFEKNPIDFLEAKGYKEVKKDLIIKLPKYSLFELENGRKRMLASAGELQKGNELALPSKYVNFLYLASHYEKLKGSPEDNEQKQLFVEQHKHYLDEIIEQISEFSKRVILADANLDKVLSAYNKHRDKPIREQAENIIHLFTLTNLGAPAAFKYFDTTIDRKRYTSTKEVLDATLIHQSITGLYETRIDLSQLGGDGGGGGGGSEAAAKGGTLNIEDEHRLHETSKEPDVSLGSTWLSDFPQAWAETGGMGLAVRQAPLIIPLKATSTPVSIKQYPMSQEARLGIKPHIQRLLDQGILVPCQSPWNTPLLPVKKPGTNDYRPVQDLREVNKRVEDIHPTVPNPYNLLSGLPPSHQWYTVLDLKDAFFCLRLHPTSQPLFAFEWRDPEMGISGQLTWTRLPQGFKNSPTLFNEALHRDLADFRIQHPDLILLQYVDDLLLAATSELDCQQGTRALLQTLGNLGYRASAKKAQICQKQVKYLGYLLKEGQRWLTEARKETVMGQPTPKTPRQLREFLGKAGFCRLFIPGFAEMAAPLYPLTKPGTLFNWGPDQQKAYQEIKQALLTAPALGLPDLTKPFELFVDEKQGYAKGVLTQKLGPWRRPVAYLSKKLDPVAAGWPPCLRMVAAIAVLTKDAGKLTMGQPLVILAPHAVEALVKQPPDRWLSNARMTHYQALLLDTDRVQFGPVVALNPATLLPLPEEGLQHNCLDILAEAHGTRPDLTDQPLPDADHTWYTDGSSLLQEGQRKAGAAVTTETEVIWAKALPAGTSAQRAELIALTQALKMAEGKKLNVYTDSRYAFATAHIHGEIYRRRGWLTSEGKEIKNKDEILALLKALFLPKRLSIIHCPGHQKGHSAEARGNRMADQAARKAAITETPDTSTLLAGKRTADGSEFEKRTADGSEFESPKKKAKVE

SEQ ID NO: 3116 - protein, 2096 aa, synthetic construct; identical to SEQ ID NO: 2789

SEQ ID NO: 3117 - protein, 2094 aa, synthetic construct; identical to SEQ ID NO: 2848

SEQ ID NO: 3118 - protein, 2096 aa, synthetic construct; identical to SEQ ID NO: 2805

SEQ ID NO: 3119 - protein, 2091 aa, synthetic construct; identical to SEQ ID NO: 2861

SEQ ID NO: 3120 - protein, 2115 aa, synthetic construct; identical to SEQ ID NO: 2813

SEQ ID NO: 3121 - protein, 2094 aa, synthetic construct
MPAAKRVKLDGGDKKYSIGLDIGTNSVGWAVITDEYKVPSKKFKVLGNTDRHSIKKNLIGALLFDSGETAEATRLKRTARRRYTRRKNRICYLQEIFSNEMAKVDDSFFHRLEESFLVEEDKKHERHPIFGNIVDEVAYHEKYPTIYHLRKKLVDSTDKADLRLIYLALAHMIKFRGHFLIEGDLNPDNSDVDKLFIQLVQTYNQLFEENPINASGVDAKAILSARLSKSRRLENLIAQLPGEKKNGLFGNLIALSLGLTPNFKSNFDLAEDAKLQLSKDTYDDDLDNLLAQIGDQYADLFLAAKNLSDAILLSDILRVNTEITKAPLSASMIKRYDEHHQDLTLLKALVRQQLPEKYKEIFFDQSKNGYAGYIDGGASQEEFYKFIKPILEKMDGTEELLVKLNREDLLRKQRTFDNGSIPHQIHLGELHAILRRQEDFYPFLKDNREKIEKILTFRIPYYVGPLARGNSRFAWMTRKSEETITPWNFEEVVDKGASAQSFIERMTNFDKNLPNEKVLPKHSLLYEYFTVYNELTKVKYVTEGMRKPAFLSGEQKKAIVDLLFKTNRKVTVKQLKEDYFKKIECFDSVEISGVEDRFNASLGTYHDLLKIIKDKDFLDNEENEDILEDIVLTLTLFEDREMIEERLKTYAHLFDDKVMKQLKRRRYTGWGRLSRKLINGIRDKQSGKTILDFLKSDGFANRNFMQLIHDDSLTFKEDIQKAQVSGQGDSLHEHIANLAGSPAIKKGILQTVKVVDELVKVMGRHKPENIVIEMARENQTTQKGQKNSRERMKRIEEGIKELGSQILKEHPVENTQLQNEKLYLYYLQNGRDMYVDQELDINRLSDYDVDHIVPQSFLKDDSIDNKVLTRSDKARGKSDNVPSEEVVKKMKNYWRQLLNAKLITQRKFDNLTKAERGGLSELDKAGFIKRQLVETRQITKHVAQILDSRMNTKYDENDKLIREVKVITLKSKLVSDFRKDFQFYKVREINNYHHAHDAYLNAVVGTALIKKYPKLESEFVYGDYKVYDVRKMIAKSEQEIGKATAKYFFYSNIMNFFKTEITLANGEIRKRPLIETNGETGEIVWDKGRDFATVRKVLSMPQVNIVKKTEVQTGGFSKESILPKRNSDKLIARKKDWDPKKYGGFDSPTVAYSVLVVAKVEKGKSKKLKSVKELLGITIMERSSFEKNPIDFLEAKGYKEVKKDLIIKLPKYSLFELENGRKRMLASAGELQKGNELALPSKYVNFLYLASHYEKLKGSPEDNEQKQLFVEQHKHYLDEIIEQISEFSKRVILADANLDKVLSAYNKHRDKPIREQAENIIHLFTLTNLGAPAAFKYFDTTIDRKRYTSTKEVLDATLIHQSITGLYETRIDLSQLGGDGGGGSGGGGSSGGTLNIEDEHRLHETSKEPDVSLGSTWLSDFPQAWAETGGMGLAVRQAPLIIPLKATSTPVSIKQYPMSQEARLGIKPHIQRLLDQGILVPCQSPWNTPLLPVKKPGTNDYRPVQDLREVNKRVEDIHPTVPNPYNLLSGLPPSHQWYTVLDLKDAFFCLRLHPTSQPLFAFEWRDPEMGISGQLTWTRLPQGFKNSPTLFNEALHRDLADFRIQHPDLILLQYVDDLLLAATSELDCQQGTRALLQTLGNLGYRASAKKAQICQKQVKYLGYLLKEGQRWLTEARKETVMGQPTPKTPRQLREFLGKAGFCRLFIPGFAEMAAPLYPLTKPGTLFNWGPDQQKAYQEIKQALLTAPALGLPDLTKPFELFVDEKQGYAKGVLTQKLGPWRRPVAYLSKKLDPVAAGWPPCLRMVAAIAVLTKDAGKLTMGQPLVILAPHAVEALVKQPPDRWLSNARMTHYQALLLDTDRVQFGPVVALNPATLLPLPEEGLQHNCLDILAEAHGTRPDLTDQPLPDADHTWYTDGSSLLQEGQRKAGAAVTTETEVIWAKALPAGTSAQRAELIALTQALKMAEGKKLNVYTDSRYAFATAHIHGEIYRRRGWLTSEGKEIKNKDEILALLKALFLPKRLSIIHCPGHQKGHSAEARGNRMADQAARKAAITETPDTSTLLAGKRTADGSEFEKRTADGSEFESPKKKAKVE

SEQ ID NO: 3122 - protein, 2094 aa, synthetic construct
MPAAKRVKLDGGDKKYSIGLDIGTNSVGWAVITDEYKVPSKKFKVLGNTDRHSIKKNLIGALLFDSGETAEATRLKRTARRRYTRRKNRICYLQEIFSNEMAKVDDSFFHRLEESFLVEEDKKHERHPIFGNIVDEVAYHEKYPTIYHLRKKLVDSTDKADLRLIYLALAHMIKFRGHFLIEGDLNPDNSDVDKLFIQLVQTYNQLFEENPINASGVDAKAILSARLSKSRRLENLIAQLPGEKKNGLFGNLIALSLGLTPNFKSNFDLAEDAKLQLSKDTYDDDLDNLLAQIGDQYADLFLAAKNLSDAILLSDILRVNTEITKAPLSASMIKRYDEHHQDLTLLKALVRQQLPEKYKEIFFDQSKNGYAGYIDGGASQEEFYKFIKPILEKMDGTEELLVKLNREDLLRKQRTFDNGSIPHQIHLGELHAILRRQEDFYPFLKDNREKIEKILTFRIPYYVGPLARGNSRFAWMTRKSEETITPWNFEEVVDKGASAQSFIERMTNFDKNLPNEKVLPKHSLLYEYFTVYNELTKVKYVTEGMRKPAFLSGEQKKAIVDLLFKTNRKVTVKQLKEDYFKKIECFDSVEISGVEDRFNASLGTYHDLLKIIKDKDFLDNEENEDILEDIVLTLTLFEDREMIEERLKTYAHLFDDKVMKQLKRRRYTGWGRLSRKLINGIRDKQSGKTILDFLKSDGFANRNFMQLIHDDSLTFKEDIQKAQVSGQGDSLHEHIANLAGSPAIKKGILQTVKVVDELVKVMGRHKPENIVIEMARENQTTQKGQKNSRERMKRIEEGIKELGSQILKEHPVENTQLQNEKLYLYYLQNGRDMYVDQELDINRLSDYDVDHIVPQSFLKDDSIDNKVLTRSDKARGKSDNVPSEEVVKKMKNYWRQLLNAKLITQRKFDNLTKAERGGLSELDKAGFIKRQLVETRQITKHVAQILDSRMNTKYDENDKLIREVKVITLKSKLVSDFRKDFQFYKVREINNYHHAHDAYLNAVVGTALIKKYPKLESEFVYGDYKVYDVRKMIAKSEQEIGKATAKYFFYSNIMNFFKTEITLANGEIRKRPLIETNGETGEIVWDKGRDFATVRKVLSMPQVNIVKKTEVQTGGFSKESILPKRNSDKLIARKKDWDPKKYGGFDSPTVAYSVLVVAKVEKGKSKKLKSVKELLGITIMERSSFEKNPIDFLEAKGYKEVKKDLIIKLPKYSLFELENGRKRMLASAGELQKGNELALPSKYVNFLYLASHYEKLKGSPEDNEQKQLFVEQHKHYLDEIIEQISEFSKRVILADANLDKVLSAYNKHRDKPIREQAENIIHLFTLTNLGAPAAFKYFDTTIDRKRYTSTKEVLDATLIHQSITGLYETRIDLSQLGGDGGGGSGSSPAPGGTLNIEDEHRLHETSKEPDVSLGSTWLSDFPQAWAETGGMGLAVRQAPLIIPLKATSTPVSIKQYPMSQEARLGIKPHIQRLLDQGILVPCQSPWNTPLLPVKKPGTNDYRPVQDLREVNKRVEDIHPTVPNPYNLLSGLPPSHQWYTVLDLKDAFFCLRLHPTSQPLFAFEWRDPEMGISGQLTWTRLPQGFKNSPTLFNEALHRDLADFRIQHPDLILLQYVDDLLLAATSELDCQQGTRALLQTLGNLGYRASAKKAQICQKQVKYLGYLLKEGQRWLTEARKETVMGQPTPKTPRQLREFLGKAGFCRLFIPGFAEMAAPLYPLTKPGTLFNWGPDQQKAYQEIKQALLTAPALGLPDLTKPFELFVDEKQGYAKGVLTQKLGPWRRPVAYLSKKLDPVAAGWPPCLRMVAAIAVLTKDAGKLTMGQPLVILAPHAVEALVKQPPDRWLSNARMTHYQALLLDTDRVQFGPVVALNPATLLPLPEEGLQHNCLDILAEAHGTRPDLTDQPLPDADHTWYTDGSSLLQEGQRKAGAAVTTETEVIWAKALPAGTSAQRAELIALTQALKMAEGKKLNVYTDSRYAFATAHIHGEIYRRRGWLTSEGKEIKNKDEILALLKALFLPKRLSIIHCPGHQKGHSAEARGNRMADQAARKAAITETPDTSTLLAGKRTADGSEFEKRTADGSEFESPKKKAKVE

SEQ ID NO: 3123 - protein, 2090 aa, synthetic construct; identical to SEQ ID NO: 2823

SEQ ID NO: 3124 - protein, 2094 aa, synthetic construct; identical to SEQ ID NO: 2833

SEQ ID NO: 3125 - protein, 2096 aa, synthetic construct; identical to SEQ ID NO: 2794

SEQ ID NO: 3126 - protein, 2100 aa, synthetic construct; identical to SEQ ID NO: 2802

SEQ ID NO: 3127 - protein, 2096 aa, synthetic construct; identical to SEQ ID NO: 2839

SEQ ID NO: 3128 - protein, 2094 aa, synthetic construct; identical to SEQ ID NO: 2841

SEQ ID NO: 3129 - protein, 2096 aa, synthetic construct
MPAAKRVKLDGGDKKYSIGLDIGTNSVGWAVITDEYKVPSKKFKVLGNTDRHSIKKNLIGALLFDSGETAEATRLKRTARRRYTRRKNRICYLQEIFSNEMAKVDDSFFHRLEESFLVEEDKKHERHPIFGNIVDEVAYHEKYPTIYHLRKKLVDSTDKADLRLIYLALAHMIKFRGHFLIEGDLNPDNSDVDKLFIQLVQTYNQLFEENPINASGVDAKAILSARLSKSRRLENLIAQLPGEKKNGLFGNLIALSLGLTPNFKSNFDLAEDAKLQLSKDTYDDDLDNLLAQIGDQYADLFLAAKNLSDAILLSDILRVNTEITKAPLSASMIKRYDEHHQDLTLLKALVRQQLPEKYKEIFFDQSKNGYAGYIDGGASQEEFYKFIKPILEKMDGTEELLVKLNREDLLRKQRTFDNGSIPHQIHLGELHAILRRQEDFYPFLKDNREKIEKILTFRIPYYVGPLARGNSRFAWMTRKSEETITPWNFEEVVDKGASAQSFIERMTNFDKNLPNEKVLPKHSLLYEYFTVYNELTKVKYVTEGMRKPAFLSGEQKKAIVDLLFKTNRKVTVKQLKEDYFKKIECFDSVEISGVEDRFNASLGTYHDLLKIIKDKDFLDNEENEDILEDIVLTLTLFEDREMIEERLKTYAHLFDDKVMKQLKRRRYTGWGRLSRKLINGIRDKQSGKTILDFLKSDGFANRNFMQLIHDDSLTFKEDIQKAQVSGQGDSLHEHIANLAGSPAIKKGILQTVKVVDELVKVMGRHKPENIVIEMARENQTTQKGQKNSRERMKRIEEGIKELGSQILKEHPVENTQLQNEKLYLYYLQNGRDMYVDQELDINRLSDYDVDHIVPQSFLKDDSIDNKVLTRSDKARGKSDNVPSEEVVKKMKNYWRQLLNAKLITQRKFDNLTKAERGGLSELDKAGFIKRQLVETRQITKHVAQILDSRMNTKYDENDKLIREVKVITLKSKLVSDFRKDFQFYKVREINNYHHAHDAYLNAVVGTALIKKYPKLESEFVYGDYKVYDVRKMIAKSEQEIGKATAKYFFYSNIMNFFKTEITLANGEIRKRPLIETNGETGEIVWDKGRDFATVRKVLSMPQVNIVKKTEVQTGGFSKESILPKRNSDKLIARKKDWDPKKYGGFDSPTVAYSVLVVAKVEKGKSKKLKSVKELLGITIMERSSFEKNPIDFLEAKGYKEVKKDLIIKLPKYSLFELENGRKRMLASAGELQKGNELALPSKYVNFLYLASHYEKLKGSPEDNEQKQLFVEQHKHYLDEIIEQISEFSKRVILADANLDKVLSAYNKHRDKPIREQAENIIHLFTLTNLGAPAAFKYFDTTIDRKRYTSTKEVLDATLIHQSITGLYETRIDLSQLGGDGGGGSGGGEAAAKGGTLNIEDEHRLHETSKEPDVSLGSTWLSDFPQAWAETGGMGLAVRQAPLIIPLKATSTPVSIKQYPMSQEARLGIKPHIQRLLDQGILVPCQSPWNTPLLPVKKPGTNDYRPVQDLREVNKRVEDIHPTVPNPYNLLSGLPPSHQWYTVLDLKDAFFCLRLHPTSQPLFAFEWRDPEMGISGQLTWTRLPQGFKNSPTLFNEALHRDLADFRIQHPDLILLQYVDDLLLAATSELDCQQGTRALLQTLGNLGYRASAKKAQICQKQVKYLGYLLKEGQRWLTEARKETVMGQPTPKTPRQLREFLGKAGFCRLFIPGFAEMAAPLYPLTKPGTLFNWGPDQQKAYQEIKQALLTAPALGLPDLTKPFELFVDEKQGYAKGVLTQKLGPWRRPVAYLSKKLDPVAAGWPPCLRMVAAIAVLTKDAGKLTMGQPLVILAPHAVEALVKQPPDRWLSNARMTHYQALLLDTDRVQFGPVVALNPATLLPLPEEGLQHNCLDILAEAHGTRPDLTDQPLPDADHTWYTDGSSLLQEGQRKAGAAVTTETEVIWAKALPAGTSAQRAELIALTQALKMAEGKKLNVYTDSRYAFATAHIHGEIYRRRGWLTSEGKEIKNKDEILALLKALFLPKRLSIIHCPGHQKGHSAEARGNRMADQAARKAAITETPDTSTLLAGKRTADGSEFEKRTADGSEFESPKKKAKVE

SEQ ID NO: 3130 - protein, 2094 aa, synthetic construct; identical to SEQ ID NO: 2801

SEQ ID NO: 3131 - protein, 2096 aa, synthetic construct
MPAAKRVKLDGGDKKYSIGLDIGTNSVGWAVITDEYKVPSKKFKVLGNTDRHSIKKNLIGALLFDSGETAEATRLKRTARRRYTRRKNRICYLQEIFSNEMAKVDDSFFHRLEESFLVEEDKKHERHPIFGNIVDEVAYHEKYPTIYHLRKKLVDSTDKADLRLIYLALAHMIKFRGHFLIEGDLNPDNSDVDKLFIQLVQTYNQLFEENPINASGVDAKAILSARLSKSRRLENLIAQLPGEKKNGLFGNLIALSLGLTPNFKSNFDLAEDAKLQLSKDTYDDDLDNLLAQIGDQYADLFLAAKNLSDAILLSDILRVNTEITKAPLSASMIKRYDEHHQDLTLLKALVRQQLPEKYKEIFFDQSKNGYAGYIDGGASQEEFYKFIKPILEKMDGTEELLVKLNREDLLRKQRTFDNGSIPHQIHLGELHAILRRQEDFYPFLKDNREKIEKILTFRIPYYVGPLARGNSRFAWMTRKSEETITPWNFEEVVDKGASAQSFIERMTNFDKNLPNEKVLPKHSLLYEYFTVYNELTKVKYVTEGMRKPAFLSGEQKKAIVDLLFKTNRKVTVKQLKEDYFKKIECFDSVEISGVEDRFNASLGTYHDLLKIIKDKDFLDNEENEDILEDIVLTLTLFEDREMIEERLKTYAHLFDDKVMKQLKRRRYTGWGRLSRKLINGIRDKQSGKTILDFLKSDGFANRNFMQLIHDDSLTFKEDIQKAQVSGQGDSLHEHIANLAGSPAIKKGILQTVKVVDELVKVMGRHKPENIVIEMARENQTTQKGQKNSRERMKRIEEGIKELGSQILKEHPVENTQLQNEKLYLYYLQNGRDMYVDQELDINRLSDYDVDHIVPQSFLKDDSIDNKVLTRSDKARGKSDNVPSEEVVKKMKNYWRQLLNAKLITQRKFDNLTKAERGGLSELDKAGFIKRQLVETRQITKHVAQILDSRMNTKYDENDKLIREVKVITLKSKLVSDFRKDFQFYKVREINNYHHAHDAYLNAVVGTALIKKYPKLESEFVYGDYKVYDVRKMIAKSEQEIGKATAKYFFYSNIMNFFKTEITLANGEIRKRPLIETNGETGEIVWDKGRDFATVRKVLSMPQVNIVKKTEVQTGGFSKESILPKRNSDKLIARKKDWDPKKYGGFDSPTVAYSVLVVAKVEKGKSKKLKSVKELLGITIMERSSFEKNPIDFLEAKGYKEVKKDLIIKLPKYSLFELENGRKRMLASAGELQKGNELALPSKYVNFLYLASHYEKLKGSPEDNEQKQLFVEQHKHYLDEIIEQISEFSKRVILADANLDKVLSAYNKHRDKPIREQAENIIHLFTLTNLGAPAAFKYFDTTIDRKRYTSTKEVLDATLIHQSITGLYETRIDLSQLGGDGGGSSEAAAKGGSGGTLNIEDEHRLHETSKEPDVSLGSTWLSDFPQAWAETGGMGLAVRQAPLIIPLKATSTPVSIKQYPMSQEARLGIKPHIQRLLDQGILVPCQSPWNTPLLPVKKPGTNDYRPVQDLREVNKRVEDIHPTVPNPYNLLSGLPPSHQWYTVLDLKDAFFCLRLHPTSQPLFAFEWRDPEMGISGQLTWTRLPQGFKNSPTLFNEALHRDLADFRIQHPDLILLQYVDDLLLAATSELDCQQGTRALLQTLGNLGYRASAKKAQICQKQVKYLGYLLKEGQRWLTEARKETVMGQPTPKTPRQLREFLGKAGFCRLFIPGFAEMAAPLYPLTKPGTLFNWGPDQQKAYQEIKQALLTAPALGLPDLTKPFELFVDEKQGYAKGVLTQKLGPWRRPVAYLSKKLDPVAAGWPPCLRMVAAIAVLTKDAGKLTMGQPLVILAPHAVEALVKQPPDRWLSNARMTHYQALLLDTDRVQFGPVVALNPATLLPLPEEGLQHNCLDILAEAHGTRPDLTDQPLPDADHTWYTDGSSLLQEGQRKAGAAVTTETEVIWAKALPAGTSAQRAELIALTQALKMAEGKKLNVYTDSRYAFATAHIHGEIYRRRGWLTSEGKEIKNKDEILALLKALFLPKRLSIIHCPGHQKGHSAEARGNRMADQAARKAAITETPDTSTLLAGKRTADGSEFEKRTADGSEFESPKKKAKVE

SEQ ID NO: 3132 - protein, 2118 aa, synthetic construct
MPAAKRVKLDGGDKKYSIGLDIGTNSVGWAVITDEYKVPSKKFKVLGNTDRHSIKKNLIGALLFDSGETAEATRLKRTARRRYTRRKNRICYLQEIFSNEMAKVDDSFFHRLEESFLVEEDKKHERHPIFGNIVDEVAYHEKYPTIYHLRKKLVDSTDKADLRLIYLALAHMIKFRGHFLIEGDLNPDNSDVDKLFIQLVQTYNQLFEENPINASGVDAKAILSARLSKSRRLENLIAQLPGEKKNGLFGNLIALSLGLTPNFKSNFDLAEDAKLQLSKDTYDDDLDNLLAQIGDQYADLFLAAKNLSDAILLSDILRVNTEITKAPLSASMIKRYDEHHQDLTLLKALVRQQLPEKYKEIFFDQSKNGYAGYIDGGASQEEFYKFIKPILEKMDGTEELLVKLNREDLLRKQRTFDNGSIPHQIHLGELHAILRRQEDFYPFLKDNREKIEKILTFRIPYYVGPLARGNSRFAWMTRKSEETITPWNFEEVVDKGASAQSFIERMTNFDKNLPNEKVLPKHSLLYEYFTVYNELTKVKYVTEGMRKPAFLSGEQKKAIVDLLFKTNRKVTVKQLKEDYFKKIECFDSVEISGVEDRFNASLGTYHDLLKIIKDKDFLDNEENEDILEDIVLTLTLFEDREMIEERLKTYAHLFDDKVMKQLKRRRYTGWGRLSRKLINGIRDKQSGKTILDFLKSDGFANRNFMQLIHDDSLTFKEDIQKAQVSGQGDSLHEHIANLAGSPAIKKGILQTVKVVDELVKVMGRHKPENIVIEMARENQTTQKGQKNSRERMKRIEEGIKELGSQILKEHPVENTQLQNEKLYLYYLQNGRDMYVDQELDINRLSDYDVDHIVPQSFLKDDSIDNKVLTRSDKARGKSDNVPSEEVVKKMKNYWRQLLNAKLITQRKFDNLTKAERGGLSELDKAGFIKRQLVETRQITKHVAQILDSRMNTKYDENDKLIREVKVITLKSKLVSDFRKDFQFYKVREINNYHHAHDAYLNAVVGTALIKKYPKLESEFVYGDYKVYDVRKMIAKSEQEIGKATAKYFFYSNIMNFFKTEITLANGEIRKRPLIETNGETGEIVWDKGRDFATVRKVLSMPQVNIVKKTEVQTGGFSKESILPKRNSDKLIARKKDWDPKKYGGFDSPTVAYSVLVVAKVEKGKSKKLKSVKELLGITIMERSSFEKNPIDFLEAKGYKEVKKDLIIKLPKYSLFELENGRKRMLASAGELQKGNELALPSKYVNFLYLASHYEKLKGSPEDNEQKQLFVEQHKHYLDEIIEQISEFSKRVILADANLDKVLSAYNKHRDKPIREQAENIIHLFTLTNLGAPAAFKYFDTTIDRKRYTSTKEVLDATLIHQSITGLYETRIDLSQLGGDGGSGGSSGGSSGSETPGTSESATPESSGGSSGGSSGGTLNIEDEHRLHETSKEPDVSLGSTWLSDFPQAWAETGGMGLAVRQAPLIIPLKATSTPVSIKQYPMSQEARLGIKPHIQRLLDQGILVPCQSPWNTPLLPVKKPGTNDYRPVQDLREVNKRVEDIHPTVPNPYNLLSGLPPSHQWYTVLDLKDAFFCLRLHPTSQPLFAFEWRDPEMGISGQLTWTRLPQGFKNSPTLFNEALHRDLADFRIQHPDLILLQYVDDLLLAATSELDCQQGTRALLQTLGNLGYRASAKKAQICQKQVKYLGYLLKEGQRWLTEARKETVMGQPTPKTPRQLREFLGKAGFCRLFIPGFAEMAAPLYPLTKPGTLFNWGPDQQKAYQEIKQALLTAPALGLPDLTKPFELFVDEKQGYAKGVLTQKLGPWRRPVAYLSKKLDPVAAGWPPCLRMVAAIAVLTKDAGKLTMGQPLVILAPHAVEALVKQPPDRWLSNARMTHYQALLLDTDRVQFGPVVALNPATLLPLPEEGLQHNCLDILAEAHGTRPDLTDQPLPDADHTWYTDGSSLLQEGQRKAGAAVTTETEVIWAKALPAGTSAQRAELIALTQALKMAEGKKLNVYTDSRYAFATAHIHGEIYRRRGWLTSEGKEIKNKDEILALLKALFLPKRLSIIHCPGHQKGHSAEARGNRMADQAARKAAITETPDTSTLLAGKRTADGSEFEKRTADGSEFESPKKKAKVE

SEQ ID NO: 3133 - protein, 2094 aa, synthetic construct; identical to SEQ ID NO: 2859

SEQ ID NO: 3134 - protein, 2094 aa, synthetic construct; identical to SEQ ID NO: 2854

SEQ ID NO: 3135 - protein, 2091 aa, synthetic construct; identical to SEQ ID NO: 2832

SEQ ID NO: 3136 - protein, 2096 aa, synthetic construct
MPAAKRVKLDGGDKKYSIGLDIGTNSVGWAVITDEYKVPSKKFKVLGNTDRHSIKKNLIGALLFDSGETAEATRLKRTARRRYTRRKNRICYLQEIFSNEMAKVDDSFFHRLEESFLVEEDKKHERHPIFGNIVDEVAYHEKYPTIYHLRKKLVDSTDKADLRLIYLALAHMIKFRGHFLIEGDLNPDNSDVDKLFIQLVQTYNQLFEENPINASGVDAKAILSARLSKSRRLENLIAQLPGEKKNGLFGNLIALSLGLTPNFKSNFDLAEDAKLQLSKDTYDDDLDNLLAQIGDQYADLFLAAKNLSDAILLSDILRVNTEITKAPLSASMIKRYDEHHQDLTLLKALVRQQLPEKYKEIFFDQSKNGYAGYIDGGASQEEFYKFIKPILEKMDGTEELLVKLNREDLLRKQRTFDNGSIPHQIHLGELHAILRRQEDFYPFLKDNREKIEKILTFRIPYYVGPLARGNSRFAWMTRKSEETITPWNFEEVVDKGASAQSFIERMTNFDKNLPNEKVLPKHSLLYEYFTVYNELTKVKYVTEGMRKPAFLSGEQKKAIVDLLFKTNRKVTVKQLKEDYFKKIECFDSVEISGVEDRFNASLGTYHDLLKIIKDKDFLDNEENEDILEDIVLTLTLFEDREMIEERLKTYAHLFDDKVMKQLKRRRYTGWGRLSRKLINGIRDKQSGKTILDFLKSDGFANRNFMQLIHDDSLTFKEDIQKAQVSGQGDSLHEHIANLAGSPAIKKGILQTVKVVDELVKVMGRHKPENIVIEMARENQTTQKGQKNSRERMKRIEEGIKELGSQILKEHPVENTQLQNEKLYLYYLQNGRDMYVDQELDINRLSDYDVDHIVPQSFLKDDSIDNKVLTRSDKARGKSDNVPSEEVVKKMKNYWRQLLNAKLITQRKFDNLTKAERGGLSELDKAGFIKRQLVETRQITKHVAQILDSRMNTKYDENDKLIREVKVITLKSKLVSDFRKDFQFYKVREINNYHHAHDAYLNAVVGTALIKKYPKLESEFVYGDYKVYDVRKMIAKSEQEIGKATAKYFFYSNIMNFFKTEITLANGEIRKRPLIETNGETGEIVWDKGRDFATVRKVLSMPQVNIVKKTEVQTGGFSKESILPKRNSDKLIARKKDWDPKKYGGFDSPTVAYSVLVVAKVEKGKSKKLKSVKELLGITIMERSSFEKNPIDFLEAKGYKEVKKDLIIKLPKYSLFELENGRKRMLASAGELQKGNELALPSKYVNFLYLASHYEKLKGSPEDNEQKQLFVEQHKHYLDEIIEQISEFSKRVILADANLDKVLSAYNKHRDKPIREQAENIIHLFTLTNLGAPAAFKYFDTTIDRKRYTSTKEVLDATLIHQSITGLYETRIDLSQLGGDGGGGGPAPEAAAKGGTLNIEDEHRLHETSKEPDVSLGSTWLSDFPQAWAETGGMGLAVRQAPLIIPLKATSTPVSIKQYPMSQEARLGIKPHIQRLLDQGILVPCQSPWNTPLLPVKKPGTNDYRPVQDLREVNKRVEDIHPTVPNPYNLLSGLPPSHQWYTVLDLKDAFFCLRLHPTSQPLFAFEWRDPEMGISGQLTWTRLPQGFKNSPTLFNEALHRDLADFRIQHPDLILLQYVDDLLLAATSELDCQQGTRALLQTLGNLGYRASAKKAQICQKQVKYLGYLLKEGQRWLTEARKETVMGQPTPKTPRQLREFLGKAGFCRLFIPGFAEMAAPLYPLTKPGTLFNWGPDQQKAYQEIKQALLTAPALGLPDLTKPFELFVDEKQGYAKGVLTQKLGPWRRPVAYLSKKLDPVAAGWPPCLRMVAAIAVLTKDAGKLTMGQPLVILAPHAVEALVKQPPDRWLSNARMTHYQALLLDTDRVQFGPVVALNPATLLPLPEEGLQHNCLDILAEAHGTRPDLTDQPLPDADHTWYTDGSSLLQEGQRKAGAAVTTETEVIWAKALPAGTSAQRAELIALTQALKMAEGKKLNVYTDSRYAFATAHIHGEIYRRRGWLTSEGKEIKNKDEILALLKALFLPKRLSIIHCPGHQKGHSAEARGNRMADQAARKAAITETPDTSTLLAGKRTADGSEFEKRTADGSEFESPKKKAKVE

SEQ ID NO: 3137 - protein, 2091 aa, synthetic construct
MPAAKRVKLDGGDKKYSIGLDIGTNSVGWAVITDEYKVPSKKFKVLGNTDRHSIKKNLIGALLFDSGETAEATRLKRTARRRYTRRKNRICYLQEIFSNEMAKVDDSFFHRLEESFLVEEDKKHERHPIFGNIVDEVAYHEKYPTIYHLRKKLVDSTDKADLRLIYLALAHMIKFRGHFLIEGDLNPDNSDVDKLFIQLVQTYNQLFEENPINASGVDAKAILSARLSKSRRLENLIAQLPGEKKNGLFGNLIALSLGLTPNFKSNFDLAEDAKLQLSKDTYDDDLDNLLAQIGDQYADLFLAAKNLSDAILLSDILRVNTEITKAPLSASMIKRYDEHHQDLTLLKALVRQQLPEKYKEIFFDQSKNGYAGYIDGGASQEEFYKFIKPILEKMDGTEELLVKLNREDLLRKQRTFDNGSIPHQIHLGELHAILRRQEDFYPFLKDNREKIEKILTFRIPYYVGPLARGNSRFAWMTRKSEETITPWNFEEVVDKGASAQSFIERMTNFDKNLPNEKVLPKHSLLYEYFTVYNELTKVKYVTEGMRKPAFLSGEQKKAIVDLLFKTNRKVTVKQLKEDYFKKIECFDSVEISGVEDRFNASLGTYHDLLKIIKDKDFLDNEENEDILEDIVLTLTLFEDREMIEERLKTYAHLFDDKVMKQLKRRRYTGWGRLSRKLINGIRDKQSGKTILDFLKSDGFANRNFMQLIHDDSLTFKEDIQKAQVSGQGDSLHEHIANLAGSPAIKKGILQTVKVVDELVKVMGRHKPENIVIEMARENQTTQKGQKNSRERMKRIEEGIKELGSQILKEHPVENTQLQNEKLYLYYLQNGRDMYVDQELDINRLSDYDVDHIVPQSFLKDDSIDNKVLTRSDKARGKSDNVPSEEVVKKMKNYWRQLLNAKLITQRKFDNLTKAERGGLSELDKAGFIKRQLVETRQITKHVAQILDSRMNTKYDENDKLIREVKVITLKSKLVSDFRKDFQFYKVREINNYHHAHDAYLNAVVGTALIKKYPKLESEFVYGDYKVYDVRKMIAKSEQEIGKATAKYFFYSNIMNFFKTEITLANGEIRKRPLIETNGETGEIVWDKGRDFATVRKVLSMPQVNIVKKTEVQTGGFSKESILPKRNSDKLIARKKDWDPKKYGGFDSPTVAYSVLVVAKVEKGKSKKLKSVKELLGITIMERSSFEKNPIDFLEAKGYKEVKKDLIIKLPKYSLFELENGRKRMLASAGELQKGNELALPSKYVNFLYLASHYEKLKGSPEDNEQKQLFVEQHKHYLDEIIEQISEFSKRVILADANLDKVLSAYNKHRDKPIREQAENIIHLFTLTNLGAPAAFKYFDTTIDRKRYTSTKEVLDATLIHQSITGLYETRIDLSQLGGDGGPAPGGGGGTLNIEDEYRLHEISTEPDVSPGSTWLSDFPQAWAETGGMGLAVRQAPLIIPLKATSTPVSIKQYPMSQEAKLGIKPHIQRLLDQGILVPCQSPWNTPLLPVKKPGTNDYRPVQGLREVNKRVEDIHPTVPNPYNLLSGLPTSHRWYTVLDLKDAFFCLRLHPTSQPLFASEWRDPGMGISGQLTWTRLPQGFKNSPTLFDEALHRGLADFRIQHPDLILLQYVDDLLLAATSELDCQQGTRALLKTLGNLGYRASAKKAQICQKQVKYLGYLLREGQRWLTEARKETVMGQPTPKTPRQLREFLGTAGFCRLWIPRFAEMAAPLYPLTKTGTLFNWGPDQQKAYHEIKQALLTAPALGLPDLTKPFELFVDEKQGYAKGVLTQKLGPWRRPVAYLSKKLDPVAAGWPPCLRMVAAIAVLTKDAGKLTMGQPLVILAPHAVEALVKQPPDRWLSNARMTHYQAMLLDTDRVQFGPVVALNPATLLPLPEEGAPHDCLEILAETHGTEPDLTDQPIPDADHTWYTDGSSFLQEGQRKAGAAVTTETEVIWARALPAGTSAQRAELIALTQALKMAEGKRLNVYTDSRYAFATAHIHGEIYKRRGLLTSEGREIKNKSEILALLKALFLPKRLSIIHCLGHQKGDSAEARGNRLADQAAREAAIKTPPDTSTLLAGKRTADGSEFEKRTADGSEFESPKKKAKVE

SEQ ID NO: 3138 - protein, 2088 aa, synthetic construct
MPAAKRVKLDGGDKKYSIGLDIGTNSVGWAVITDEYKVPSKKFKVLGNTDRHSIKKNLIGALLFDSGETAEATRLKRTARRRYTRRKNRICYLQEIFSNEMAKVDDSFFHRLEESFLVEEDKKHERHPIFGNIVDEVAYHEKYPTIYHLRKKLVDSTDKADLRLIYLALAHMIKFRGHFLIEGDLNPDNSDVDKLFIQLVQTYNQLFEENPINASGVDAKAILSARLSKSRRLENLIAQLPGEKKNGLFGNLIALSLGLTPNFKSNFDLAEDAKLQLSKDTYDDDLDNLLAQIGDQYADLFLAAKNLSDAILLSDILRVNTEITKAPLSASMIKRYDEHHQDLTLLKALVRQQLPEKYKEIFFDQSKNGYAGYIDGGASQEEFYKFIKPILEKMDGTEELLVKLNREDLLRKQRTFDNGSIPHQIHLGELHAILRRQEDFYPFLKDNREKIEKILTFRIPYYVGPLARGNSRFAWMTRKSEETITPWNFEEVVDKGASAQSFIERMTNFDKNLPNEKVLPKHSLLYEYFTVYNELTKVKYVTEGMRKPAFLSGEQKKAIVDLLFKTNRKVTVKQLKEDYFKKIECFDSVEISGVEDRFNASLGTYHDLLKIIKDKDFLDNEENEDILEDIVLTLTLFEDREMIEERLKTYAHLFDDKVMKQLKRRRYTGWGRLSRKLINGIRDKQSGKTILDFLKSDGFANRNFMQLIHDDSLTFKEDIQKAQVSGQGDSLHEHIANLAGSPAIKKGILQTVKVVDELVKVMGRHKPENIVIEMARENQTTQKGQKNSRERMKRIEEGIKELGSQILKEHPVENTQLQNEKLYLYYLQNGRDMYVDQELDINRLSDYDVDHIVPQSFLKDDSIDNKVLTRSDKARGKSDNVPSEEVVKKMKNYWRQLLNAKLITQRKFDNLTKAERGGLSELDKAGFIKRQLVETRQITKHVAQILDSRMNTKYDENDKLIREVKVITLKSKLVSDFRKDFQFYKVREINNYHHAHDAYLNAVVGTALIKKYPKLESEFVYGDYKVYDVRKMIAKSEQEIGKATAKYFFYSNIMNFFKTEITLANGEIRKRPLIETNGETGEIVWDKGRDFATVRKVLSMPQVNIVKKTEVQTGGFSKESILPKRNSDKLIARKKDWDPKKYGGFDSPTVAYSVLVVAKVEKGKSKKLKSVKELLGITIMERSSFEKNPIDFLEAKGYKEVKKDLIIKLPKYSLFELENGRKRMLASAGELQKGNELALPSKYVNFLYLASHYEKLKGSPEDNEQKQLFVEQHKHYLDEIIEQISEFSKRVILADANLDKVLSAYNKHRDKPIREQAENIIHLFTLTNLGAPAAFKYFDTTIDRKRYTSTKEVLDATLIHQSITGLYETRIDLSQLGGDGGGGSGGTLNIEDEYRLHEISTEPDVSPGSTWLSDFPQAWAETGGMGLAVRQAPLIIPLKATSTPVSIKQYPMSQEAKLGIKPHIQRLLDQGILVPCQSPWNTPLLPVKKPGTNDYRPVQGLREVNKRVEDIHPTVPNPYNLLSGLPTSHRWYTVLDLKDAFFCLRLHPTSQPLFASEWRDPGMGISGQLTWTRLPQGFKNSPTLFNEALHRGLADFRIQHPDLILLQYVDDLLLAATSELDCQQGTRALLKTLGNLGYRASAKKAQICQKQVKYLGYLLREGQRWLTEARKETVMGQPTPKTPRQLREFLGTAGFCRLWIPRFAEMAAPLYPLTKPGTLFNWGPDQQKAYHEIKQALLTAPALGLPDLTKPFELFVDEKQGYAKGVLTQKLGPWRRPVAYLSKKLDPVAAGWPPCLRMVAAIAVLTKDAGKLTMGQPLVILAPHAVEALVKQPPDRWLSNARMTHYQAMLLDTDRVQFGPVVALNPATLLPLPEEGAPHDCLEILAETHGTEPDLTDQPIPDADHTWYTDGSSFLQEGQRKAGAAVTTETEVIWARALPAGTSAQRAELIALTQALKMAEGKRLNVYTDSRYAFATAHIHGEIYKRRGWLTSEGREIKNKSEILALLKALFLPKRLSIIHCLGHQKGDSAEARGNRLADQAAREAAIKTPPDTSTLLAGKRTADGSEFEKRTADGSEFESPKKKAKVE

SEQ ID NO: 3139 - protein, 2091 aa, synthetic construct
MPAAKRVKLDGGDKKYSIGLDIGTNSVGWAVITDEYKVPSKKFKVLGNTDRHSIKKNLIGALLFDSGETAEATRLKRTARRRYTRRKNRICYLQEIFSNEMAKVDDSFFHRLEESFLVEEDKKHERHPIFGNIVDEVAYHEKYPTIYHLRKKLVDSTDKADLRLIYLALAHMIKFRGHFLIEGDLNPDNSDVDKLFIQLVQTYNQLFEENPINASGVDAKAILSARLSKSRRLENLIAQLPGEKKNGLFGNLIALSLGLTPNFKSNFDLAEDAKLQLSKDTYDDDLDNLLAQIGDQYADLFLAAKNLSDAILLSDILRVNTEITKAPLSASMIKRYDEHHQDLTLLKALVRQQLPEKYKEIFFDQSKNGYAGYIDGGASQEEFYKFIKPILEKMDGTEELLVKLNREDLLRKQRTFDNGSIPHQIHLGELHAILRRQEDFYPFLKDNREKIEKILTFRIPYYVGPLARGNSRFAWMTRKSEETITPWNFEEVVDKGASAQSFIERMTNFDKNLPNEKVLPKHSLLYEYFTVYNELTKVKYVTEGMRKPAFLSGEQKKAIVDLLFKTNRKVTVKQLKEDYFKKIECFDSVEISGVEDRFNASLGTYHDLLKIIKDKDFLDNEENEDILEDIVLTLTLFEDREMIEERLKTYAHLFDDKVMKQLKRRRYTGWGRLSRKLINGIRDKQSGKTILDFLKSDGFANRNFMQLIHDDSLTFKEDIQKAQVSGQGDSLHEHIANLAGSPAIKKGILQTVKVVDELVKVMGRHKPENIVIEMARENQTTQKGQKNSRERMKRIEEGIKELGSQILKEHPVENTQLQNEKLYLYYLQNGRDMYVDQELDINRLSDYDVDHIVPQSFLKDDSIDNKVLTRSDKARGKSDNVPSEEVVKKMKNYWRQLLNAKLITQRKFDNLTKAERGGLSELDKAGFIKRQLVETRQITKHVAQILDSRMNTKYDENDKLIREVKVITLKSKLVSDFRKDFQFYKVREINNYHHAHDAYLNAVVGTALIKKYPKLESEFVYGDYKVYDVRKMIAKSEQEIGKATAKYFFYSNIMNFFKTEITLANGEIRKRPLIETNGETGEIVWDKGRDFATVRKVLSMPQVNIVKKTEVQTGGFSKESILPKRNSDKLIARKKDWDPKKYGGFDSPTVAYSVLVVAKVEKGKSKKLKSVKELLGITIMERSSFEKNPIDFLEAKGYKEVKKDLIIKLPKYSLFELENGRKRMLASAGELQKGNELALPSKYVNFLYLASHYEKLKGSPEDNEQKQLFVEQHKHYLDEIIEQISEFSKRVILADANLDKVLSAYNKHRDKPIREQAENIIHLFTLTNLGAPAAFKYFDTTIDRKRYTSTKEVLDATLIHQSITGLYETRIDLSQLGGDGGPAPGGSGGTLNIEDEYRLHEISTEPDVSPGSTWLSDFPQAWAETGGMGLAVRQAPLIIPLKATSTPVSIKQYPMSQEAKLGIKPHIQRLLDQGILVPCQSPWNTPLLPVKKPGTNDYRPVQGLREVNKRVEDIHPTVPNPYNLLSGLPTSHRWYTVLDLKDAFFCLRLHPTSQPLFASEWRDPGMGISGQLTWTRLPQGFKNSPTLFNEALHRGLADFRIQHPDLILLQYVDDLLLAATSELDCQQGTRALLKTLGNLGYRASAKKAQICQKQVKYLGYLLREGQRWLTEARKETVMGQPTPKTPRQLREFLGTAGFCRLWIPRFAEMAAPLYPLTKPGTLFNWGPDQQKAYHEIKQALLTAPALGLPDLTKPFELFVDEKQGYAKGVLTQKLGPWRRPVAYLSKKLDPVAAGWPPCLRMVAAIAVLTKDAGKLTMGQPLVILAPHAVEALVKQPPDRWLSNARMTHYQAMLLDTDRVQFGPVVALNPATLLPLPEEGAPHDCLEILAETHGTEPDLTDQPIPDADHTWYTDGSSFLQEGQRKAGAAVTTETEVIWARALPAGTSAQRAELIALTQALKMAEGKRLNVYTDSRYAFATAHIHGEIYKRRGWLTSEGREIKNKSEILALLKALFLPKRLSIIHCLGHQKGDSAEARGNRLADQAAREAAIKTPPDTSTLLAGKRTADGSEFEKRTADGSEFESPKKKAKVE

SEQ ID NO: 3140 - protein, 2105 aa, synthetic construct
MPAAKRVKLDGGDKKYSIGLDIGTNSVGWAVITDEYKVPSKKFKVLGNTDRHSIKKNLIGALLFDSGETAEATRLKRTARRRYTRRKNRICYLQEIFSNEMAKVDDSFFHRLEESFLVEEDKKHERHPIFGNIVDEVAYHEKYPTIYHLRKKLVDSTDKADLRLIYLALAHMIKFRGHFLIEGDLNPDNSDVDKLFIQLVQTYNQLFEENPINASGVDAKAILSARLSKSRRLENLIAQLPGEKKNGLFGNLIALSLGLTPNFKSNFDLAEDAKLQLSKDTYDDDLDNLLAQIGDQYADLFLAAKNLSDAILLSDILRVNTEITKAPLSASMIKRYDEHHQDLTLLKALVRQQLPEKYKEIFFDQSKNGYAGYIDGGASQEEFYKFIKPILEKMDGTEELLVKLNREDLLRKQRTFDNGSIPHQIHLGELHAILRRQEDFYPFLKDNREKIEKILTFRIPYYVGPLARGNSRFAWMTRKSEETITPWNFEEVVDKGASAQSFIERMTNFDKNLPNEKVLPKHSLLYEYFTVYNELTKVKYVTEGMRKPAFLSGEQKKAIVDLLFKTNRKVTVKQLKEDYFKKIECFDSVEISGVEDRFNASLGTYHDLLKIIKDKDFLDNEENEDILEDIVLTLTLFEDREMIEERLKTYAHLFDDKVMKQLKRRRYTGWGRLSRKLINGIRDKQSGKTILDFLKSDGFANRNFMQLIHDDSLTFKEDIQKAQVSGQGDSLHEHIANLAGSPAIKKGILQTVKVVDELVKVMGRHKPENIVIEMARENQTTQKGQKNSRERMKRIEEGIKELGSQILKEHPVENTQLQNEKLYLYYLQNGRDMYVDQELDINRLSDYDVDHIVPQSFLKDDSIDNKVLTRSDKARGKSDNVPSEEVVKKMKNYWRQLLNAKLITQRKFDNLTKAERGGLSELDKAGFIKRQLVETRQITKHVAQILDSRMNTKYDENDKLIREVKVITLKSKLVSDFRKDFQFYKVREINNYHHAHDAYLNAVVGTALIKKYPKLESEFVYGDYKVYDVRKMIAKSEQEIGKATAKYFFYSNIMNFFKTEITLANGEIRKRPLIETNGETGEIVWDKGRDFATVRKVLSMPQVNIVKKTEVQTGGFSKESILPKRNSDKLIARKKDWDPKKYGGFDSPTVAYSVLVVAKVEKGKSKKLKSVKELLGITIMERSSFEKNPIDFLEAKGYKEVKKDLIIKLPKYSLFELENGRKRMLASAGELQKGNELALPSKYVNFLYLASHYEKLKGSPEDNEQKQLFVEQHKHYLDEIIEQISEFSKRVILADANLDKVLSAYNKHRDKPIREQAENIIHLFTLTNLGAPAAFKYFDTTIDRKRYTSTKEVLDATLIHQSITGLYETRIDLSQLGGDGGEAAAKEAAAKEAAAKEAAAKGGTLNIEDEYRLHEISTEPDVSPGSTWLSDFPQAWAETGGMGLAVRQAPLIIPLKATSTPVSIKQYPMSQEAKLGIKPHIQRLLDQGILVPCQSPWNTPLLPVKKPGTNDYRPVQGLREVNKRVEDIHPTVPNPYNLLSGLPTSHRWYTVLDLKDAFFCLRLHPTSQPLFASEWRDPGMGISGQLTWTRLPQGFKNSPTLFNEALHRGLADFRIQHPDLILLQYVDDLLLAATSELDCQQGTRALLKTLGNLGYRASAKKAQICQKQVKYLGYLLREGQRWLTEARKETVMGQPTPKTPRQLREFLGTAGFCRLWIPRFAEMAAPLYPLTKPGTLFNWGPDQQKAYHEIKQALLTAPALGLPDLTKPFELFVDEKQGYAKGVLTQKLGPWRRPVAYLSKKLDPVAAGWPPCLRMVAAIAVLTKDAGKLTMGQPLVILAPHAVEALVKQPPDRWLSNARMTHYQAMLLDTDRVQFGPVVALNPATLLPLPEEGAPHDCLEILAETHGTEPDLTDQPIPDADHTWYTDGSSFLQEGQRKAGAAVTTETEVIWARALPAGTSAQRAELIALTQALKMAEGKRLNVYTDSRYAFATAHIHGEIYKRRGWLTSEGREIKNKSEILALLKALFLPKRLSIIHCLGHQKGDSAEARGNRLADQAAREAAIKTPPDTSTLLAGKRTADGSEFEKRTADGSEFESPKKKAKVE

SEQ ID NO: 3141 - protein, 2151 aa, synthetic construct
MPAAKRVKLDGGDKKYSIGLDIGTNSVGWAVITDEYKVPSKKFKVLGNTDRHSIKKNLIGALLFDSGETAEATRLKRTARRRYTRRKNRICYLQEIFSNEMAKVDDSFFHRLEESFLVEEDKKHERHPIFGNIVDEVAYHEKYPTIYHLRKKLVDSTDKADLRLIYLALAHMIKFRGHFLIEGDLNPDNSDVDKLFIQLVQTYNQLFEENPINASGVDAKAILSARLSKSRRLENLIAQLPGEKKNGLFGNLIALSLGLTPNFKSNFDLAEDAKLQLSKDTYDDDLDNLLAQIGDQYADLFLAAKNLSDAILLSDILRVNTEITKAPLSASMIKRYDEHHQDLTLLKALVRQQLPEKYKEIFFDQSKNGYAGYIDGGASQEEFYKFIKPILEKMDGTEELLVKLNREDLLRKQRTFDNGSIPHQIHLGELHAILRRQEDFYPFLKDNREKIEKILTFRIPYYVGPLARGNSRFAWMTRKSEETITPWNFEEVVDKGASAQSFIERMTNFDKNLPNEKVLPKHSLLYEYFTVYNELTKVKYVTEGMRKPAFLSGEQKKAIVDLLFKTNRKVTVKQLKEDYFKKIECFDSVEISGVEDRFNASLGTYHDLLKIIKDKDFLDNEENEDILEDIVLTLTLFEDREMIEERLKTYAHLFDDKVMKQLKRRRYTGWGRLSRKLINGIRDKQSGKTILDFLKSDGFANRNFMQLIHDDSLTFKEDIQKAQVSGQGDSLHEHIANLAGSPAIKKGILQTVKVVDELVKVMGRHKPENIVIEMARENQTTQKGQKNSRERMKRIEEGIKELGSQILKEHPVENTQLQNEKLYLYYLQNGRDMYVDQELDINRLSDYDVDHIVPQSFLKDDSIDNKVLTRSDKARGKSDNVPSEEVVKKMKNYWRQLLNAKLITQRKFDNLTKAERGGLSELDKAGFIKRQLVETRQITKHVAQILDSRMNTKYDENDKLIREVKVITLKSKLVSDFRKDFQFYKVREINNYHHAHDAYLNAVVGTALIKKYPKLESEFVYGDYKVYDVRKMIAKSEQEIGKATAKYFFYSNIMNFFKTEITLANGEIRKRPLIETNGETGEIVWDKGRDFATVRKVLSMPQVNIVKKTEVQTGGFSKESILPKRNSDKLIARKKDWDPKKYGGFDSPTVAYSVLVVAKVEKGKSKKLKSVKELLGITIMERSSFEKNPIDFLEAKGYKEVKKDLIIKLPKYSLFELENGRKRMLASAGELQKGNELALPSKYVNFLYLASHYEKLKGSPEDNEQKQLFVEQHKHYLDEIIEQISEFSKRVILADANLDKVLSAYNKHRDKPIREQAENIIHLFTLTNLGAPAAFKYFDTTIDRKRYTSTKEVLDATLIHQSITGLYETRIDLSQLGGDGGAEAAAKEAAAKEAAAKEAAAKALEAEAAAKEAAAKEAAAKEAAAKAGGVQEISDSRPMLHIYLNGRRFLGLLDTGADKTCIAGRDWPANWPIHQTESSLQGLGMACGVARSSQPLRWQHEDKSGIIHPFVIPTLPFTLWGRDIMKDIKVRLMTDSPDDSQDLMIGAIESNLFADQISWKSDQPVWLNQWPLKQEKLQALQQLVTEQLQLGHLEESNSPWNTPVFVIKKKSGKWRLLQDLRAVNATMHDMGALQPGLPSPVAVPKGWEIIIIDLQDCFFNIKLHPEDCKRFAFSVPSPNFKRPYQRFQWKVLPQGMKNSPTLCQKFVDKAILTVRDKYQDSYIVHYMDDILLAHPSRSIVDEILTSMIQALNKHGLVVSTEKIQKYDNLKYLGTHIQGDSVSYQKLQIRTDKLRTLNDFQKLLGNINWIRPFLKLTTGELKPLFEILNGDSNPISTRKLTPEACKALQLMNERLSTARVKRLDLSQPWSLCILKTEYTPTACLWQDGVVEWIHLPHISPKVITPYDIFCTQLIIKGRHRSKELFSKDPDYIVVPYTKVQFDLLLQEKEDWPISLLGFLGEVHFHLPKDPLLTFTLQTAIIFPHMTSTTPLEKGIVIFTDGSANGRSVTYIQGREPIIKENTQNTAQQAEIVAVITAFEEVSQPFNLYTDSKYVTGLFPEIETATLSPRTKIYTELKHLQRLIHKRQEKFYIGHIRGHTGLPGPLAQGNAYADSLTRILTAAGKRTADGSEFEKRTADGSEFESPKKKAKVE

SEQ ID NO: 3142 - protein, 2130 aa, synthetic construct
MPAAKRVKLDGGDKKYSIGLDIGTNSVGWAVITDEYKVPSKKFKVLGNTDRHSIKKNLIGALLFDSGETAEATRLKRTARRRYTRRKNRICYLQEIFSNEMAKVDDSFFHRLEESFLVEEDKKHERHPIFGNIVDEVAYHEKYPTIYHLRKKLVDSTDKADLRLIYLALAHMIKFRGHFLIEGDLNPDNSDVDKLFIQLVQTYNQLFEENPINASGVDAKAILSARLSKSRRLENLIAQLPGEKKNGLFGNLIALSLGLTPNFKSNFDLAEDAKLQLSKDTYDDDLDNLLAQIGDQYADLFLAAKNLSDAILLSDILRVNTEITKAPLSASMIKRYDEHHQDLTLLKALVRQQLPEKYKEIFFDQSKNGYAGYIDGGASQEEFYKFIKPILEKMDGTEELLVKLNREDLLRKQRTFDNGSIPHQIHLGELHAILRRQEDFYPFLKDNREKIEKILTFRIPYYVGPLARGNSRFAWMTRKSEETITPWNFEEVVDKGASAQSFIERMTNFDKNLPNEKVLPKHSLLYEYFTVYNELTKVKYVTEGMRKPAFLSGEQKKAIVDLLFKTNRKVTVKQLKEDYFKKIECFDSVEISGVEDRFNASLGTYHDLLKIIKDKDFLDNEENEDILEDIVLTLTLFEDREMIEERLKTYAHLFDDKVMKQLKRRRYTGWGRLSRKLINGIRDKQSGKTILDFLKSDGFANRNFMQLIHDDSLTFKEDIQKAQVSGQGDSLHEHIANLAGSPAIKKGILQTVKVVDELVKVMGRHKPENIVIEMARENQTTQKGQKNSRERMKRIEEGIKELGSQILKEHPVENTQLQNEKLYLYYLQNGRDMYVDQELDINRLSDYDVDHIVPQSFLKDDSIDNKVLTRSDKARGKSDNVPSEEVVKKMKNYWRQLLNAKLITQRKFDNLTKAERGGLSELDKAGFIKRQLVETRQITKHVAQILDSRMNTKYDENDKLIREVKVITLKSKLVSDFRKDFQFYKVREINNYHHAHDAYLNAVVGTALIKKYPKLESEFVYGDYKVYDVRKMIAKSEQEIGKATAKYFFYSNIMNFFKTEITLANGEIRKRPLIETNGETGEIVWDKGRDFATVRKVLSMPQVNIVKKTEVQTGGFSKESILPKRNSDKLIARKKDWDPKKYGGFDSPTVAYSVLVVAKVEKGKSKKLKSVKELLGITIMERSSFEKNPIDFLEAKGYKEVKKDLIIKLPKYSLFELENGRKRMLASAGELQKGNELALPSKYVNFLYLASHYEKLKGSPEDNEQKQLFVEQHKHYLDEIIEQISEFSKRVILADANLDKVLSAYNKHRDKPIREQAENIIHLFTLTNLGAPAAFKYFDTTIDRKRYTSTKEVLDATLIHQSITGLYETRIDLSQLGGDGGEAAAKEAAAKEAAAKEAAAKEAAAKGGVQEISDSRPMLHIYLNGRRFLGLLDTGADKTCIAGRDWPANWPIHQTESSLQGLGMACGVARSSQPLRWQHEDKSGIIHPFVIPTLPFTLWGRDIMKDIKVRLMTDSPDDSQDLMIGAIESNLFADQISWKSDQPVWLNQWPLKQEKLQALQQLVTEQLQLGHLEESNSPWNTPVFVIKKKSGKWRLLQDLRAVNATMHDMGALQPGLPSPVAVPKGWEIIIIDLQDCFFNIKLHPEDCKRFAFSVPSPNFKRPYQRFQWKVLPQGMKNSPTLCQKFVDKAILTVRDKYQDSYIVHYMDDILLAHPSRSIVDEILTSMIQALNKHGLVVSTEKIQKYDNLKYLGTHIQGDSVSYQKLQIRTDKLRTLNDFQKLLGNINWIRPFLKLTTGELKPLFEILNGDSNPISTRKLTPEACKALQLMNERLSTARVKRLDLSQPWSLCILKTEYTPTACLWQDGVVEWIHLPHISPKVITPYDIFCTQLIIKGRHRSKELFSKDPDYIVVPYTKVQFDLLLQEKEDWPISLLGFLGEVHFHLPKDPLLTFTLQTAIIFPHMTSTTPLEKGIVIFTDGSANGRSVTYIQGREPIIKENTQNTAQQAEIVAVITAFEEVSQPFNLYTDSKYVTGLFPEIETATLSPRTKIYTELKHLQRLIHKRQEKFYIGHIRGHTGLPGPLAQGNAYADSLTRILTAAGKRTADGSEFEKRTADGSEFESPKKKAKVE

SEQ ID NO: 3143 - protein, 2138 aa, synthetic construct
MPAAKRVKLDGGDKKYSIGLDIGTNSVGWAVITDEYKVPSKKFKVLGNTDRHSIKKNLIGALLFDSGETAEATRLKRTARRRYTRRKNRICYLQEIFSNEMAKVDDSFFHRLEESFLVEEDKKHERHPIFGNIVDEVAYHEKYPTIYHLRKKLVDSTDKADLRLIYLALAHMIKFRGHFLIEGDLNPDNSDVDKLFIQLVQTYNQLFEENPINASGVDAKAILSARLSKSRRLENLIAQLPGEKKNGLFGNLIALSLGLTPNFKSNFDLAEDAKLQLSKDTYDDDLDNLLAQIGDQYADLFLAAKNLSDAILLSDILRVNTEITKAPLSASMIKRYDEHHQDLTLLKALVRQQLPEKYKEIFFDQSKNGYAGYIDGGASQEEFYKFIKPILEKMDGTEELLVKLNREDLLRKQRTFDNGSIPHQIHLGELHAILRRQEDFYPFLKDNREKIEKILTFRIPYYVGPLARGNSRFAWMTRKSEETITPWNFEEVVDKGASAQSFIERMTNFDKNLPNEKVLPKHSLLYEYFTVYNELTKVKYVTEGMRKPAFLSGEQKKAIVDLLFKTNRKVTVKQLKEDYFKKIECFDSVEISGVEDRFNASLGTYHDLLKIIKDKDFLDNEENEDILEDIVLTLTLFEDREMIEERLKTYAHLFDDKVMKQLKRRRYTGWGRLSRKLINGIRDKQSGKTILDFLKSDGFANRNFMQLIHDDSLTFKEDIQKAQVSGQGDSLHEHIANLAGSPAIKKGILQTVKVVDELVKVMGRHKPENIVIEMARENQTTQKGQKNSRERMKRIEEGIKELGSQILKEHPVENTQLQNEKLYLYYLQNGRDMYVDQELDINRLSDYDVDHIVPQSFLKDDSIDNKVLTRSDKARGKSDNVPSEEVVKKMKNYWRQLLNAKLITQRKFDNLTKAERGGLSELDKAGFIKRQLVETRQITKHVAQILDSRMNTKYDENDKLIREVKVITLKSKLVSDFRKDFQFYKVREINNYHHAHDAYLNAVVGTALIKKYPKLESEFVYGDYKVYDVRKMIAKSEQEIGKATAKYFFYSNIMNFFKTEITLANGEIRKRPLIETNGETGEIVWDKGRDFATVRKVLSMPQVNIVKKTEVQTGGFSKESILPKRNSDKLIARKKDWDPKKYGGFDSPTVAYSVLVVAKVEKGKSKKLKSVKELLGITIMERSSFEKNPIDFLEAKGYKEVKKDLIIKLPKYSLFELENGRKRMLASAGELQKGNELALPSKYVNFLYLASHYEKLKGSPEDNEQKQLFVEQHKHYLDEIIEQISEFSKRVILADANLDKVLSAYNKHRDKPIREQAENIIHLFTLTNLGAPAAFKYFDTTIDRKRYTSTKEVLDATLIHQSITGLYETRIDLSQLGGDGGSGGSSGGSSGSETPGTSESATPESSGGSSGGSSGGVQEISDSRPMLHIYLNGRRFLGLLDTGADKTCIAGRDWPANWPIHQTESSLQGLGMACGVARSSQPLRWQHEDKSGIIHPFVIPTLPFTLWGRDIMKDIKVRLMTDSPDDSQDLMIGAIESNLFADQISWKSDQPVWLNQWPLKQEKLQALQQLVTEQLQLGHLEESNSPWNTPVFVIKKKSGKWRLLQDLRAVNATMHDMGALQPGLPSPVAVPKGWEIIIIDLQDCFFNIKLHPEDCKRFAFSVPSPNFKRPYQRFQWKVLPQGMKNSPTLCQKFVDKAILTVRDKYQDSYIVHYMDDILLAHPSRSIVDEILTSMIQALNKHGLVVSTEKIQKYDNLKYLGTHIQGDSVSYQKLQIRTDKLRTLNDFQKLLGNINWIRPFLKLTTGELKPLFEILNGDSNPISTRKLTPEACKALQLMNERLSTARVKRLDLSQPWSLCILKTEYTPTACLWQDGVVEWIHLPHISPKVITPYDIFCTQLIIKGRHRSKELFSKDPDYIVVPYTKVQFDLLLQEKEDWPISLLGFLGEVHFHLPKDPLLTFTLQTAIIFPHMTSTTPLEKGIVIFTDGSANGRSVTYIQGREPIIKENTQNTAQQAEIVAVITAFEEVSQPFNLYTDSKYVTGLFPEIETATLSPRTKIYTELKHLQRLIHKRQEKFYIGHIRGHTGLPGPLAQGNAYADSLTRILTAAGKRTADGSEFEKRTADGSEFESPKKKAKVE

SEQ ID NO: 3144 - protein, 2116 aa, synthetic construct
MPAAKRVKLDGGDKKYSIGLDIGTNSVGWAVITDEYKVPSKKFKVLGNTDRHSIKKNLIGALLFDSGETAEATRLKRTARRRYTRRKNRICYLQEIFSNEMAKVDDSFFHRLEESFLVEEDKKHERHPIFGNIVDEVAYHEKYPTIYHLRKKLVDSTDKADLRLIYLALAHMIKFRGHFLIEGDLNPDNSDVDKLFIQLVQTYNQLFEENPINASGVDAKAILSARLSKSRRLENLIAQLPGEKKNGLFGNLIALSLGLTPNFKSNFDLAEDAKLQLSKDTYDDDLDNLLAQIGDQYADLFLAAKNLSDAILLSDILRVNTEITKAPLSASMIKRYDEHHQDLTLLKALVRQQLPEKYKEIFFDQSKNGYAGYIDGGASQEEFYKFIKPILEKMDGTEELLVKLNREDLLRKQRTFDNGSIPHQIHLGELHAILRRQEDFYPFLKDNREKIEKILTFRIPYYVGPLARGNSRFAWMTRKSEETITPWNFEEVVDKGASAQSFIERMTNFDKNLPNEKVLPKHSLLYEYFTVYNELTKVKYVTEGMRKPAFLSGEQKKAIVDLLFKTNRKVTVKQLKEDYFKKIECFDSVEISGVEDRFNASLGTYHDLLKIIKDKDFLDNEENEDILEDIVLTLTLFEDREMIEERLKTYAHLFDDKVMKQLKRRRYTGWGRLSRKLINGIRDKQSGKTILDFLKSDGFANRNFMQLIHDDSLTFKEDIQKAQVSGQGDSLHEHIANLAGSPAIKKGILQTVKVVDELVKVMGRHKPENIVIEMARENQTTQKGQKNSRERMKRIEEGIKELGSQILKEHPVENTQLQNEKLYLYYLQNGRDMYVDQELDINRLSDYDVDHIVPQSFLKDDSIDNKVLTRSDKARGKSDNVPSEEVVKKMKNYWRQLLNAKLITQRKFDNLTKAERGGLSELDKAGFIKRQLVETRQITKHVAQILDSRMNTKYDENDKLIREVKVITLKSKLVSDFRKDFQFYKVREINNYHHAHDAYLNAVVGTALIKKYPKLESEFVYGDYKVYDVRKMIAKSEQEIGKATAKYFFYSNIMNFFKTEITLANGEIRKRPLIETNGETGEIVWDKGRDFATVRKVLSMPQVNIVKKTEVQTGGFSKESILPKRNSDKLIARKKDWDPKKYGGFDSPTVAYSVLVVAKVEKGKSKKLKSVKELLGITIMERSSFEKNPIDFLEAKGYKEVKKDLIIKLPKYSLFELENGRKRMLASAGELQKGNELALPSKYVNFLYLASHYEKLKGSPEDNEQKQLFVEQHKHYLDEIIEQISEFSKRVILADANLDKVLSAYNKHRDKPIREQAENIIHLFTLTNLGAPAAFKYFDTTIDRKRYTSTKEVLDATLIHQSITGLYETRIDLSQLGGDGGGGGEAAAKGGSGGVQEISDSRPMLHIYLNGRRFLGLLDTGADKTCIAGRDWPANWPIHQTESSLQGLGMACGVARSSQPLRWQHEDKSGIIHPFVIPTLPFTLWGRDIMKDIKVRLMTDSPDDSQDLMIGAIESNLFADQISWKSDQPVWLNQWPLKQEKLQALQQLVTEQLQLGHLEESNSPWNTPVFVIKKKSGKWRLLQDLRAVNATMHDMGALQPGLPSPVAVPKGWEIIIIDLQDCFFNIKLHPEDCKRFAFSVPSPNFKRPYQRFQWKVLPQGMKNSPTLCQKFVDKAILTVRDKYQDSYIVHYMDDILLAHPSRSIVDEILTSMIQALNKHGLVVSTEKIQKYDNLKYLGTHIQGDSVSYQKLQIRTDKLRTLNDFQKLLGNINWIRPFLKLTTGELKPLFEILNGDSNPISTRKLTPEACKALQLMNERLSTARVKRLDLSQPWSLCILKTEYTPTACLWQDGVVEWIHLPHISPKVITPYDIFCTQLIIKGRHRSKELFSKDPDYIVVPYTKVQFDLLLQEKEDWPISLLGFLGEVHFHLPKDPLLTFTLQTAIIFPHMTSTTPLEKGIVIFTDGSANGRSVTYIQGREPIIKENTQNTAQQAEIVAVITAFEEVSQPFNLYTDSKYVTGLFPEIETATLSPRTKIYTELKHLQRLIHKRQEKFYIGHIRGHTGLPGPLAQGNAYADSLTRILTAAGKRTADGSEFEKRTADGSEFESPKKKAKVE

SEQ ID NO: 3145 - protein, 2113 aa, synthetic construct
MPAAKRVKLDGGDKKYSIGLDIGTNSVGWAVITDEYKVPSKKFKVLGNTDRHSIKKNLIGALLFDSGETAEATRLKRTARRRYTRRKNRICYLQEIFSNEMAKVDDSFFHRLEESFLVEEDKKHERHPIFGNIVDEVAYHEKYPTIYHLRKKLVDSTDKADLRLIYLALAHMIKFRGHFLIEGDLNPDNSDVDKLFIQLVQTYNQLFEENPINASGVDAKAILSARLSKSRRLENLIAQLPGEKKNGLFGNLIALSLGLTPNFKSNFDLAEDAKLQLSKDTYDDDLDNLLAQIGDQYADLFLAAKNLSDAILLSDILRVNTEITKAPLSASMIKRYDEHHQDLTLLKALVRQQLPEKYKEIFFDQSKNGYAGYIDGGASQEEFYKFIKPILEKMDGTEELLVKLNREDLLRKQRTFDNGSIPHQIHLGELHAILRRQEDFYPFLKDNREKIEKILTFRIPYYVGPLARGNSRFAWMTRKSEETITPWNFEEVVDKGASAQSFIERMTNFDKNLPNEKVLPKHSLLYEYFTVYNELTKVKYVTEGMRKPAFLSGEQKKAIVDLLFKTNRKVTVKQLKEDYFKKIECFDSVEISGVEDRFNASLGTYHDLLKIIKDKDFLDNEENEDILEDIVLTLTLFEDREMIEERLKTYAHLFDDKVMKQLKRRRYTGWGRLSRKLINGIRDKQSGKTILDFLKSDGFANRNFMQLIHDDSLTFKEDIQKAQVSGQGDSLHEHIANLAGSPAIKKGILQTVKVVDELVKVMGRHKPENIVIEMARENQTTQKGQKNSRERMKRIEEGIKELGSQILKEHPVENTQLQNEKLYLYYLQNGRDMYVDQELDINRLSDYDVDHIVPQSFLKDDSIDNKVLTRSDKARGKSDNVPSEEVVKKMKNYWRQLLNAKLITQRKFDNLTKAERGGLSELDKAGFIKRQLVETRQITKHVAQILDSRMNTKYDENDKLIREVKVITLKSKLVSDFRKDFQFYKVREINNYHHAHDAYLNAVVGTALIKKYPKLESEFVYGDYKVYDVRKMIAKSEQEIGKATAKYFFYSNIMNFFKTEITLANGEIRKRPLIETNGETGEIVWDKGRDFATVRKVLSMPQVNIVKKTEVQTGGFSKESILPKRNSDKLIARKKDWDPKKYGGFDSPTVAYSVLVVAKVEKGKSKKLKSVKELLGITIMERSSFEKNPIDFLEAKGYKEVKKDLIIKLPKYSLFELENGRKRMLASAGELQKGNELALPSKYVNFLYLASHYEKLKGSPEDNEQKQLFVEQHKHYLDEIIEQISEFSKRVILADANLDKVLSAYNKHRDKPIREQAENIIHLFTLTNLGAPAAFKYFDTTIDRKRYTSTKEVLDATLIHQSITGLYETRIDLSQLGGDGGPAPEAAAKGGVQEISDSRPMLHIYLNGRRFLGLLDTGADKTCIAGRDWPANWPIHQTESSLQGLGMACGVARSSQPLRWQHEDKSGIIHPFVIPTLPFTLWGRDIMKDIKVRLMTDSPDDSQDLMIGAIESNLFADQISWKSDQPVWLNQWPLKQEKLQALQQLVTEQLQLGHLEESNSPWNTPVFVIKKKSGKWRLLQDLRAVNATMHDMGALQPGLPSPVAVPKGWEIIIIDLQDCFFNIKLHPEDCKRFAFSVPSPNFKRPYQRFQWKVLPQGMKNSPTLCQKFVDKAILTVRDKYQDSYIVHYMDDILLAHPSRSIVDEILTSMIQALNKHGLVVSTEKIQKYDNLKYLGTHIQGDSVSYQKLQIRTDKLRTLNDFQKLLGNINWIRPFLKLTTGELKPLFEILNGDSNPISTRKLTPEACKALQLMNERLSTARVKRLDLSQPWSLCILKTEYTPTACLWQDGVVEWIHLPHISPKVITPYDIFCTQLIIKGRHRSKELFSKDPDYIVVPYTKVQFDLLLQEKEDWPISLLGFLGEVHFHLPKDPLLTFTLQTAIIFPHMTSTTPLEKGIVIFTDGSANGRSVTYIQGREPIIKENTQNTAQQAEIVAVITAFEEVSQPFNLYTDSKYVTGLFPEIETATLSPRTKIYTELKHLQRLIHKRQEKFYIGHIRGHTGLPGPLAQGNAYADSLTRILTAAGKRTADGSEFEKRTADGSEFESPKKKAKVE

SEQ ID NO: 3146 - protein, 2116 aa, synthetic construct
MPAAKRVKLDGGDKKYSIGLDIGTNSVGWAVITDEYKVPSKKFKVLGNTDRHSIKKNLIGALLFDSGETAEATRLKRTARRRYTRRKNRICYLQEIFSNEMAKVDDSFFHRLEESFLVEEDKKHERHPIFGNIVDEVAYHEKYPTIYHLRKKLVDSTDKADLRLIYLALAHMIKFRGHFLIEGDLNPDNSDVDKLFIQLVQTYNQLFEENPINASGVDAKAILSARLSKSRRLENLIAQLPGEKKNGLFGNLIALSLGLTPNFKSNFDLAEDAKLQLSKDTYDDDLDNLLAQIGDQYADLFLAAKNLSDAILLSDILRVNTEITKAPLSASMIKRYDEHHQDLTLLKALVRQQLPEKYKEIFFDQSKNGYAGYIDGGASQEEFYKFIKPILEKMDGTEELLVKLNREDLLRKQRTFDNGSIPHQIHLGELHAILRRQEDFYPFLKDNREKIEKILTFRIPYYVGPLARGNSRFAWMTRKSEETITPWNFEEVVDKGASAQSFIERMTNFDKNLPNEKVLPKHSLLYEYFTVYNELTKVKYVTEGMRKPAFLSGEQKKAIVDLLFKTNRKVTVKQLKEDYFKKIECFDSVEISGVEDRFNASLGTYHDLLKIIKDKDFLDNEENEDILEDIVLTLTLFEDREMIEERLKTYAHLFDDKVMKQLKRRRYTGWGRLSRKLINGIRDKQSGKTILDFLKSDGFANRNFMQLIHDDSLTFKEDIQKAQVSGQGDSLHEHIANLAGSPAIKKGILQTVKVVDELVKVMGRHKPENIVIEMARENQTTQKGQKNSRERMKRIEEGIKELGSQILKEHPVENTQLQNEKLYLYYLQNGRDMYVDQELDINRLSDYDVDHIVPQSFLKDDSIDNKVLTRSDKARGKSDNVPSEEVVKKMKNYWRQLLNAKLITQRKFDNLTKAERGGLSELDKAGFIKRQLVETRQITKHVAQILDSRMNTKYDENDKLIREVKVITLKSKLVSDFRKDFQFYKVREINNYHHAHDAYLNAVVGTALIKKYPKLESEFVYGDYKVYDVRKMIAKSEQEIGKATAKYFFYSNIMNFFKTEITLANGEIRKRPLIETNGETGEIVWDKGRDFATVRKVLSMPQVNIVKKTEVQTGGFSKESILPKRNSDKLIARKKDWDPKKYGGFDSPTVAYSVLVVAKVEKGKSKKLKSVKELLGITIMERSSFEKNPIDFLEAKGYKEVKKDLIIKLPKYSLFELENGRKRMLASAGELQKGNELALPSKYVNFLYLASHYEKLKGSPEDNEQKQLFVEQHKHYLDEIIEQISEFSKRVILADANLDKVLSAYNKHRDKPIREQAENIIHLFTLTNLGAPAAFKYFDTTIDRKRYTSTKEVLDATLIHQSITGLYETRIDLSQLGGDGGPAPGGGEAAAKGGVQEISDSRPMLHIYLNGRRFLGLLDTGADKTCIAGRDWPANWPIHQTESSLQGLGMACGVARSSQPLRWQHEDKSGIIHPFVIPTLPFTLWGRDIMKDIKVRLMTDSPDDSQDLMIGAIESNLFADQISWKSDQPVWLNQWPLKQEKLQALQQLVTEQLQLGHLEESNSPWNTPVFVIKKKSGKWRLLQDLRAVNATMHDMGALQPGLPSPVAVPKGWEIIIIDLQDCFFNIKLHPEDCKRFAFSVPSPNFKRPYQRFQWKVLPQGMKNSPTLCQKFVDKAILTVRDKYQDSYIVHYMDDILLAHPSRSIVDEILTSMIQALNKHGLVVSTEKIQKYDNLKYLGTHIQGDSVSYQKLQIRTDKLRTLNDFQKLLGNINWIRPFLKLTTGELKPLFEILNGDSNPISTRKLTPEACKALQLMNERLSTARVKRLDLSQPWSLCILKTEYTPTACLWQDGVVEWIHLPHISPKVITPYDIFCTQLIIKGRHRSKELFSKDPDYIVVPYTKVQFDLLLQEKEDWPISLLGFLGEVHFHLPKDPLLTFTLQTAIIFPHMTSTTPLEKGIVIFTDGSANGRSVTYIQGREPIIKENTQNTAQQAEIVAVITAFEEVSQPFNLYTDSKYVTGLFPEIETATLSPRTKIYTELKHLQRLIHKRQEKFYIGHIRGHTGLPGPLAQGNAYADSLTRILTAAGKRTADGSEFEKRTADGSEFESPKKKAKVE

SEQ ID NO: 3147 - protein, 2116 aa, synthetic construct
MPAAKRVKLDGGDKKYSIGLDIGTNSVGWAVITDEYKVPSKKFKVLGNTDRHSIKKNLIGALLFDSGETAEATRLKRTARRRYTRRKNRICYLQEIFSNEMAKVDDSFFHRLEESFLVEEDKKHERHPIFGNIVDEVAYHEKYPTIYHLRKKLVDSTDKADLRLIYLALAHMIKFRGHFLIEGDLNPDNSDVDKLFIQLVQTYNQLFEENPINASGVDAKAILSARLSKSRRLENLIAQLPGEKKNGLFGNLIALSLGLTPNFKSNFDLAEDAKLQLSKDTYDDDLDNLLAQIGDQYADLFLAAKNLSDAILLSDILRVNTEITKAPLSASMIKRYDEHHQDLTLLKALVRQQLPEKYKEIFFDQSKNGYAGYIDGGASQEEFYKFIKPILEKMDGTEELLVKLNREDLLRKQRTFDNGSIPHQIHLGELHAILRRQEDFYPFLKDNREKIEKILTFRIPYYVGPLARGNSRFAWMTRKSEETITPWNFEEVVDKGASAQSFIERMTNFDKNLPNEKVLPKHSLLYEYFTVYNELTKVKYVTEGMRKPAFLSGEQKKAIVDLLFKTNRKVTVKQLKEDYFKKIECFDSVEISGVEDRFNASLGTYHDLLKIIKDKDFLDNEENEDILEDIVLTLTLFEDREMIEERLKTYAHLFDDKVMKQLKRRRYTGWGRLSRKLINGIRDKQSGKTILDFLKSDGFANRNFMQLIHDDSLTFKEDIQKAQVSGQGDSLHEHIANLAGSPAIKKGILQTVKVVDELVKVMGRHKPENIVIEMARENQTTQKGQKNSRERMKRIEEGIKELGSQILKEHPVENTQLQNEKLYLYYLQNGRDMYVDQELDINRLSDYDVDHIVPQSFLKDDSIDNKVLTRSDKARGKSDNVPSEEVVKKMKNYWRQLLNAKLITQRKFDNLTKAERGGLSELDKAGFIKRQLVETRQITKHVAQILDSRMNTKYDENDKLIREVKVITLKSKLVSDFRKDFQFYKVREINNYHHAHDAYLNAVVGTALIKKYPKLESEFVYGDYKVYDVRKMIAKSEQEIGKATAKYFFYSNIMNFFKTEITLANGEIRKRPLIETNGETGEIVWDKGRDFATVRKVLSMPQVNIVKKTEVQTGGFSKESILPKRNSDKLIARKKDWDPKKYGGFDSPTVAYSVLVVAKVEKGKSKKLKSVKELLGITIMERSSFEKNPIDFLEAKGYKEVKKDLIIKLPKYSLFELENGRKRMLASAGELQKGNELALPSKYVNFLYLASHYEKLKGSPEDNEQKQLFVEQHKHYLDEIIEQISEFSKRVILADANLDKVLSAYNKHRDKPIREQAENIIHLFTLTNLGAPAAFKYFDTTIDRKRYTSTKEVLDATLIHQSITGLYETRIDLSQLGGDGGGSSEAAAKGGGGGVQEISDSRPMLHIYLNGRRFLGLLDTGADKTCIAGRDWPANWPIHQTESSLQGLGMACGVARSSQPLRWQHEDKSGIIHPFVIPTLPFTLWGRDIMKDIKVRLMTDSPDDSQDLMIGAIESNLFADQISWKSDQPVWLNQWPLKQEKLQALQQLVTEQLQLGHLEESNSPWNTPVFVIKKKSGKWRLLQDLRAVNATMHDMGALQPGLPSPVAVPKGWEIIIIDLQDCFFNIKLHPEDCKRFAFSVPSPNFKRPYQRFQWKVLPQGMKNSPTLCQKFVDKAILTVRDKYQDSYIVHYMDDILLAHPSRSIVDEILTSMIQALNKHGLVVSTEKIQKYDNLKYLGTHIQGDSVSYQKLQIRTDKLRTLNDFQKLLGNINWIRPFLKLTTGELKPLFEILNGDSNPISTRKLTPEACKALQLMNERLSTARVKRLDLSQPWSLCILKTEYTPTACLWQDGVVEWIHLPHISPKVITPYDIFCTQLIIKGRHRSKELFSKDPDYIVVPYTKVQFDLLLQEKEDWPISLLGFLGEVHFHLPKDPLLTFTLQTAIIFPHMTSTTPLEKGIVIFTDGSANGRSVTYIQGREPIIKENTQNTAQQAEIVAVITAFEEVSQPFNLYTDSKYVTGLFPEIETATLSPRTKIYTELKHLQRLIHKRQEKFYIGHIRGHTGLPGPLAQGNAYADSLTRILTAAGKRTADGSEFEKRTADGSEFESPKKKAKVE

SEQ ID NO: 3148 - protein, 2116 aa, synthetic construct
MPAAKRVKLDGGDKKYSIGLDIGTNSVGWAVITDEYKVPSKKFKVLGNTDRHSIKKNLIGALLFDSGETAEATRLKRTARRRYTRRKNRICYLQEIFSNEMAKVDDSFFHRLEESFLVEEDKKHERHPIFGNIVDEVAYHEKYPTIYHLRKKLVDSTDKADLRLIYLALAHMIKFRGHFLIEGDLNPDNSDVDKLFIQLVQTYNQLFEENPINASGVDAKAILSARLSKSRRLENLIAQLPGEKKNGLFGNLIALSLGLTPNFKSNFDLAEDAKLQLSKDTYDDDLDNLLAQIGDQYADLFLAAKNLSDAILLSDILRVNTEITKAPLSASMIKRYDEHHQDLTLLKALVRQQLPEKYKEIFFDQSKNGYAGYIDGGASQEEFYKFIKPILEKMDGTEELLVKLNREDLLRKQRTFDNGSIPHQIHLGELHAILRRQEDFYPFLKDNREKIEKILTFRIPYYVGPLARGNSRFAWMTRKSEETITPWNFEEVVDKGASAQSFIERMTNFDKNLPNEKVLPKHSLLYEYFTVYNELTKVKYVTEGMRKPAFLSGEQKKAIVDLLFKTNRKVTVKQLKEDYFKKIECFDSVEISGVEDRFNASLGTYHDLLKIIKDKDFLDNEENEDILEDIVLTLTLFEDREMIEERLKTYAHLFDDKVMKQLKRRRYTGWGRLSRKLINGIRDKQSGKTILDFLKSDGFANRNFMQLIHDDSLTFKEDIQKAQVSGQGDSLHEHIANLAGSPAIKKGILQTVKVVDELVKVMGRHKPENIVIEMARENQTTQKGQKNSRERMKRIEEGIKELGSQILKEHPVENTQLQNEKLYLYYLQNGRDMYVDQELDINRLSDYDVDHIVPQSFLKDDSIDNKVLTRSDKARGKSDNVPSEEVVKKMKNYWRQLLNAKLITQRKFDNLTKAERGGLSELDKAGFIKRQLVETRQITKHVAQILDSRMNTKYDENDKLIREVKVITLKSKLVSDFRKDFQFYKVREINNYHHAHDAYLNAVVGTALIKKYPKLESEFVYGDYKVYDVRKMIAKSEQEIGKATAKYFFYSNIMNFFKTEITLANGEIRKRPLIETNGETGEIVWDKGRDFATVRKVLSMPQVNIVKKTEVQTGGFSKESILPKRNSDKLIARKKDWDPKKYGGFDSPTVAYSVLVVAKVEKGKSKKLKSVKELLGITIMERSSFEKNPIDFLEAKGYKEVKKDLIIKLPKYSLFELENGRKRMLASAGELQKGNELALPSKYVNFLYLASHYEKLKGSPEDNEQKQLFVEQHKHYLDEIIEQISEFSKRVILADANLDKVLSAYNKHRDKPIREQAENIIHLFTLTNLGAPAAFKYFDTTIDRKRYTSTKEVLDATLIHQSITGLYETRIDLSQLGGDGGEAAAKGGSGSSGGVQEISDSRPMLHIYLNGRRFLGLLDTGADKTCIAGRDWPANWPIHQTESSLQGLGMACGVARSSQPLRWQHEDKSGIIHPFVIPTLPFTLWGRDIMKDIKVRLMTDSPDDSQDLMIGAIESNLFADQISWKSDQPVWLNQWPLKQEKLQALQQLVTEQLQLGHLEESNSPWNTPVFVIKKKSGKWRLLQDLRAVNATMHDMGALQPGLPSPVAVPKGWEIIIIDLQDCFFNIKLHPEDCKRFAFSVPSPNFKRPYQRFQWKVLPQGMKNSPTLCQKFVDKAILTVRDKYQDSYIVHYMDDILLAHPSRSIVDEILTSMIQALNKHGLVVSTEKIQKYDNLKYLGTHIQGDSVSYQKLQIRTDKLRTLNDFQKLLGNINWIRPFLKLTTGELKPLFEILNGDSNPISTRKLTPEACKALQLMNERLSTARVKRLDLSQPWSLCILKTEYTPTACLWQDGVVEWIHLPHISPKVITPYDIFCTQLIIKGRHRSKELFSKDPDYIVVPYTKVQFDLLLQEKEDWPISLLGFLGEVHFHLPKDPLLTFTLQTAIIFPHMTSTTPLEKGIVIFTDGSANGRSVTYIQGREPIIKENTQNTAQQAEIVAVITAFEEVSQPFNLYTDSKYVTGLFPEIETATLSPRTKIYTELKHLQRLIHKRQEKFYIGHIRGHTGLPGPLAQGNAYADSLTRILTAAGKRTADGSEFEKRTADGSEFESPKKKAKVE

SEQ ID NO: 3149 - protein, 2116 aa, synthetic construct
MPAAKRVKLDGGDKKYSIGLDIGTNSVGWAVITDEYKVPSKKFKVLGNTDRHSIKKNLIGALLFDSGETAEATRLKRTARRRYTRRKNRICYLQEIFSNEMAKVDDSFFHRLEESFLVEEDKKHERHPIFGNIVDEVAYHEKYPTIYHLRKKLVDSTDKADLRLIYLALAHMIKFRGHFLIEGDLNPDNSDVDKLFIQLVQTYNQLFEENPINASGVDAKAILSARLSKSRRLENLIAQLPGEKKNGLFGNLIALSLGLTPNFKSNFDLAEDAKLQLSKDTYDDDLDNLLAQIGDQYADLFLAAKNLSDAILLSDILRVNTEITKAPLSASMIKRYDEHHQDLTLLKALVRQQLPEKYKEIFFDQSKNGYAGYIDGGASQEEFYKFIKPILEKMDGTEELLVKLNREDLLRKQRTFDNGSIPHQIHLGELHAILRRQEDFYPFLKDNREKIEKILTFRIPYYVGPLARGNSRFAWMTRKSEETITPWNFEEVVDKGASAQSFIERMTNFDKNLPNEKVLPKHSLLYEYFTVYNELTKVKYVTEGMRKPAFLSGEQKKAIVDLLFKTNRKVTVKQLKEDYFKKIECFDSVEISGVEDRFNASLGTYHDLLKIIKDKDFLDNEENEDILEDIVLTLTLFEDREMIEERLKTYAHLFDDKVMKQLKRRRYTGWGRLSRKLINGIRDKQSGKTILDFLKSDGFANRNFMQLIHDDSLTFKEDIQKAQVSGQGDSLHEHIANLAGSPAIKKGILQTVKVVDELVKVMGRHKPENIVIEMARENQTTQKGQKNSRERMKRIEEGIKELGSQILKEHPVENTQLQNEKLYLYYLQNGRDMYVDQELDINRLSDYDVDHIVPQSFLKDDSIDNKVLTRSDKARGKSDNVPSEEVVKKMKNYWRQLLNAKLITQRKFDNLTKAERGGLSELDKAGFIKRQLVETRQITKHVAQILDSRMNTKYDENDKLIREVKVITLKSKLVSDFRKDFQFYKVREINNYHHAHDAYLNAVVGTALIKKYPKLESEFVYGDYKVYDVRKMIAKSEQEIGKATAKYFFYSNIMNFFKTEITLANGEIRKRPLIETNGETGEIVWDKGRDFATVRKVLSMPQVNIVKKTEVQTGGFSKESILPKRNSDKLIARKKDWDPKKYGGFDSPTVAYSVLVVAKVEKGKSKKLKSVKELLGITIMERSSFEKNPIDFLEAKGYKEVKKDLIIKLPKYSLFELENGRKRMLASAGELQKGNELALPSKYVNFLYLASHYEKLKGSPEDNEQKQLFVEQHKHYLDEIIEQISEFSKRVILADANLDKVLSAYNKHRDKPIREQAENIIHLFTLTNLGAPAAFKYFDTTIDRKRYTSTKEVLDATLIHQSITGLYETRIDLSQLGGDGGGSSPAPEAAAKGGVQEISDSRPMLHIYLNGRRFLGLLDTGADKTCIAGRDWPANWPIHQTESSLQGLGMACGVARSSQPLRWQHEDKSGIIHPFVIPTLPFTLWGRDIMKDIKVRLMTDSPDDSQDLMIGAIESNLFADQISWKSDQPVWLNQWPLKQEKLQALQQLVTEQLQLGHLEESNSPWNTPVFVIKKKSGKWRLLQDLRAVNATMHDMGALQPGLPSPVAVPKGWEIIIIDLQDCFFNIKLHPEDCKRFAFSVPSPNFKRPYQRFQWKVLPQGMKNSPTLCQKFVDKAILTVRDKYQDSYIVHYMDDILLAHPSRSIVDEILTSMIQALNKHGLVVSTEKIQKYDNLKYLGTHIQGDSVSYQKLQIRTDKLRTLNDFQKLLGNINWIRPFLKLTTGELKPLFEILNGDSNPISTRKLTPEACKALQLMNERLSTARVKRLDLSQPWSLCILKTEYTPTACLWQDGVVEWIHLPHISPKVITPYDIFCTQLIIKGRHRSKELFSKDPDYIVVPYTKVQFDLLLQEKEDWPISLLGFLGEVHFHLPKDPLLTFTLQTAIIFPHMTSTTPLEKGIVIFTDGSANGRSVTYIQGREPIIKENTQNTAQQAEIVAVITAFEEVSQPFNLYTDSKYVTGLFPEIETATLSPRTKIYTELKHLQRLIHKRQEKFYIGHIRGHTGLPGPLAQGNAYADSLTRILTAAGKRTADGSEFEKRTADGSEFESPKKKAKVE

SEQ ID NO: 3150 - protein, 2114 aa, synthetic construct
MPAAKRVKLDGGDKKYSIGLDIGTNSVGWAVITDEYKVPSKKFKVLGNTDRHSIKKNLIGALLFDSGETAEATRLKRTARRRYTRRKNRICYLQEIFSNEMAKVDDSFFHRLEESFLVEEDKKHERHPIFGNIVDEVAYHEKYPTIYHLRKKLVDSTDKADLRLIYLALAHMIKFRGHFLIEGDLNPDNSDVDKLFIQLVQTYNQLFEENPINASGVDAKAILSARLSKSRRLENLIAQLPGEKKNGLFGNLIALSLGLTPNFKSNFDLAEDAKLQLSKDTYDDDLDNLLAQIGDQYADLFLAAKNLSDAILLSDILRVNTEITKAPLSASMIKRYDEHHQDLTLLKALVRQQLPEKYKEIFFDQSKNGYAGYIDGGASQEEFYKFIKPILEKMDGTEELLVKLNREDLLRKQRTFDNGSIPHQIHLGELHAILRRQEDFYPFLKDNREKIEKILTFRIPYYVGPLARGNSRFAWMTRKSEETITPWNFEEVVDKGASAQSFIERMTNFDKNLPNEKVLPKHSLLYEYFTVYNELTKVKYVTEGMRKPAFLSGEQKKAIVDLLFKTNRKVTVKQLKEDYFKKIECFDSVEISGVEDRFNASLGTYHDLLKIIKDKDFLDNEENEDILEDIVLTLTLFEDREMIEERLKTYAHLFDDKVMKQLKRRRYTGWGRLSRKLINGIRDKQSGKTILDFLKSDGFANRNFMQLIHDDSLTFKEDIQKAQVSGQGDSLHEHIANLAGSPAIKKGILQTVKVVDELVKVMGRHKPENIVIEMARENQTTQKGQKNSRERMKRIEEGIKELGSQILKEHPVENTQLQNEKLYLYYLQNGRDMYVDQELDINRLSDYDVDHIVPQSFLKDDSIDNKVLTRSDKARGKSDNVPSEEVVKKMKNYWRQLLNAKLITQRKFDNLTKAERGGLSELDKAGFIKRQLVETRQITKHVAQILDSRMNTKYDENDKLIREVKVITLKSKLVSDFRKDFQFYKVREINNYHHAHDAYLNAVVGTALIKKYPKLESEFVYGDYKVYDVRKMIAKSEQEIGKATAKYFFYSNIMNFFKTEITLANGEIRKRPLIETNGETGEIVWDKGRDFATVRKVLSMPQVNIVKKTEVQTGGFSKESILPKRNSDKLIARKKDWDPKKYGGFDSPTVAYSVLVVAKVEKGKSKKLKSVKELLGITIMERSSFEKNPIDFLEAKGYKEVKKDLIIKLPKYSLFELENGRKRMLASAGELQKGNELALPSKYVNFLYLASHYEKLKGSPEDNEQKQLFVEQHKHYLDEIIEQISEFSKRVILADANLDKVLSAYNKHRDKPIREQAENIIHLFTLTNLGAPAAFKYFDTTIDRKRYTSTKEVLDATLIHQSITGLYETRIDLSQLGGDGGGGSGSSPAPGGVQEISDSRPMLHIYLNGRRFLGLLDTGADKTCIAGRDWPANWPIHQTESSLQGLGMACGVARSSQPLRWQHEDKSGIIHPFVIPTLPFTLWGRDIMKDIKVRLMTDSPDDSQDLMIGAIESNLFADQISWKSDQPVWLNQWPLKQEKLQALQQLVTEQLQLGHLEESNSPWNTPVFVIKKKSGKWRLLQDLRAVNATMHDMGALQPGLPSPVAVPKGWEIIIIDLQDCFFNIKLHPEDCKRFAFSVPSPNFKRPYQRFQWKVLPQGMKNSPTLCQKFVDKAILTVRDKYQDSYIVHYMDDILLAHPSRSIVDEILTSMIQALNKHGLVVSTEKIQKYDNLKYLGTHIQGDSVSYQKLQIRTDKLRTLNDFQKLLGNINWIRPFLKLTTGELKPLFEILNGDSNPISTRKLTPEACKALQLMNERLSTARVKRLDLSQPWSLCILKTEYTPTACLWQDGVVEWIHLPHISPKVITPYDIFCTQLIIKGRHRSKELFSKDPDYIVVPYTKVQFDLLLQEKEDWPISLLGFLGEVHFHLPKDPLLTFTLQTAIIFPHMTSTTPLEKGIVIFTDGSANGRSVTYIQGREPIIKENTQNTAQQAEIVAVITAFEEVSQPFNLYTDSKYVTGLFPEIETATLSPRTKIYTELKHLQRLIHKRQEKFYIGHIRGHTGLPGPLAQGNAYADSLTRILTAAGKRTADGSEFEKRTADGSEFESPKKKAKVE

SEQ ID NO: 3151 - protein, 2120 aa, synthetic construct
MPAAKRVKLDGGDKKYSIGLDIGTNSVGWAVITDEYKVPSKKFKVLGNTDRHSIKKNLIGALLFDSGETAEATRLKRTARRRYTRRKNRICYLQEIFSNEMAKVDDSFFHRLEESFLVEEDKKHERHPIFGNIVDEVAYHEKYPTIYHLRKKLVDSTDKADLRLIYLALAHMIKFRGHFLIEGDLNPDNSDVDKLFIQLVQTYNQLFEENPINASGVDAKAILSARLSKSRRLENLIAQLPGEKKNGLFGNLIALSLGLTPNFKSNFDLAEDAKLQLSKDTYDDDLDNLLAQIGDQYADLFLAAKNLSDAILLSDILRVNTEITKAPLSASMIKRYDEHHQDLTLLKALVRQQLPEKYKEIFFDQSKNGYAGYIDGGASQEEFYKFIKPILEKMDGTEELLVKLNREDLLRKQRTFDNGSIPHQIHLGELHAILRRQEDFYPFLKDNREKIEKILTFRIPYYVGPLARGNSRFAWMTRKSEETITPWNFEEVVDKGASAQSFIERMTNFDKNLPNEKVLPKHSLLYEYFTVYNELTKVKYVTEGMRKPAFLSGEQKKAIVDLLFKTNRKVTVKQLKEDYFKKIECFDSVEISGVEDRFNASLGTYHDLLKIIKDKDFLDNEENEDILEDIVLTLTLFEDREMIEERLKTYAHLFDDKVMKQLKRRRYTGWGRLSRKLINGIRDKQSGKTILDFLKSDGFANRNFMQLIHDDSLTFKEDIQKAQVSGQGDSLHEHIANLAGSPAIKKGILQTVKVVDELVKVMGRHKPENIVIEMARENQTTQKGQKNSRERMKRIEEGIKELGSQILKEHPVENTQLQNEKLYLYYLQNGRDMYVDQELDINRLSDYDVDHIVPQSFLKDDSIDNKVLTRSDKARGKSDNVPSEEVVKKMKNYWRQLLNAKLITQRKFDNLTKAERGGLSELDKAGFIKRQLVETRQITKHVAQILDSRMNTKYDENDKLIREVKVITLKSKLVSDFRKDFQFYKVREINNYHHAHDAYLNAVVGTALIKKYPKLESEFVYGDYKVYDVRKMIAKSEQEIGKATAKYFFYSNIMNFFKTEITLANGEIRKRPLIETNGETGEIVWDKGRDFATVRKVLSMPQVNIVKKTEVQTGGFSKESILPKRNSDKLIARKKDWDPKKYGGFDSPTVAYSVLVVAKVEKGKSKKLKSVKELLGITIMERSSFEKNPIDFLEAKGYKEVKKDLIIKLPKYSLFELENGRKRMLASAGELQKGNELALPSKYVNFLYLASHYEKLKGSPEDNEQKQLFVEQHKHYLDEIIEQISEFSKRVILADANLDKVLSAYNKHRDKPIREQAENIIHLFTLTNLGAPAAFKYFDTTIDRKRYTSTKEVLDATLIHQSITGLYETRIDLSQLGGDGGEAAAKGGGGSEAAAKGGVQEISDSRPMLHIYLNGRRFLGLLDTGADKTCIAGRDWPANWPIHQTESSLQGLGMACGVARSSQPLRWQHEDKSGIIHPFVIPTLPFTLWGRDIMKDIKVRLMTDSPDDSQDLMIGAIESNLFADQISWKSDQPVWLNQWPLKQEKLQALQQLVTEQLQLGHLEESNSPWNTPVFVIKKKSGKWRLLQDLRAVNATMHDMGALQPGLPSPVAVPKGWEIIIIDLQDCFFNIKLHPEDCKRFAFSVPSPNFKRPYQRFQWKVLPQGMKNSPTLCQKFVDKAILTVRDKYQDSYIVHYMDDILLAHPSRSIVDEILTSMIQALNKHGLVVSTEKIQKYDNLKYLGTHIQGDSVSYQKLQIRTDKLRTLNDFQKLLGNINWIRPFLKLTTGELKPLFEILNGDSNPISTRKLTPEACKALQLMNERLSTARVKRLDLSQPWSLCILKTEYTPTACLWQDGVVEWIHLPHISPKVITPYDIFCTQLIIKGRHRSKELFSKDPDYIVVPYTKVQFDLLLQEKEDWPISLLGFLGEVHFHLPKDPLLTFTLQTAIIFPHMTSTTPLEKGIVIFTDGSANGRSVTYIQGREPIIKENTQNTAQQAEIVAVITAFEEVSQPFNLYTDSKYVTGLFPEIETATLSPRTKIYTELKHLQRLIHKRQEKFYIGHIRGHTGLPGPLAQGNAYADSLTRILTAAGKRTADGSEFEKRTADGSEFESPKKKAKVE

SEQ ID NO: 3152 - protein, 2116 aa, synthetic construct
MPAAKRVKLDGGDKKYSIGLDIGTNSVGWAVITDEYKVPSKKFKVLGNTDRHSIKKNLIGALLFDSGETAEATRLKRTARRRYTRRKNRICYLQEIFSNEMAKVDDSFFHRLEESFLVEEDKKHERHPIFGNIVDEVAYHEKYPTIYHLRKKLVDSTDKADLRLIYLALAHMIKFRGHFLIEGDLNPDNSDVDKLFIQLVQTYNQLFEENPINASGVDAKAILSARLSKSRRLENLIAQLPGEKKNGLFGNLIALSLGLTPNFKSNFDLAEDAKLQLSKDTYDDDLDNLLAQIGDQYADLFLAAKNLSDAILLSDILRVNTEITKAPLSASMIKRYDEHHQDLTLLKALVRQQLPEKYKEIFFDQSKNGYAGYIDGGASQEEFYKFIKPILEKMDGTEELLVKLNREDLLRKQRTFDNGSIPHQIHLGELHAILRRQEDFYPFLKDNREKIEKILTFRIPYYVGPLARGNSRFAWMTRKSEETITPWNFEEVVDKGASAQSFIERMTNFDKNLPNEKVLPKHSLLYEYFTVYNELTKVKYVTEGMRKPAFLSGEQKKAIVDLLFKTNRKVTVKQLKEDYFKKIECFDSVEISGVEDRFNASLGTYHDLLKIIKDKDFLDNEENEDILEDIVLTLTLFEDREMIEERLKTYAHLFDDKVMKQLKRRRYTGWGRLSRKLINGIRDKQSGKTILDFLKSDGFANRNFMQLIHDDSLTFKEDIQKAQVSGQGDSLHEHIANLAGSPAIKKGILQTVKVVDELVKVMGRHKPENIVIEMARENQTTQKGQKNSRERMKRIEEGIKELGSQILKEHPVENTQLQNEKLYLYYLQNGRDMYVDQELDINRLSDYDVDHIVPQSFLKDDSIDNKVLTRSDKARGKSDNVPSEEVVKKMKNYWRQLLNAKLITQRKFDNLTKAERGGLSELDKAGFIKRQLVETRQITKHVAQILDSRMNTKYDENDKLIREVKVITLKSKLVSDFRKDFQFYKVREINNYHHAHDAYLNAVVGTALIKKYPKLESEFVYGDYKVYDVRKMIAKSEQEIGKATAKYFFYSNIMNFFKTEITLANGEIRKRPLIETNGETGEIVWDKGRDFATVRKVLSMPQVNIVKKTEVQTGGFSKESILPKRNSDKLIARKKDWDPKKYGGFDSPTVAYSVLVVAKVEKGKSKKLKSVKELLGITIMERSSFEKNPIDFLEAKGYKEVKKDLIIKLPKYSLFELENGRKRMLASAGELQKGNELALPSKYVNFLYLASHYEKLKGSPEDNEQKQLFVEQHKHYLDEIIEQISEFSKRVILADANLDKVLSAYNKHRDKPIREQAENIIHLFTLTNLGAPAAFKYFDTTIDRKRYTSTKEVLDATLIHQSITGLYETRIDLSQLGGDGGPAPEAAAKGSSGGVQEISDSRPMLHIYLNGRRFLGLLDTGADKTCIAGRDWPANWPIHQTESSLQGLGMACGVARSSQPLRWQHEDKSGIIHPFVIPTLPFTLWGRDIMKDIKVRLMTDSPDDSQDLMIGAIESNLFADQISWKSDQPVWLNQWPLKQEKLQALQQLVTEQLQLGHLEESNSPWNTPVFVIKKKSGKWRLLQDLRAVNATMHDMGALQPGLPSPVAVPKGWEIIIIDLQDCFFNIKLHPEDCKRFAFSVPSPNFKRPYQRFQWKVLPQGMKNSPTLCQKFVDKAILTVRDKYQDSYIVHYMDDILLAHPSRSIVDEILTSMIQALNKHGLVVSTEKIQKYDNLKYLGTHIQGDSVSYQKLQIRTDKLRTLNDFQKLLGNINWIRPFLKLTTGELKPLFEILNGDSNPISTRKLTPEACKALQLMNERLSTARVKRLDLSQPWSLCILKTEYTPTACLWQDGVVEWIHLPHISPKVITPYDIFCTQLIIKGRHRSKELFSKDPDYIVVPYTKVQFDLLLQEKEDWPISLLGFLGEVHFHLPKDPLLTFTLQTAIIFPHMTSTTPLEKGIVIFTDGSANGRSVTYIQGREPIIKENTQNTAQQAEIVAVITAFEEVSQPFNLYTDSKYVTGLFPEIETATLSPRTKIYTELKHLQRLIHKRQEKFYIGHIRGHTGLPGPLAQGNAYADSLTRILTAAGKRTADGSEFEKRTADGSEFESPKKKAKVE

SEQ ID NO: 3153 - protein, 2121 aa, synthetic construct
MPAAKRVKLDGGDKKYSIGLDIGTNSVGWAVITDEYKVPSKKFKVLGNTDRHSIKKNLIGALLFDSGETAEATRLKRTARRRYTRRKNRICYLQEIFSNEMAKVDDSFFHRLEESFLVEEDKKHERHPIFGNIVDEVAYHEKYPTIYHLRKKLVDSTDKADLRLIYLALAHMIKFRGHFLIEGDLNPDNSDVDKLFIQLVQTYNQLFEENPINASGVDAKAILSARLSKSRRLENLIAQLPGEKKNGLFGNLIALSLGLTPNFKSNFDLAEDAKLQLSKDTYDDDLDNLLAQIGDQYADLFLAAKNLSDAILLSDILRVNTEITKAPLSASMIKRYDEHHQDLTLLKALVRQQLPEKYKEIFFDQSKNGYAGYIDGGASQEEFYKFIKPILEKMDGTEELLVKLNREDLLRKQRTFDNGSIPHQIHLGELHAILRRQEDFYPFLKDNREKIEKILTFRIPYYVGPLARGNSRFAWMTRKSEETITPWNFEEVVDKGASAQSFIERMTNFDKNLPNEKVLPKHSLLYEYFTVYNELTKVKYVTEGMRKPAFLSGEQKKAIVDLLFKTNRKVTVKQLKEDYFKKIECFDSVEISGVEDRFNASLGTYHDLLKIIKDKDFLDNEENEDILEDIVLTLTLFEDREMIEERLKTYAHLFDDKVMKQLKRRRYTGWGRLSRKLINGIRDKQSGKTILDFLKSDGFANRNFMQLIHDDSLTFKEDIQKAQVSGQGDSLHEHIANLAGSPAIKKGILQTVKVVDELVKVMGRHKPENIVIEMARENQTTQKGQKNSRERMKRIEEGIKELGSQILKEHPVENTQLQNEKLYLYYLQNGRDMYVDQELDINRLSDYDVDHIVPQSFLKDDSIDNKVLTRSDKARGKSDNVPSEEVVKKMKNYWRQLLNAKLITQRKFDNLTKAERGGLSELDKAGFIKRQLVETRQITKHVAQILDSRMNTKYDENDKLIREVKVITLKSKLVSDFRKDFQFYKVREINNYHHAHDAYLNAVVGTALIKKYPKLESEFVYGDYKVYDVRKMIAKSEQEIGKATAKYFFYSNIMNFFKTEITLANGEIRKRPLIETNGETGEIVWDKGRDFATVRKVLSMPQVNIVKKTEVQTGGFSKESILPKRNSDKLIARKKDWDPKKYGGFDSPTVAYSVLVVAKVEKGKSKKLKSVKELLGITIMERSSFEKNPIDFLEAKGYKEVKKDLIIKLPKYSLFELENGRKRMLASAGELQKGNELALPSKYVNFLYLASHYEKLKGSPEDNEQKQLFVEQHKHYLDEIIEQISEFSKRVILADANLDKVLSAYNKHRDKPIREQAENIIHLFTLTNLGAPAAFKYFDTTIDRKRYTSTKEVLDATLIHQSITGLYETRIDLSQLGGDGGSGSETPGTSESATPESGGVQEISDSRPMLHIYLNGRRFLGLLDTGADKTCIAGRDWPANWPIHQTESSLQGLGMACGVARSSQPLRWQHEDKSGIIHPFVIPTLPFTLWGRDIMKDIKVRLMTDSPDDSQDLMIGAIESNLFADQISWKSDQPVWLNQWPLKQEKLQALQQLVTEQLQLGHLEESNSPWNTPVFVIKKKSGKWRLLQDLRAVNATMHDMGALQPGLPSPVAVPKGWEIIIIDLQDCFFNIKLHPEDCKRFAFSVPSPNFKRPYQRFQWKVLPQGMKNSPTLCQKFVDKAILTVRDKYQDSYIVHYMDDILLAHPSRSIVDEILTSMIQALNKHGLVVSTEKIQKYDNLKYLGTHIQGDSVSYQKLQIRTDKLRTLNDFQKLLGNINWIRPFLKLTTGELKPLFEILNGDSNPISTRKLTPEACKALQLMNERLSTARVKRLDLSQPWSLCILKTEYTPTACLWQDGVVEWIHLPHISPKVITPYDIFCTQLIIKGRHRSKELFSKDPDYIVVPYTKVQFDLLLQEKEDWPISLLGFLGEVHFHLPKDPLLTFTLQTAIIFPHMTSTTPLEKGIVIFTDGSANGRSVTYIQGREPIIKENTQNTAQQAEIVAVITAFEEVSQPFNLYTDSKYVTGLFPEIETATLSPRTKIYTELKHLQRLIHKRQEKFYIGHIRGHTGLPGPLAQGNAYADSLTRILTAAGKRTADGSEFEKRTADGSEFESPKKKAKVE

SEQ ID NO: 3154 - protein, 2116 aa, synthetic construct
MPAAKRVKLDGGDKKYSIGLDIGTNSVGWAVITDEYKVPSKKFKVLGNTDRHSIKKNLIGALLFDSGETAEATRLKRTARRRYTRRKNRICYLQEIFSNEMAKVDDSFFHRLEESFLVEEDKKHERHPIFGNIVDEVAYHEKYPTIYHLRKKLVDSTDKADLRLIYLALAHMIKFRGHFLIEGDLNPDNSDVDKLFIQLVQTYNQLFEENPINASGVDAKAILSARLSKSRRLENLIAQLPGEKKNGLFGNLIALSLGLTPNFKSNFDLAEDAKLQLSKDTYDDDLDNLLAQIGDQYADLFLAAKNLSDAILLSDILRVNTEITKAPLSASMIKRYDEHHQDLTLLKALVRQQLPEKYKEIFFDQSKNGYAGYIDGGASQEEFYKFIKPILEKMDGTEELLVKLNREDLLRKQRTFDNGSIPHQIHLGELHAILRRQEDFYPFLKDNREKIEKILTFRIPYYVGPLARGNSRFAWMTRKSEETITPWNFEEVVDKGASAQSFIERMTNFDKNLPNEKVLPKHSLLYEYFTVYNELTKVKYVTEGMRKPAFLSGEQKKAIVDLLFKTNRKVTVKQLKEDYFKKIECFDSVEISGVEDRFNASLGTYHDLLKIIKDKDFLDNEENEDILEDIVLTLTLFEDREMIEERLKTYAHLFDDKVMKQLKRRRYTGWGRLSRKLINGIRDKQSGKTILDFLKSDGFANRNFMQLIHDDSLTFKEDIQKAQVSGQGDSLHEHIANLAGSPAIKKGILQTVKVVDELVKVMGRHKPENIVIEMARENQTTQKGQKNSRERMKRIEEGIKELGSQILKEHPVENTQLQNEKLYLYYLQNGRDMYVDQELDINRLSDYDVDHIVPQSFLKDDSIDNKVLTRSDKARGKSDNVPSEEVVKKMKNYWRQLLNAKLITQRKFDNLTKAERGGLSELDKAGFIKRQLVETRQITKHVAQILDSRMNTKYDENDKLIREVKVITLKSKLVSDFRKDFQFYKVREINNYHHAHDAYLNAVVGTALIKKYPKLESEFVYGDYKVYDVRKMIAKSEQEIGKATAKYFFYSNIMNFFKTEITLANGEIRKRPLIETNGETGEIVWDKGRDFATVRKVLSMPQVNIVKKTEVQTGGFSKESILPKRNSDKLIARKKDWDPKKYGGFDSPTVAYSVLVVAKVEKGKSKKLKSVKELLGITIMERSSFEKNPIDFLEAKGYKEVKKDLIIKLPKYSLFELENGRKRMLASAGELQKGNELALPSKYVNFLYLASHYEKLKGSPEDNEQKQLFVEQHKHYLDEIIEQISEFSKRVILADANLDKVLSAYNKHRDKPIREQAENIIHLFTLTNLGAPAAFKYFDTTIDRKRYTSTKEVLDATLIHQSITGLYETRIDLSQLGGDGGGGSEAAAKGGGGGVQEISDSRPMLHIYLNGRRFLGLLDTGADKTCIAGRDWPANWPIHQTESSLQGLGMACGVARSSQPLRWQHEDKSGIIHPFVIPTLPFTLWGRDIMKDIKVRLMTDSPDDSQDLMIGAIESNLFADQISWKSDQPVWLNQWPLKQEKLQALQQLVTEQLQLGHLEESNSPWNTPVFVIKKKSGKWRLLQDLRAVNATMHDMGALQPGLPSPVAVPKGWEIIIIDLQDCFFNIKLHPEDCKRFAFSVPSPNFKRPYQRFQWKVLPQGMKNSPTLCQKFVDKAILTVRDKYQDSYIVHYMDDILLAHPSRSIVDEILTSMIQALNKHGLVVSTEKIQKYDNLKYLGTHIQGDSVSYQKLQIRTDKLRTLNDFQKLLGNINWIRPFLKLTTGELKPLFEILNGDSNPISTRKLTPEACKALQLMNERLSTARVKRLDLSQPWSLCILKTEYTPTACLWQDGVVEWIHLPHISPKVITPYDIFCTQLIIKGRHRSKELFSKDPDYIVVPYTKVQFDLLLQEKEDWPISLLGFLGEVHFHLPKDPLLTFTLQTAIIFPHMTSTTPLEKGIVIFTDGSANGRSVTYIQGREPIIKENTQNTAQQAEIVAVITAFEEVSQPFNLYTDSKYVTGLFPEIETATLSPRTKIYTELKHLQRLIHKRQEKFYIGHIRGHTGLPGPLAQGNAYADSLTRILTAAGKRTADGSEFEKRTADGSEFESPKKKAKVE

SEQ ID NO: 3155 - protein, 2114 aa, synthetic construct
MPAAKRVKLDGGDKKYSIGLDIGTNSVGWAVITDEYKVPSKKFKVLGNTDRHSIKKNLIGALLFDSGETAEATRLKRTARRRYTRRKNRICYLQEIFSNEMAKVDDSFFHRLEESFLVEEDKKHERHPIFGNIVDEVAYHEKYPTIYHLRKKLVDSTDKADLRLIYLALAHMIKFRGHFLIEGDLNPDNSDVDKLFIQLVQTYNQLFEENPINASGVDAKAILSARLSKSRRLENLIAQLPGEKKNGLFGNLIALSLGLTPNFKSNFDLAEDAKLQLSKDTYDDDLDNLLAQIGDQYADLFLAAKNLSDAILLSDILRVNTEITKAPLSASMIKRYDEHHQDLTLLKALVRQQLPEKYKEIFFDQSKNGYAGYIDGGASQEEFYKFIKPILEKMDGTEELLVKLNREDLLRKQRTFDNGSIPHQIHLGELHAILRRQEDFYPFLKDNREKIEKILTFRIPYYVGPLARGNSRFAWMTRKSEETITPWNFEEVVDKGASAQSFIERMTNFDKNLPNEKVLPKHSLLYEYFTVYNELTKVKYVTEGMRKPAFLSGEQKKAIVDLLFKTNRKVTVKQLKEDYFKKIECFDSVEISGVEDRFNASLGTYHDLLKIIKDKDFLDNEENEDILEDIVLTLTLFEDREMIEERLKTYAHLFDDKVMKQLKRRRYTGWGRLSRKLINGIRDKQSGKTILDFLKSDGFANRNFMQLIHDDSLTFKEDIQKAQVSGQGDSLHEHIANLAGSPAIKKGILQTVKVVDELVKVMGRHKPENIVIEMARENQTTQKGQKNSRERMKRIEEGIKELGSQILKEHPVENTQLQNEKLYLYYLQNGRDMYVDQELDINRLSDYDVDHIVPQSFLKDDSIDNKVLTRSDKARGKSDNVPSEEVVKKMKNYWRQLLNAKLITQRKFDNLTKAERGGLSELDKAGFIKRQLVETRQITKHVAQILDSRMNTKYDENDKLIREVKVITLKSKLVSDFRKDFQFYKVREINNYHHAHDAYLNAVVGTALIKKYPKLESEFVYGDYKVYDVRKMIAKSEQEIGKATAKYFFYSNIMNFFKTEITLANGEIRKRPLIETNGETGEIVWDKGRDFATVRKVLSMPQVNIVKKTEVQTGGFSKESILPKRNSDKLIARKKDWDPKKYGGFDSPTVAYSVLVVAKVEKGKSKKLKSVKELLGITIMERSSFEKNPIDFLEAKGYKEVKKDLIIKLPKYSLFELENGRKRMLASAGELQKGNELALPSKYVNFLYLASHYEKLKGSPEDNEQKQLFVEQHKHYLDEIIEQISEFSKRVILADANLDKVLSAYNKHRDKPIREQAENIIHLFTLTNLGAPAAFKYFDTTIDRKRYTSTKEVLDATLIHQSITGLYETRIDLSQLGGDGGPAPGGSGSSGGVQEISDSRPMLHIYLNGRRFLGLLDTGADKTCIAGRDWPANWPIHQTESSLQGLGMACGVARSSQPLRWQHEDKSGIIHPFVIPTLPFTLWGRDIMKDIKVRLMTDSPDDSQDLMIGAIESNLFADQISWKSDQPVWLNQWPLKQEKLQALQQLVTEQLQLGHLEESNSPWNTPVFVIKKKSGKWRLLQDLRAVNATMHDMGALQPGLPSPVAVPKGWEIIIIDLQDCFFNIKLHPEDCKRFAFSVPSPNFKRPYQRFQWKVLPQGMKNSPTLCQKFVDKAILTVRDKYQDSYIVHYMDDILLAHPSRSIVDEILTSMIQALNKHGLVVSTEKIQKYDNLKYLGTHIQGDSVSYQKLQIRTDKLRTLNDFQKLLGNINWIRPFLKLTTGELKPLFEILNGDSNPISTRKLTPEACKALQLMNERLSTARVKRLDLSQPWSLCILKTEYTPTACLWQDGVVEWIHLPHISPKVITPYDIFCTQLIIKGRHRSKELFSKDPDYIVVPYTKVQFDLLLQEKEDWPISLLGFLGEVHFHLPKDPLLTFTLQTAIIFPHMTSTTPLEKGIVIFTDGSANGRSVTYIQGREPIIKENTQNTAQQAEIVAVITAFEEVSQPFNLYTDSKYVTGLFPEIETATLSPRTKIYTELKHLQRLIHKRQEKFYIGHIRGHTGLPGPLAQGNAYADSLTRILTAAGKRTADGSEFEKRTADGSEFESPKKKAKVE

SEQ ID NO: 3156 - protein, 2116 aa, synthetic construct
MPAAKRVKLDGGDKKYSIGLDIGTNSVGWAVITDEYKVPSKKFKVLGNTDRHSIKKNLIGALLFDSGETAEATRLKRTARRRYTRRKNRICYLQEIFSNEMAKVDDSFFHRLEESFLVEEDKKHERHPIFGNIVDEVAYHEKYPTIYHLRKKLVDSTDKADLRLIYLALAHMIKFRGHFLIEGDLNPDNSDVDKLFIQLVQTYNQLFEENPINASGVDAKAILSARLSKSRRLENLIAQLPGEKKNGLFGNLIALSLGLTPNFKSNFDLAEDAKLQLSKDTYDDDLDNLLAQIGDQYADLFLAAKNLSDAILLSDILRVNTEITKAPLSASMIKRYDEHHQDLTLLKALVRQQLPEKYKEIFFDQSKNGYAGYIDGGASQEEFYKFIKPILEKMDGTEELLVKLNREDLLRKQRTFDNGSIPHQIHLGELHAILRRQEDFYPFLKDNREKIEKILTFRIPYYVGPLARGNSRFAWMTRKSEETITPWNFEEVVDKGASAQSFIERMTNFDKNLPNEKVLPKHSLLYEYFTVYNELTKVKYVTEGMRKPAFLSGEQKKAIVDLLFKTNRKVTVKQLKEDYFKKIECFDSVEISGVEDRFNASLGTYHDLLKIIKDKDFLDNEENEDILEDIVLTLTLFEDREMIEERLKTYAHLFDDKVMKQLKRRRYTGWGRLSRKLINGIRDKQSGKTILDFLKSDGFANRNFMQLIHDDSLTFKEDIQKAQVSGQGDSLHEHIANLAGSPAIKKGILQTVKVVDELVKVMGRHKPENIVIEMARENQTTQKGQKNSRERMKRIEEGIKELGSQILKEHPVENTQLQNEKLYLYYLQNGRDMYVDQELDINRLSDYDVDHIVPQSFLKDDSIDNKVLTRSDKARGKSDNVPSEEVVKKMKNYWRQLLNAKLITQRKFDNLTKAERGGLSELDKAGFIKRQLVETRQITKHVAQILDSRMNTKYDENDKLIREVKVITLKSKLVSDFRKDFQFYKVREINNYHHAHDAYLNAVVGTALIKKYPKLESEFVYGDYKVYDVRKMIAKSEQEIGKATAKYFFYSNIMNFFKTEITLANGEIRKRPLIETNGETGEIVWDKGRDFATVRKVLSMPQVNIVKKTEVQTGGFSKESILPKRNSDKLIARKKDWDPKKYGGFDSPTVAYSVLVVAKVEKGKSKKLKSVKELLGITIMERSSFEKNPIDFLEAKGYKEVKKDLIIKLPKYSLFELENGRKRMLASAGELQKGNELALPSKYVNFLYLASHYEKLKGSPEDNEQKQLFVEQHKHYLDEIIEQISEFSKRVILADANLDKVLSAYNKHRDKPIREQAENIIHLFTLTNLGAPAAFKYFDTTIDRKRYTSTKEVLDATLIHQSITGLYETRIDLSQLGGDGGEAAAKGGGGGSGGVQEISDSRPMLHIYLNGRRFLGLLDTGADKTCIAGRDWPANWPIHQTESSLQGLGMACGVARSSQPLRWQHEDKSGIIHPFVIPTLPFTLWGRDIMKDIKVRLMTDSPDDSQDLMIGAIESNLFADQISWKSDQPVWLNQWPLKQEKLQALQQLVTEQLQLGHLEESNSPWNTPVFVIKKKSGKWRLLQDLRAVNATMHDMGALQPGLPSPVAVPKGWEIIIIDLQDCFFNIKLHPEDCKRFAFSVPSPNFKRPYQRFQWKVLPQGMKNSPTLCQKFVDKAILTVRDKYQDSYIVHYMDDILLAHPSRSIVDEILTSMIQALNKHGLVVSTEKIQKYDNLKYLGTHIQGDSVSYQKLQIRTDKLRTLNDFQKLLGNINWIRPFLKLTTGELKPLFEILNGDSNPISTRKLTPEACKALQLMNERLSTARVKRLDLSQPWSLCILKTEYTPTACLWQDGVVEWIHLPHISPKVITPYDIFCTQLIIKGRHRSKELFSKDPDYIVVPYTKVQFDLLLQEKEDWPISLLGFLGEVHFHLPKDPLLTFTLQTAIIFPHMTSTTPLEKGIVIFTDGSANGRSVTYIQGREPIIKENTQNTAQQAEIVAVITAFEEVSQPFNLYTDSKYVTGLFPEIETATLSPRTKIYTELKHLQRLIHKRQEKFYIGHIRGHTGLPGPLAQGNAYADSLTRILTAAGKRTADGSEFEKRTADGSEFESPKKKAKVE

SEQ ID NO: 3157 - protein, 2125 aa, synthetic construct
MPAAKRVKLDGGDKKYSIGLDIGTNSVGWAVITDEYKVPSKKFKVLGNTDRHSIKKNLIGALLFDSGETAEATRLKRTARRRYTRRKNRICYLQEIFSNEMAKVDDSFFHRLEESFLVEEDKKHERHPIFGNIVDEVAYHEKYPTIYHLRKKLVDSTDKADLRLIYLALAHMIKFRGHFLIEGDLNPDNSDVDKLFIQLVQTYNQLFEENPINASGVDAKAILSARLSKSRRLENLIAQLPGEKKNGLFGNLIALSLGLTPNFKSNFDLAEDAKLQLSKDTYDDDLDNLLAQIGDQYADLFLAAKNLSDAILLSDILRVNTEITKAPLSASMIKRYDEHHQDLTLLKALVRQQLPEKYKEIFFDQSKNGYAGYIDGGASQEEFYKFIKPILEKMDGTEELLVKLNREDLLRKQRTFDNGSIPHQIHLGELHAILRRQEDFYPFLKDNREKIEKILTFRIPYYVGPLARGNSRFAWMTRKSEETITPWNFEEVVDKGASAQSFIERMTNFDKNLPNEKVLPKHSLLYEYFTVYNELTKVKYVTEGMRKPAFLSGEQKKAIVDLLFKTNRKVTVKQLKEDYFKKIECFDSVEISGVEDRFNASLGTYHDLLKIIKDKDFLDNEENEDILEDIVLTLTLFEDREMIEERLKTYAHLFDDKVMKQLKRRRYTGWGRLSRKLINGIRDKQSGKTILDFLKSDGFANRNFMQLIHDDSLTFKEDIQKAQVSGQGDSLHEHIANLAGSPAIKKGILQTVKVVDELVKVMGRHKPENIVIEMARENQTTQKGQKNSRERMKRIEEGIKELGSQILKEHPVENTQLQNEKLYLYYLQNGRDMYVDQELDINRLSDYDVDHIVPQSFLKDDSIDNKVLTRSDKARGKSDNVPSEEVVKKMKNYWRQLLNAKLITQRKFDNLTKAERGGLSELDKAGFIKRQLVETRQITKHVAQILDSRMNTKYDENDKLIREVKVITLKSKLVSDFRKDFQFYKVREINNYHHAHDAYLNAVVGTALIKKYPKLESEFVYGDYKVYDVRKMIAKSEQEIGKATAKYFFYSNIMNFFKTEITLANGEIRKRPLIETNGETGEIVWDKGRDFATVRKVLSMPQVNIVKKTEVQTGGFSKESILPKRNSDKLIARKKDWDPKKYGGFDSPTVAYSVLVVAKVEKGKSKKLKSVKELLGITIMERSSFEKNPIDFLEAKGYKEVKKDLIIKLPKYSLFELENGRKRMLASAGELQKGNELALPSKYVNFLYLASHYEKLKGSPEDNEQKQLFVEQHKHYLDEIIEQISEFSKRVILADANLDKVLSAYNKHRDKPIREQAENIIHLFTLTNLGAPAAFKYFDTTIDRKRYTSTKEVLDATLIHQSITGLYETRIDLSQLGGDGGEAAAKEAAAKEAAAKEAAAKGGVQEISDSRPMLHIYLNGRRFLGLLDTGADKTCIAGRDWPANWPIHQTESSLQGLGMACGVARSSQPLRWQHEDKSGIIHPFVIPTLPFTLWGRDIMKDIKVRLMTDSPDDSQDLMIGAIESNLFADQISWKSDQPVWLNQWPLKQEKLQALQQLVTEQLQLGHLEESNSPWNTPVFVIKKKSGKWRLLQDLRAVNATMHDMGALQPGLPSPVAVPKGWEIIIIDLQDCFFNIKLHPEDCKRFAFSVPSPNFKRPYQRFQWKVLPQGMKNSPTLCQKFVDKAILTVRDKYQDSYIVHYMDDILLAHPSRSIVDEILTSMIQALNKHGLVVSTEKIQKYDNLKYLGTHIQGDSVSYQKLQIRTDKLRTLNDFQKLLGNINWIRPFLKLTTGELKPLFEILNGDSNPISTRKLTPEACKALQLMNERLSTARVKRLDLSQPWSLCILKTEYTPTACLWQDGVVEWIHLPHISPKVITPYDIFCTQLIIKGRHRSKELFSKDPDYIVVPYTKVQFDLLLQEKEDWPISLLGFLGEVHFHLPKDPLLTFTLQTAIIFPHMTSTTPLEKGIVIFTDGSANGRSVTYIQGREPIIKENTQNTAQQAEIVAVITAFEEVSQPFNLYTDSKYVTGLFPEIETATLSPRTKIYTELKHLQRLIHKRQEKFYIGHIRGHTGLPGPLAQGNAYADSLTRILTAAGKRTADGSEFEKRTADGSEFESPKKKAKVE

SEQ ID NO: 3158 - protein, 2116 aa, synthetic construct
MPAAKRVKLDGGDKKYSIGLDIGTNSVGWAVITDEYKVPSKKFKVLGNTDRHSIKKNLIGALLFDSGETAEATRLKRTARRRYTRRKNRICYLQEIFSNEMAKVDDSFFHRLEESFLVEEDKKHERHPIFGNIVDEVAYHEKYPTIYHLRKKLVDSTDKADLRLIYLALAHMIKFRGHFLIEGDLNPDNSDVDKLFIQLVQTYNQLFEENPINASGVDAKAILSARLSKSRRLENLIAQLPGEKKNGLFGNLIALSLGLTPNFKSNFDLAEDAKLQLSKDTYDDDLDNLLAQIGDQYADLFLAAKNLSDAILLSDILRVNTEITKAPLSASMIKRYDEHHQDLTLLKALVRQQLPEKYKEIFFDQSKNGYAGYIDGGASQEEFYKFIKPILEKMDGTEELLVKLNREDLLRKQRTFDNGSIPHQIHLGELHAILRRQEDFYPFLKDNREKIEKILTFRIPYYVGPLARGNSRFAWMTRKSEETITPWNFEEVVDKGASAQSFIERMTNFDKNLPNEKVLPKHSLLYEYFTVYNELTKVKYVTEGMRKPAFLSGEQKKAIVDLLFKTNRKVTVKQLKEDYFKKIECFDSVEISGVEDRFNASLGTYHDLLKIIKDKDFLDNEENEDILEDIVLTLTLFEDREMIEERLKTYAHLFDDKVMKQLKRRRYTGWGRLSRKLINGIRDKQSGKTILDFLKSDGFANRNFMQLIHDDSLTFKEDIQKAQVSGQGDSLHEHIANLAGSPAIKKGILQTVKVVDELVKVMGRHKPENIVIEMARENQTTQKGQKNSRERMKRIEEGIKELGSQILKEHPVENTQLQNEKLYLYYLQNGRDMYVDQELDINRLSDYDVDHIVPQSFLKDDSIDNKVLTRSDKARGKSDNVPSEEVVKKMKNYWRQLLNAKLITQRKFDNLTKAERGGLSELDKAGFIKRQLVETRQITKHVAQILDSRMNTKYDENDKLIREVKVITLKSKLVSDFRKDFQFYKVREINNYHHAHDAYLNAVVGTALIKKYPKLESEFVYGDYKVYDVRKMIAKSEQEIGKATAKYFFYSNIMNFFKTEITLANGEIRKRPLIETNGETGEIVWDKGRDFATVRKVLSMPQVNIVKKTEVQTGGFSKESILPKRNSDKLIARKKDWDPKKYGGFDSPTVAYSVLVVAKVEKGKSKKLKSVKELLGITIMERSSFEKNPIDFLEAKGYKEVKKDLIIKLPKYSLFELENGRKRMLASAGELQKGNELALPSKYVNFLYLASHYEKLKGSPEDNEQKQLFVEQHKHYLDEIIEQISEFSKRVILADANLDKVLSAYNKHRDKPIREQAENIIHLFTLTNLGAPAAFKYFDTTIDRKRYTSTKEVLDATLIHQSITGLYETRIDLSQLGGDGGGGSEAAAKGSSGGVQEISDSRPMLHIYLNGRRFLGLLDTGADKTCIAGRDWPANWPIHQTESSLQGLGMACGVARSSQPLRWQHEDKSGIIHPFVIPTLPFTLWGRDIMKDIKVRLMTDSPDDSQDLMIGAIESNLFADQISWKSDQPVWLNQWPLKQEKLQALQQLVTEQLQLGHLEESNSPWNTPVFVIKKKSGKWRLLQDLRAVNATMHDMGALQPGLPSPVAVPKGWEIIIIDLQDCFFNIKLHPEDCKRFAFSVPSPNFKRPYQRFQWKVLPQGMKNSPTLCQKFVDKAILTVRDKYQDSYIVHYMDDILLAHPSRSIVDEILTSMIQALNKHGLVVSTEKIQKYDNLKYLGTHIQGDSVSYQKLQIRTDKLRTLNDFQKLLGNINWIRPFLKLTTGELKPLFEILNGDSNPISTRKLTPEACKALQLMNERLSTARVKRLDLSQPWSLCILKTEYTPTACLWQDGVVEWIHLPHISPKVITPYDIFCTQLIIKGRHRSKELFSKDPDYIVVPYTKVQFDLLLQEKEDWPISLLGFLGEVHFHLPKDPLLTFTLQTAIIFPHMTSTTPLEKGIVIFTDGSANGRSVTYIQGREPIIKENTQNTAQQAEIVAVITAFEEVSQPFNLYTDSKYVTGLFPEIETATLSPRTKIYTELKHLQRLIHKRQEKFYIGHIRGHTGLPGPLAQGNAYADSLTRILTAAGKRTADGSEFEKRTADGSEFESPKKKAKVE

SEQ ID NO: 3159 - protein, 2114 aa, synthetic construct
MPAAKRVKLDGGDKKYSIGLDIGTNSVGWAVITDEYKVPSKKFKVLGNTDRHSIKKNLIGALLFDSGETAEATRLKRTARRRYTRRKNRICYLQEIFSNEMAKVDDSFFHRLEESFLVEEDKKHERHPIFGNIVDEVAYHEKYPTIYHLRKKLVDSTDKADLRLIYLALAHMIKFRGHFLIEGDLNPDNSDVDKLFIQLVQTYNQLFEENPINASGVDAKAILSARLSKSRRLENLIAQLPGEKKNGLFGNLIALSLGLTPNFKSNFDLAEDAKLQLSKDTYDDDLDNLLAQIGDQYADLFLAAKNLSDAILLSDILRVNTEITKAPLSASMIKRYDEHHQDLTLLKALVRQQLPEKYKEIFFDQSKNGYAGYIDGGASQEEFYKFIKPILEKMDGTEELLVKLNREDLLRKQRTFDNGSIPHQIHLGELHAILRRQEDFYPFLKDNREKIEKILTFRIPYYVGPLARGNSRFAWMTRKSEETITPWNFEEVVDKGASAQSFIERMTNFDKNLPNEKVLPKHSLLYEYFTVYNELTKVKYVTEGMRKPAFLSGEQKKAIVDLLFKTNRKVTVKQLKEDYFKKIECFDSVEISGVEDRFNASLGTYHDLLKIIKDKDFLDNEENEDILEDIVLTLTLFEDREMIEERLKTYAHLFDDKVMKQLKRRRYTGWGRLSRKLINGIRDKQSGKTILDFLKSDGFANRNFMQLIHDDSLTFKEDIQKAQVSGQGDSLHEHIANLAGSPAIKKGILQTVKVVDELVKVMGRHKPENIVIEMARENQTTQKGQKNSRERMKRIEEGIKELGSQILKEHPVENTQLQNEKLYLYYLQNGRDMYVDQELDINRLSDYDVDHIVPQSFLKDDSIDNKVLTRSDKARGKSDNVPSEEVVKKMKNYWRQLLNAKLITQRKFDNLTKAERGGLSELDKAGFIKRQLVETRQITKHVAQILDSRMNTKYDENDKLIREVKVITLKSKLVSDFRKDFQFYKVREINNYHHAHDAYLNAVVGTALIKKYPKLESEFVYGDYKVYDVRKMIAKSEQEIGKATAKYFFYSNIMNFFKTEITLANGEIRKRPLIETNGETGEIVWDKGRDFATVRKVLSMPQVNIVKKTEVQTGGFSKESILPKRNSDKLIARKKDWDPKKYGGFDSPTVAYSVLVVAKVEKGKSKKLKSVKELLGITIMERSSFEKNPIDFLEAKGYKEVKKDLIIKLPKYSLFELENGRKRMLASAGELQKGNELALPSKYVNFLYLASHYEKLKGSPEDNEQKQLFVEQHKHYLDEIIEQISEFSKRVILADANLDKVLSAYNKHRDKPIREQAENIIHLFTLTNLGAPAAFKYFDTTIDRKRYTSTKEVLDATLIHQSITGLYETRIDLSQLGGDGGGGGGSSGGSGGVQEISDSRPMLHIYLNGRRFLGLLDTGADKTCIAGRDWPANWPIHQTESSLQGLGMACGVARSSQPLRWQHEDKSGIIHPFVIPTLPFTLWGRDIMKDIKVRLMTDSPDDSQDLMIGAIESNLFADQISWKSDQPVWLNQWPLKQEKLQALQQLVTEQLQLGHLEESNSPWNTPVFVIKKKSGKWRLLQDLRAVNATMHDMGALQPGLPSPVAVPKGWEIIIIDLQDCFFNIKLHPEDCKRFAFSVPSPNFKRPYQRFQWKVLPQGMKNSPTLCQKFVDKAILTVRDKYQDSYIVHYMDDILLAHPSRSIVDEILTSMIQALNKHGLVVSTEKIQKYDNLKYLGTHIQGDSVSYQKLQIRTDKLRTLNDFQKLLGNINWIRPFLKLTTGELKPLFEILNGDSNPISTRKLTPEACKALQLMNERLSTARVKRLDLSQPWSLCILKTEYTPTACLWQDGVVEWIHLPHISPKVITPYDIFCTQLIIKGRHRSKELFSKDPDYIVVPYTKVQFDLLLQEKEDWPISLLGFLGEVHFHLPKDPLLTFTLQTAIIFPHMTSTTPLEKGIVIFTDGSANGRSVTYIQGREPIIKENTQNTAQQAEIVAVITAFEEVSQPFNLYTDSKYVTGLFPEIETATLSPRTKIYTELKHLQRLIHKRQEKFYIGHIRGHTGLPGPLAQGNAYADSLTRILTAAGKRTADGSEFEKRTADGSEFESPKKKAKVE

SEQ ID NO: 3160 - protein, 2111 aa, synthetic construct
MPAAKRVKLDGGDKKYSIGLDIGTNSVGWAVITDEYKVPSKKFKVLGNTDRHSIKKNLIGALLFDSGETAEATRLKRTARRRYTRRKNRICYLQEIFSNEMAKVDDSFFHRLEESFLVEEDKKHERHPIFGNIVDEVAYHEKYPTIYHLRKKLVDSTDKADLRLIYLALAHMIKFRGHFLIEGDLNPDNSDVDKLFIQLVQTYNQLFEENPINASGVDAKAILSARLSKSRRLENLIAQLPGEKKNGLFGNLIALSLGLTPNFKSNFDLAEDAKLQLSKDTYDDDLDNLLAQIGDQYADLFLAAKNLSDAILLSDILRVNTEITKAPLSASMIKRYDEHHQDLTLLKALVRQQLPEKYKEIFFDQSKNGYAGYIDGGASQEEFYKFIKPILEKMDGTEELLVKLNREDLLRKQRTFDNGSIPHQIHLGELHAILRRQEDFYPFLKDNREKIEKILTFRIPYYVGPLARGNSRFAWMTRKSEETITPWNFEEVVDKGASAQSFIERMTNFDKNLPNEKVLPKHSLLYEYFTVYNELTKVKYVTEGMRKPAFLSGEQKKAIVDLLFKTNRKVTVKQLKEDYFKKIECFDSVEISGVEDRFNASLGTYHDLLKIIKDKDFLDNEENEDILEDIVLTLTLFEDREMIEERLKTYAHLFDDKVMKQLKRRRYTGWGRLSRKLINGIRDKQSGKTILDFLKSDGFANRNFMQLIHDDSLTFKEDIQKAQVSGQGDSLHEHIANLAGSPAIKKGILQTVKVVDELVKVMGRHKPENIVIEMARENQTTQKGQKNSRERMKRIEEGIKELGSQILKEHPVENTQLQNEKLYLYYLQNGRDMYVDQELDINRLSDYDVDHIVPQSFLKDDSIDNKVLTRSDKARGKSDNVPSEEVVKKMKNYWRQLLNAKLITQRKFDNLTKAERGGLSELDKAGFIKRQLVETRQITKHVAQILDSRMNTKYDENDKLIREVKVITLKSKLVSDFRKDFQFYKVREINNYHHAHDAYLNAVVGTALIKKYPKLESEFVYGDYKVYDVRKMIAKSEQEIGKATAKYFFYSNIMNFFKTEITLANGEIRKRPLIETNGETGEIVWDKGRDFATVRKVLSMPQVNIVKKTEVQTGGFSKESILPKRNSDKLIARKKDWDPKKYGGFDSPTVAYSVLVVAKVEKGKSKKLKSVKELLGITIMERSSFEKNPIDFLEAKGYKEVKKDLIIKLPKYSLFELENGRKRMLASAGELQKGNELALPSKYVNFLYLASHYEKLKGSPEDNEQKQLFVEQHKHYLDEIIEQISEFSKRVILADANLDKVLSAYNKHRDKPIREQAENIIHLFTLTNLGAPAAFKYFDTTIDRKRYTSTKEVLDATLIHQSITGLYETRIDLSQLGGDGGGGSPAPGGVQEISDSRPMLHIYLNGRRFLGLLDTGADKTCIAGRDWPANWPIHQTESSLQGLGMACGVARSSQPLRWQHEDKSGIIHPFVIPTLPFTLWGRDIMKDIKVRLMTDSPDDSQDLMIGAIESNLFADQISWKSDQPVWLNQWPLKQEKLQALQQLVTEQLQLGHLEESNSPWNTPVFVIKKKSGKWRLLQDLRAVNATMHDMGALQPGLPSPVAVPKGWEIIIIDLQDCFFNIKLHPEDCKRFAFSVPSPNFKRPYQRFQWKVLPQGMKNSPTLCQKFVDKAILTVRDKYQDSYIVHYMDDILLAHPSRSIVDEILTSMIQALNKHGLVVSTEKIQKYDNLKYLGTHIQGDSVSYQKLQIRTDKLRTLNDFQKLLGNINWIRPFLKLTTGELKPLFEILNGDSNPISTRKLTPEACKALQLMNERLSTARVKRLDLSQPWSLCILKTEYTPTACLWQDGVVEWIHLPHISPKVITPYDIFCTQLIIKGRHRSKELFSKDPDYIVVPYTKVQFDLLLQEKEDWPISLLGFLGEVHFHLPKDPLLTFTLQTAIIFPHMTSTTPLEKGIVIFTDGSANGRSVTYIQGREPIIKENTQNTAQQAEIVAVITAFEEVSQPFNLYTDSKYVTGLFPEIETATLSPRTKIYTELKHLQRLIHKRQEKFYIGHIRGHTGLPGPLAQGNAYADSLTRILTAAGKRTADGSEFEKRTADGSEFESPKKKAKVE

SEQ ID NO: 3161 - protein, 2114 aa, synthetic construct
MPAAKRVKLDGGDKKYSIGLDIGTNSVGWAVITDEYKVPSKKFKVLGNTDRHSIKKNLIGALLFDSGETAEATRLKRTARRRYTRRKNRICYLQEIFSNEMAKVDDSFFHRLEESFLVEEDKKHERHPIFGNIVDEVAYHEKYPTIYHLRKKLVDSTDKADLRLIYLALAHMIKFRGHFLIEGDLNPDNSDVDKLFIQLVQTYNQLFEENPINASGVDAKAILSARLSKSRRLENLIAQLPGEKKNGLFGNLIALSLGLTPNFKSNFDLAEDAKLQLSKDTYDDDLDNLLAQIGDQYADLFLAAKNLSDAILLSDILRVNTEITKAPLSASMIKRYDEHHQDLTLLKALVRQQLPEKYKEIFFDQSKNGYAGYIDGGASQEEFYKFIKPILEKMDGTEELLVKLNREDLLRKQRTFDNGSIPHQIHLGELHAILRRQEDFYPFLKDNREKIEKILTFRIPYYVGPLARGNSRFAWMTRKSEETITPWNFEEVVDKGASAQSFIERMTNFDKNLPNEKVLPKHSLLYEYFTVYNELTKVKYVTEGMRKPAFLSGEQKKAIVDLLFKTNRKVTVKQLKEDYFKKIECFDSVEISGVEDRFNASLGTYHDLLKIIKDKDFLDNEENEDILEDIVLTLTLFEDREMIEERLKTYAHLFDDKVMKQLKRRRYTGWGRLSRKLINGIRDKQSGKTILDFLKSDGFANRNFMQLIHDDSLTFKEDIQKAQVSGQGDSLHEHIANLAGSPAIKKGILQTVKVVDELVKVMGRHKPENIVIEMARENQTTQKGQKNSRERMKRIEEGIKELGSQILKEHPVENTQLQNEKLYLYYLQNGRDMYVDQELDINRLSDYDVDHIVPQSFLKDDSIDNKVLTRSDKARGKSDNVPSEEVVKKMKNYWRQLLNAKLITQRKFDNLTKAERGGLSELDKAGFIKRQLVETRQITKHVAQILDSRMNTKYDENDKLIREVKVITLKSKLVSDFRKDFQFYKVREINNYHHAHDAYLNAVVGTALIKKYPKLESEFVYGDYKVYDVRKMIAKSEQEIGKATAKYFFYSNIMNFFKTEITLANGEIRKRPLIETNGETGEIVWDKGRDFATVRKVLSMPQVNIVKKTEVQTGGFSKESILPKRNSDKLIARKKDWDPKKYGGFDSPTVAYSVLVVAKVEKGKSKKLKSVKELLGITIMERSSFEKNPIDFLEAKGYKEVKKDLIIKLPKYSLFELENGRKRMLASAGELQKGNELALPSKYVNFLYLASHYEKLKGSPEDNEQKQLFVEQHKHYLDEIIEQISEFSKRVILADANLDKVLSAYNKHRDKPIREQAENIIHLFTLTNLGAPAAFKYFDTTIDRKRYTSTKEVLDATLIHQSITGLYETRIDLSQLGGDGGPAPGSSGGSGGVQEISDSRPMLHIYLNGRRFLGLLDTGADKTCIAGRDWPANWPIHQTESSLQGLGMACGVARSSQPLRWQHEDKSGIIHPFVIPTLPFTLWGRDIMKDIKVRLMTDSPDDSQDLMIGAIESNLFADQISWKSDQPVWLNQWPLKQEKLQALQQLVTEQLQLGHLEESNSPWNTPVFVIKKKSGKWRLLQDLRAVNATMHDMGALQPGLPSPVAVPKGWEIIIIDLQDCFFNIKLHPEDCKRFAFSVPSPNFKRPYQRFQWKVLPQGMKNSPTLCQKFVDKAILTVRDKYQDSYIVHYMDDILLAHPSRSIVDEILTSMIQALNKHGLVVSTEKIQKYDNLKYLGTHIQGDSVSYQKLQIRTDKLRTLNDFQKLLGNINWIRPFLKLTTGELKPLFEILNGDSNPISTRKLTPEACKALQLMNERLSTARVKRLDLSQPWSLCILKTEYTPTACLWQDGVVEWIHLPHISPKVITPYDIFCTQLIIKGRHRSKELFSKDPDYIVVPYTKVQFDLLLQEKEDWPISLLGFLGEVHFHLPKDPLLTFTLQTAIIFPHMTSTTPLEKGIVIFTDGSANGRSVTYIQGREPIIKENTQNTAQQAEIVAVITAFEEVSQPFNLYTDSKYVTGLFPEIETATLSPRTKIYTELKHLQRLIHKRQEKFYIGHIRGHTGLPGPLAQGNAYADSLTRILTAAGKRTADGSEFEKRTADGSEFESPKKKAKVE

SEQ ID NO: 3162 - protein, 2116 aa, synthetic construct
MPAAKRVKLDGGDKKYSIGLDIGTNSVGWAVITDEYKVPSKKFKVLGNTDRHSIKKNLIGALLFDSGETAEATRLKRTARRRYTRRKNRICYLQEIFSNEMAKVDDSFFHRLEESFLVEEDKKHERHPIFGNIVDEVAYHEKYPTIYHLRKKLVDSTDKADLRLIYLALAHMIKFRGHFLIEGDLNPDNSDVDKLFIQLVQTYNQLFEENPINASGVDAKAILSARLSKSRRLENLIAQLPGEKKNGLFGNLIALSLGLTPNFKSNFDLAEDAKLQLSKDTYDDDLDNLLAQIGDQYADLFLAAKNLSDAILLSDILRVNTEITKAPLSASMIKRYDEHHQDLTLLKALVRQQLPEKYKEIFFDQSKNGYAGYIDGGASQEEFYKFIKPILEKMDGTEELLVKLNREDLLRKQRTFDNGSIPHQIHLGELHAILRRQEDFYPFLKDNREKIEKILTFRIPYYVGPLARGNSRFAWMTRKSEETITPWNFEEVVDKGASAQSFIERMTNFDKNLPNEKVLPKHSLLYEYFTVYNELTKVKYVTEGMRKPAFLSGEQKKAIVDLLFKTNRKVTVKQLKEDYFKKIECFDSVEISGVEDRFNASLGTYHDLLKIIKDKDFLDNEENEDILEDIVLTLTLFEDREMIEERLKTYAHLFDDKVMKQLKRRRYTGWGRLSRKLINGIRDKQSGKTILDFLKSDGFANRNFMQLIHDDSLTFKEDIQKAQVSGQGDSLHEHIANLAGSPAIKKGILQTVKVVDELVKVMGRHKPENIVIEMARENQTTQKGQKNSRERMKRIEEGIKELGSQILKEHPVENTQLQNEKLYLYYLQNGRDMYVDQELDINRLSDYDVDHIVPQSFLKDDSIDNKVLTRSDKARGKSDNVPSEEVVKKMKNYWRQLLNAKLITQRKFDNLTKAERGGLSELDKAGFIKRQLVETRQITKHVAQILDSRMNTKYDENDKLIREVKVITLKSKLVSDFRKDFQFYKVREINNYHHAHDAYLNAVVGTALIKKYPKLESEFVYGDYKVYDVRKMIAKSEQEIGKATAKYFFYSNIMNFFKTEITLANGEIRKRPLIETNGETGEIVWDKGRDFATVRKVLSMPQVNIVKKTEVQTGGFSKESILPKRNSDKLIARKKDWDPKKYGGFDSPTVAYSVLVVAKVEKGKSKKLKSVKELLGITIMERSSFEKNPIDFLEAKGYKEVKKDLIIKLPKYSLFELENGRKRMLASAGELQKGNELALPSKYVNFLYLASHYEKLKGSPEDNEQKQLFVEQHKHYLDEIIEQISEFSKRVILADANLDKVLSAYNKHRDKPIREQAENIIHLFTLTNLGAPAAFKYFDTTIDRKRYTSTKEVLDATLIHQSITGLYETRIDLSQLGGDGGGGSGGGEAAAKGGVQEISDSRPMLHIYLNGRRFLGLLDTGADKTCIAGRDWPANWPIHQTESSLQGLGMACGVARSSQPLRWQHEDKSGIIHPFVIPTLPFTLWGRDIMKDIKVRLMTDSPDDSQDLMIGAIESNLFADQISWKSDQPVWLNQWPLKQEKLQALQQLVTEQLQLGHLEESNSPWNTPVFVIKKKSGKWRLLQDLRAVNATMHDMGALQPGLPSPVAVPKGWEIIIIDLQDCFFNIKLHPEDCKRFAFSVPSPNFKRPYQRFQWKVLPQGMKNSPTLCQKFVDKAILTVRDKYQDSYIVHYMDDILLAHPSRSIVDEILTSMIQALNKHGLVVSTEKIQKYDNLKYLGTHIQGDSVSYQKLQIRTDKLRTLNDFQKLLGNINWIRPFLKLTTGELKPLFEILNGDSNPISTRKLTPEACKALQLMNERLSTARVKRLDLSQPWSLCILKTEYTPTACLWQDGVVEWIHLPHISPKVITPYDIFCTQLIIKGRHRSKELFSKDPDYIVVPYTKVQFDLLLQEKEDWPISLLGFLGEVHFHLPKDPLLTFTLQTAIIFPHMTSTTPLEKGIVIFTDGSANGRSVTYIQGREPIIKENTQNTAQQAEIVAVITAFEEVSQPFNLYTDSKYVTGLFPEIETATLSPRTKIYTELKHLQRLIHKRQEKFYIGHIRGHTGLPGPLAQGNAYADSLTRILTAAGKRTADGSEFEKRTADGSEFESPKKKAKVE

SEQ ID NO: 3163 - protein, 2116 aa, synthetic construct
MPAAKRVKLDGGDKKYSIGLDIGTNSVGWAVITDEYKVPSKKFKVLGNTDRHSIKKNLIGALLFDSGETAEATRLKRTARRRYTRRKNRICYLQEIFSNEMAKVDDSFFHRLEESFLVEEDKKHERHPIFGNIVDEVAYHEKYPTIYHLRKKLVDSTDKADLRLIYLALAHMIKFRGHFLIEGDLNPDNSDVDKLFIQLVQTYNQLFEENPINASGVDAKAILSARLSKSRRLENLIAQLPGEKKNGLFGNLIALSLGLTPNFKSNFDLAEDAKLQLSKDTYDDDLDNLLAQIGDQYADLFLAAKNLSDAILLSDILRVNTEITKAPLSASMIKRYDEHHQDLTLLKALVRQQLPEKYKEIFFDQSKNGYAGYIDGGASQEEFYKFIKPILEKMDGTEELLVKLNREDLLRKQRTFDNGSIPHQIHLGELHAILRRQEDFYPFLKDNREKIEKILTFRIPYYVGPLARGNSRFAWMTRKSEETITPWNFEEVVDKGASAQSFIERMTNFDKNLPNEKVLPKHSLLYEYFTVYNELTKVKYVTEGMRKPAFLSGEQKKAIVDLLFKTNRKVTVKQLKEDYFKKIECFDSVEISGVEDRFNASLGTYHDLLKIIKDKDFLDNEENEDILEDIVLTLTLFEDREMIEERLKTYAHLFDDKVMKQLKRRRYTGWGRLSRKLINGIRDKQSGKTILDFLKSDGFANRNFMQLIHDDSLTFKEDIQKAQVSGQGDSLHEHIANLAGSPAIKKGILQTVKVVDELVKVMGRHKPENIVIEMARENQTTQKGQKNSRERMKRIEEGIKELGSQILKEHPVENTQLQNEKLYLYYLQNGRDMYVDQELDINRLSDYDVDHIVPQSFLKDDSIDNKVLTRSDKARGKSDNVPSEEVVKKMKNYWRQLLNAKLITQRKFDNLTKAERGGLSELDKAGFIKRQLVETRQITKHVAQILDSRMNTKYDENDKLIREVKVITLKSKLVSDFRKDFQFYKVREINNYHHAHDAYLNAVVGTALIKKYPKLESEFVYGDYKVYDVRKMIAKSEQEIGKATAKYFFYSNIMNFFKTEITLANGEIRKRPLIETNGETGEIVWDKGRDFATVRKVLSMPQVNIVKKTEVQTGGFSKESILPKRNSDKLIARKKDWDPKKYGGFDSPTVAYSVLVVAKVEKGKSKKLKSVKELLGITIMERSSFEKNPIDFLEAKGYKEVKKDLIIKLPKYSLFELENGRKRMLASAGELQKGNELALPSKYVNFLYLASHYEKLKGSPEDNEQKQLFVEQHKHYLDEIIEQISEFSKRVILADANLDKVLSAYNKHRDKPIREQAENIIHLFTLTNLGAPAAFKYFDTTIDRKRYTSTKEVLDATLIHQSITGLYETRIDLSQLGGDGGGGGGSSEAAAKGGVQEISDSRPMLHIYLNGRRFLGLLDTGADKTCIAGRDWPANWPIHQTESSLQGLGMACGVARSSQPLRWQHEDKSGIIHPFVIPTLPFTLWGRDIMKDIKVRLMTDSPDDSQDLMIGAIESNLFADQISWKSDQPVWLNQWPLKQEKLQALQQLVTEQLQLGHLEESNSPWNTPVFVIKKKSGKWRLLQDLRAVNATMHDMGALQPGLPSPVAVPKGWEIIIIDLQDCFFNIKLHPEDCKRFAFSVPSPNFKRPYQRFQWKVLPQGMKNSPTLCQKFVDKAILTVRDKYQDSYIVHYMDDILLAHPSRSIVDEILTSMIQALNKHGLVVSTEKIQKYDNLKYLGTHIQGDSVSYQKLQIRTDKLRTLNDFQKLLGNINWIRPFLKLTTGELKPLFEILNGDSNPISTRKLTPEACKALQLMNERLSTARVKRLDLSQPWSLCILKTEYTPTACLWQDGVVEWIHLPHISPKVITPYDIFCTQLIIKGRHRSKELFSKDPDYIVVPYTKVQFDLLLQEKEDWPISLLGFLGEVHFHLPKDPLLTFTLQTAIIFPHMTSTTPLEKGIVIFTDGSANGRSVTYIQGREPIIKENTQNTAQQAEIVAVITAFEEVSQPFNLYTDSKYVTGLFPEIETATLSPRTKIYTELKHLQRLIHKRQEKFYIGHIRGHTGLPGPLAQGNAYADSLTRILTAAGKRTADGSEFEKRTADGSEFESPKKKAKVE

SEQ ID NO: 3164 - protein, 2116 aa, synthetic construct
MPAAKRVKLDGGDKKYSIGLDIGTNSVGWAVITDEYKVPSKKFKVLGNTDRHSIKKNLIGALLFDSGETAEATRLKRTARRRYTRRKNRICYLQEIFSNEMAKVDDSFFHRLEESFLVEEDKKHERHPIFGNIVDEVAYHEKYPTIYHLRKKLVDSTDKADLRLIYLALAHMIKFRGHFLIEGDLNPDNSDVDKLFIQLVQTYNQLFEENPINASGVDAKAILSARLSKSRRLENLIAQLPGEKKNGLFGNLIALSLGLTPNFKSNFDLAEDAKLQLSKDTYDDDLDNLLAQIGDQYADLFLAAKNLSDAILLSDILRVNTEITKAPLSASMIKRYDEHHQDLTLLKALVRQQLPEKYKEIFFDQSKNGYAGYIDGGASQEEFYKFIKPILEKMDGTEELLVKLNREDLLRKQRTFDNGSIPHQIHLGELHAILRRQEDFYPFLKDNREKIEKILTFRIPYYVGPLARGNSRFAWMTRKSEETITPWNFEEVVDKGASAQSFIERMTNFDKNLPNEKVLPKHSLLYEYFTVYNELTKVKYVTEGMRKPAFLSGEQKKAIVDLLFKTNRKVTVKQLKEDYFKKIECFDSVEISGVEDRFNASLGTYHDLLKIIKDKDFLDNEENEDILEDIVLTLTLFEDREMIEERLKTYAHLFDDKVMKQLKRRRYTGWGRLSRKLINGIRDKQSGKTILDFLKSDGFANRNFMQLIHDDSLTFKEDIQKAQVSGQGDSLHEHIANLAGSPAIKKGILQTVKVVDELVKVMGRHKPENIVIEMARENQTTQKGQKNSRERMKRIEEGIKELGSQILKEHPVENTQLQNEKLYLYYLQNGRDMYVDQELDINRLSDYDVDHIVPQSFLKDDSIDNKVLTRSDKARGKSDNVPSEEVVKKMKNYWRQLLNAKLITQRKFDNLTKAERGGLSELDKAGFIKRQLVETRQITKHVAQILDSRMNTKYDENDKLIREVKVITLKSKLVSDFRKDFQFYKVREINNYHHAHDAYLNAVVGTALIKKYPKLESEFVYGDYKVYDVRKMIAKSEQEIGKATAKYFFYSNIMNFFKTEITLANGEIRKRPLIETNGETGEIVWDKGRDFATVRKVLSMPQVNIVKKTEVQTGGFSKESILPKRNSDKLIARKKDWDPKKYGGFDSPTVAYSVLVVAKVEKGKSKKLKSVKELLGITIMERSSFEKNPIDFLEAKGYKEVKKDLIIKLPKYSLFELENGRKRMLASAGELQKGNELALPSKYVNFLYLASHYEKLKGSPEDNEQKQLFVEQHKHYLDEIIEQISEFSKRVILADANLDKVLSAYNKHRDKPIREQAENIIHLFTLTNLGAPAAFKYFDTTIDRKRYTSTKEVLDATLIHQSITGLYETRIDLSQLGGDGGGGSPAPEAAAKGGVQEISDSRPMLHIYLNGRRFLGLLDTGADKTCIAGRDWPANWPIHQTESSLQGLGMACGVARSSQPLRWQHEDKSGIIHPFVIPTLPFTLWGRDIMKDIKVRLMTDSPDDSQDLMIGAIESNLFADQISWKSDQPVWLNQWPLKQEKLQALQQLVTEQLQLGHLEESNSPWNTPVFVIKKKSGKWRLLQDLRAVNATMHDMGALQPGLPSPVAVPKGWEIIIIDLQDCFFNIKLHPEDCKRFAFSVPSPNFKRPYQRFQWKVLPQGMKNSPTLCQKFVDKAILTVRDKYQDSYIVHYMDDILLAHPSRSIVDEILTSMIQALNKHGLVVSTEKIQKYDNLKYLGTHIQGDSVSYQKLQIRTDKLRTLNDFQKLLGNINWIRPFLKLTTGELKPLFEILNGDSNPISTRKLTPEACKALQLMNERLSTARVKRLDLSQPWSLCILKTEYTPTACLWQDGVVEWIHLPHISPKVITPYDIFCTQLIIKGRHRSKELFSKDPDYIVVPYTKVQFDLLLQEKEDWPISLLGFLGEVHFHLPKDPLLTFTLQTAIIFPHMTSTTPLEKGIVIFTDGSANGRSVTYIQGREPIIKENTQNTAQQAEIVAVITAFEEVSQPFNLYTDSKYVTGLFPEIETATLSPRTKIYTELKHLQRLIHKRQEKFYIGHIRGHTGLPGPLAQGNAYADSLTRILTAAGKRTADGSEFEKRTADGSEFESPKKKAKVE

SEQ ID NO: 3165 - protein, 2117 aa, synthetic construct
MPAAKRVKLDGGDKKYSIGLDIGTNSVGWAVITDEYKVPSKKFKVLGNTDRHSIKKNLIGALLFDSGETAEATRLKRTARRRYTRRKNRICYLQEIFSNEMAKVDDSFFHRLEESFLVEEDKKHERHPIFGNIVDEVAYHEKYPTIYHLRKKLVDSTDKADLRLIYLALAHMIKFRGHFLIEGDLNPDNSDVDKLFIQLVQTYNQLFEENPINASGVDAKAILSARLSKSRRLENLIAQLPGEKKNGLFGNLIALSLGLTPNFKSNFDLAEDAKLQLSKDTYDDDLDNLLAQIGDQYADLFLAAKNLSDAILLSDILRVNTEITKAPLSASMIKRYDEHHQDLTLLKALVRQQLPEKYKEIFFDQSKNGYAGYIDGGASQEEFYKFIKPILEKMDGTEELLVKLNREDLLRKQRTFDNGSIPHQIHLGELHAILRRQEDFYPFLKDNREKIEKILTFRIPYYVGPLARGNSRFAWMTRKSEETITPWNFEEVVDKGASAQSFIERMTNFDKNLPNEKVLPKHSLLYEYFTVYNELTKVKYVTEGMRKPAFLSGEQKKAIVDLLFKTNRKVTVKQLKEDYFKKIECFDSVEISGVEDRFNASLGTYHDLLKIIKDKDFLDNEENEDILEDIVLTLTLFEDREMIEERLKTYAHLFDDKVMKQLKRRRYTGWGRLSRKLINGIRDKQSGKTILDFLKSDGFANRNFMQLIHDDSLTFKEDIQKAQVSGQGDSLHEHIANLAGSPAIKKGILQTVKVVDELVKVMGRHKPENIVIEMARENQTTQKGQKNSRERMKRIEEGIKELGSQILKEHPVENTQLQNEKLYLYYLQNGRDMYVDQELDINRLSDYDVDHIVPQSFLKDDSIDNKVLTRSDKARGKSDNVPSEEVVKKMKNYWRQLLNAKLITQRKFDNLTKAERGGLSELDKAGFIKRQLVETRQITKHVAQILDSRMNTKYDENDKLIREVKVITLKSKLVSDFRKDFQFYKVREINNYHHAHDAYLNAVVGTALIKKYPKLESEFVYGDYKVYDVRKMIAKSEQEIGKATAKYFFYSNIMNFFKTEITLANGEIRKRPLIETNGETGEIVWDKGRDFATVRKVLSMPQVNIVKKTEVQTGGFSKESILPKRNSDKLIARKKDWDPKKYGGFDSPTVAYSVLVVAKVEKGKSKKLKSVKELLGITIMERSSFEKNPIDFLEAKGYKEVKKDLIIKLPKYSLFELENGRKRMLASAGELQKGNELALPSKYVNFLYLASHYEKLKGSPEDNEQKQLFVEQHKHYLDEIIEQISEFSKRVILADANLDKVLSAYNKHRDKPIREQAENIIHLFTLTNLGAPAAFKYFDTTIDRKRYTSTKEVLDATLIHQSITGLYETRIDLSQLGGDGGGSAGSAAGSGEFGGVQEISDSRPMLHIYLNGRRFLGLLDTGADKTCIAGRDWPANWPIHQTESSLQGLGMACGVARSSQPLRWQHEDKSGIIHPFVIPTLPFTLWGRDIMKDIKVRLMTDSPDDSQDLMIGAIESNLFADQISWKSDQPVWLNQWPLKQEKLQALQQLVTEQLQLGHLEESNSPWNTPVFVIKKKSGKWRLLQDLRAVNATMHDMGALQPGLPSPVAVPKGWEIIIIDLQDCFFNIKLHPEDCKRFAFSVPSPNFKRPYQRFQWKVLPQGMKNSPTLCQKFVDKAILTVRDKYQDSYIVHYMDDILLAHPSRSIVDEILTSMIQALNKHGLVVSTEKIQKYDNLKYLGTHIQGDSVSYQKLQIRTDKLRTLNDFQKLLGNINWIRPFLKLTTGELKPLFEILNGDSNPISTRKLTPEACKALQLMNERLSTARVKRLDLSQPWSLCILKTEYTPTACLWQDGVVEWIHLPHISPKVITPYDIFCTQLIIKGRHRSKELFSKDPDYIVVPYTKVQFDLLLQEKEDWPISLLGFLGEVHFHLPKDPLLTFTLQTAIIFPHMTSTTPLEKGIVIFTDGSANGRSVTYIQGREPIIKENTQNTAQQAEIVAVITAFEEVSQPFNLYTDSKYVTGLFPEIETATLSPRTKIYTELKHLQRLIHKRQEKFYIGHIRGHTGLPGPLAQGNAYADSLTRILTAAGKRTADGSEFEKRTADGSEFESPKKKAKVE

SEQ ID NO: 3166 - protein, 2111 aa, synthetic construct
MPAAKRVKLDGGDKKYSIGLDIGTNSVGWAVITDEYKVPSKKFKVLGNTDRHSIKKNLIGALLFDSGETAEATRLKRTARRRYTRRKNRICYLQEIFSNEMAKVDDSFFHRLEESFLVEEDKKHERHPIFGNIVDEVAYHEKYPTIYHLRKKLVDSTDKADLRLIYLALAHMIKFRGHFLIEGDLNPDNSDVDKLFIQLVQTYNQLFEENPINASGVDAKAILSARLSKSRRLENLIAQLPGEKKNGLFGNLIALSLGLTPNFKSNFDLAEDAKLQLSKDTYDDDLDNLLAQIGDQYADLFLAAKNLSDAILLSDILRVNTEITKAPLSASMIKRYDEHHQDLTLLKALVRQQLPEKYKEIFFDQSKNGYAGYIDGGASQEEFYKFIKPILEKMDGTEELLVKLNREDLLRKQRTFDNGSIPHQIHLGELHAILRRQEDFYPFLKDNREKIEKILTFRIPYYVGPLARGNSRFAWMTRKSEETITPWNFEEVVDKGASAQSFIERMTNFDKNLPNEKVLPKHSLLYEYFTVYNELTKVKYVTEGMRKPAFLSGEQKKAIVDLLFKTNRKVTVKQLKEDYFKKIECFDSVEISGVEDRFNASLGTYHDLLKIIKDKDFLDNEENEDILEDIVLTLTLFEDREMIEERLKTYAHLFDDKVMKQLKRRRYTGWGRLSRKLINGIRDKQSGKTILDFLKSDGFANRNFMQLIHDDSLTFKEDIQKAQVSGQGDSLHEHIANLAGSPAIKKGILQTVKVVDELVKVMGRHKPENIVIEMARENQTTQKGQKNSRERMKRIEEGIKELGSQILKEHPVENTQLQNEKLYLYYLQNGRDMYVDQELDINRLSDYDVDHIVPQSFLKDDSIDNKVLTRSDKARGKSDNVPSEEVVKKMKNYWRQLLNAKLITQRKFDNLTKAERGGLSELDKAGFIKRQLVETRQITKHVAQILDSRMNTKYDENDKLIREVKVITLKSKLVSDFRKDFQFYKVREINNYHHAHDAYLNAVVGTALIKKYPKLESEFVYGDYKVYDVRKMIAKSEQEIGKATAKYFFYSNIMNFFKTEITLANGEIRKRPLIETNGETGEIVWDKGRDFATVRKVLSMPQVNIVKKTEVQTGGFSKESILPKRNSDKLIARKKDWDPKKYGGFDSPTVAYSVLVVAKVEKGKSKKLKSVKELLGITIMERSSFEKNPIDFLEAKGYKEVKKDLIIKLPKYSLFELENGRKRMLASAGELQKGNELALPSKYVNFLYLASHYEKLKGSPEDNEQKQLFVEQHKHYLDEIIEQISEFSKRVILADANLDKVLSAYNKHRDKPIREQAENIIHLFTLTNLGAPAAFKYFDTTIDRKRYTSTKEVLDATLIHQSITGLYETRIDLSQLGGDGGGGGGGSGGVQEISDSRPMLHIYLNGRRFLGLLDTGADKTCIAGRDWPANWPIHQTESSLQGLGMACGVARSSQPLRWQHEDKSGIIHPFVIPTLPFTLWGRDIMKDIKVRLMTDSPDDSQDLMIGAIESNLFADQISWKSDQPVWLNQWPLKQEKLQALQQLVTEQLQLGHLEESNSPWNTPVFVIKKKSGKWRLLQDLRAVNATMHDMGALQPGLPSPVAVPKGWEIIIIDLQDCFFNIKLHPEDCKRFAFSVPSPNFKRPYQRFQWKVLPQGMKNSPTLCQKFVDKAILTVRDKYQDSYIVHYMDDILLAHPSRSIVDEILTSMIQALNKHGLVVSTEKIQKYDNLKYLGTHIQGDSVSYQKLQIRTDKLRTLNDFQKLLGNINWIRPFLKLTTGELKPLFEILNGDSNPISTRKLTPEACKALQLMNERLSTARVKRLDLSQPWSLCILKTEYTPTACLWQDGVVEWIHLPHISPKVITPYDIFCTQLIIKGRHRSKELFSKDPDYIVVPYTKVQFDLLLQEKEDWPISLLGFLGEVHFHLPKDPLLTFTLQTAIIFPHMTSTTPLEKGIVIFTDGSANGRSVTYIQGREPIIKENTQNTAQQAEIVAVITAFEEVSQPFNLYTDSKYVTGLFPEIETATLSPRTKIYTELKHLQRLIHKRQEKFYIGHIRGHTGLPGPLAQGNAYADSLTRILTAAGKRTADGSEFEKRTADGSEFESPKKKAKVE

SEQ ID NO: 3167 - protein, 2113 aa, synthetic construct
MPAAKRVKLDGGDKKYSIGLDIGTNSVGWAVITDEYKVPSKKFKVLGNTDRHSIKKNLIGALLFDSGETAEATRLKRTARRRYTRRKNRICYLQEIFSNEMAKVDDSFFHRLEESFLVEEDKKHERHPIFGNIVDEVAYHEKYPTIYHLRKKLVDSTDKADLRLIYLALAHMIKFRGHFLIEGDLNPDNSDVDKLFIQLVQTYNQLFEENPINASGVDAKAILSARLSKSRRLENLIAQLPGEKKNGLFGNLIALSLGLTPNFKSNFDLAEDAKLQLSKDTYDDDLDNLLAQIGDQYADLFLAAKNLSDAILLSDILRVNTEITKAPLSASMIKRYDEHHQDLTLLKALVRQQLPEKYKEIFFDQSKNGYAGYIDGGASQEEFYKFIKPILEKMDGTEELLVKLNREDLLRKQRTFDNGSIPHQIHLGELHAILRRQEDFYPFLKDNREKIEKILTFRIPYYVGPLARGNSRFAWMTRKSEETITPWNFEEVVDKGASAQSFIERMTNFDKNLPNEKVLPKHSLLYEYFTVYNELTKVKYVTEGMRKPAFLSGEQKKAIVDLLFKTNRKVTVKQLKEDYFKKIECFDSVEISGVEDRFNASLGTYHDLLKIIKDKDFLDNEENEDILEDIVLTLTLFEDREMIEERLKTYAHLFDDKVMKQLKRRRYTGWGRLSRKLINGIRDKQSGKTILDFLKSDGFANRNFMQLIHDDSLTFKEDIQKAQVSGQGDSLHEHIANLAGSPAIKKGILQTVKVVDELVKVMGRHKPENIVIEMARENQTTQKGQKNSRERMKRIEEGIKELGSQILKEHPVENTQLQNEKLYLYYLQNGRDMYVDQELDINRLSDYDVDHIVPQSFLKDDSIDNKVLTRSDKARGKSDNVPSEEVVKKMKNYWRQLLNAKLITQRKFDNLTKAERGGLSELDKAGFIKRQLVETRQITKHVAQILDSRMNTKYDENDKLIREVKVITLKSKLVSDFRKDFQFYKVREINNYHHAHDAYLNAVVGTALIKKYPKLESEFVYGDYKVYDVRKMIAKSEQEIGKATAKYFFYSNIMNFFKTEITLANGEIRKRPLIETNGETGEIVWDKGRDFATVRKVLSMPQVNIVKKTEVQTGGFSKESILPKRNSDKLIARKKDWDPKKYGGFDSPTVAYSVLVVAKVEKGKSKKLKSVKELLGITIMERSSFEKNPIDFLEAKGYKEVKKDLIIKLPKYSLFELENGRKRMLASAGELQKGNELALPSKYVNFLYLASHYEKLKGSPEDNEQKQLFVEQHKHYLDEIIEQISEFSKRVILADANLDKVLSAYNKHRDKPIREQAENIIHLFTLTNLGAPAAFKYFDTTIDRKRYTSTKEVLDATLIHQSITGLYETRIDLSQLGGDGGGGGEAAAKGGVQEISDSRPMLHIYLNGRRFLGLLDTGADKTCIAGRDWPANWPIHQTESSLQGLGMACGVARSSQPLRWQHEDKSGIIHPFVIPTLPFTLWGRDIMKDIKVRLMTDSPDDSQDLMIGAIESNLFADQISWKSDQPVWLNQWPLKQEKLQALQQLVTEQLQLGHLEESNSPWNTPVFVIKKKSGKWRLLQDLRAVNATMHDMGALQPGLPSPVAVPKGWEIIIIDLQDCFFNIKLHPEDCKRFAFSVPSPNFKRPYQRFQWKVLPQGMKNSPTLCQKFVDKAILTVRDKYQDSYIVHYMDDILLAHPSRSIVDEILTSMIQALNKHGLVVSTEKIQKYDNLKYLGTHIQGDSVSYQKLQIRTDKLRTLNDFQKLLGNINWIRPFLKLTTGELKPLFEILNGDSNPISTRKLTPEACKALQLMNERLSTARVKRLDLSQPWSLCILKTEYTPTACLWQDGVVEWIHLPHISPKVITPYDIFCTQLIIKGRHRSKELFSKDPDYIVVPYTKVQFDLLLQEKEDWPISLLGFLGEVHFHLPKDPLLTFTLQTAIIFPHMTSTTPLEKGIVIFTDGSANGRSVTYIQGREPIIKENTQNTAQQAEIVAVITAFEEVSQPFNLYTDSKYVTGLFPEIETATLSPRTKIYTELKHLQRLIHKRQEKFYIGHIRGHTGLPGPLAQGNAYADSLTRILTAAGKRTADGSEFEKRTADGSEFESPKKKAKVE

SEQ ID NO: 3168 - protein, 2111 aa, synthetic construct
MPAAKRVKLDGGDKKYSIGLDIGTNSVGWAVITDEYKVPSKKFKVLGNTDRHSIKKNLIGALLFDSGETAEATRLKRTARRRYTRRKNRICYLQEIFSNEMAKVDDSFFHRLEESFLVEEDKKHERHPIFGNIVDEVAYHEKYPTIYHLRKKLVDSTDKADLRLIYLALAHMIKFRGHFLIEGDLNPDNSDVDKLFIQLVQTYNQLFEENPINASGVDAKAILSARLSKSRRLENLIAQLPGEKKNGLFGNLIALSLGLTPNFKSNFDLAEDAKLQLSKDTYDDDLDNLLAQIGDQYADLFLAAKNLSDAILLSDILRVNTEITKAPLSASMIKRYDEHHQDLTLLKALVRQQLPEKYKEIFFDQSKNGYAGYIDGGASQEEFYKFIKPILEKMDGTEELLVKLNREDLLRKQRTFDNGSIPHQIHLGELHAILRRQEDFYPFLKDNREKIEKILTFRIPYYVGPLARGNSRFAWMTRKSEETITPWNFEEVVDKGASAQSFIERMTNFDKNLPNEKVLPKHSLLYEYFTVYNELTKVKYVTEGMRKPAFLSGEQKKAIVDLLFKTNRKVTVKQLKEDYFKKIECFDSVEISGVEDRFNASLGTYHDLLKIIKDKDFLDNEENEDILEDIVLTLTLFEDREMIEERLKTYAHLFDDKVMKQLKRRRYTGWGRLSRKLINGIRDKQSGKTILDFLKSDGFANRNFMQLIHDDSLTFKEDIQKAQVSGQGDSLHEHIANLAGSPAIKKGILQTVKVVDELVKVMGRHKPENIVIEMARENQTTQKGQKNSRERMKRIEEGIKELGSQILKEHPVENTQLQNEKLYLYYLQNGRDMYVDQELDINRLSDYDVDHIVPQSFLKDDSIDNKVLTRSDKARGKSDNVPSEEVVKKMKNYWRQLLNAKLITQRKFDNLTKAERGGLSELDKAGFIKRQLVETRQITKHVAQILDSRMNTKYDENDKLIREVKVITLKSKLVSDFRKDFQFYKVREINNYHHAHDAYLNAVVGTALIKKYPKLESEFVYGDYKVYDVRKMIAKSEQEIGKATAKYFFYSNIMNFFKTEITLANGEIRKRPLIETNGETGEIVWDKGRDFATVRKVLSMPQVNIVKKTEVQTGGFSKESILPKRNSDKLIARKKDWDPKKYGGFDSPTVAYSVLVVAKVEKGKSKKLKSVKELLGITIMERSSFEKNPIDFLEAKGYKEVKKDLIIKLPKYSLFELENGRKRMLASAGELQKGNELALPSKYVNFLYLASHYEKLKGSPEDNEQKQLFVEQHKHYLDEIIEQISEFSKRVILADANLDKVLSAYNKHRDKPIREQAENIIHLFTLTNLGAPAAFKYFDTTIDRKRYTSTKEVLDATLIHQSITGLYETRIDLSQLGGDGGGGSGGSGGVQEISDSRPMLHIYLNGRRFLGLLDTGADKTCIAGRDWPANWPIHQTESSLQGLGMACGVARSSQPLRWQHEDKSGIIHPFVIPTLPFTLWGRDIMKDIKVRLMTDSPDDSQDLMIGAIESNLFADQISWKSDQPVWLNQWPLKQEKLQALQQLVTEQLQLGHLEESNSPWNTPVFVIKKKSGKWRLLQDLRAVNATMHDMGALQPGLPSPVAVPKGWEIIIIDLQDCFFNIKLHPEDCKRFAFSVPSPNFKRPYQRFQWKVLPQGMKNSPTLCQKFVDKAILTVRDKYQDSYIVHYMDDILLAHPSRSIVDEILTSMIQALNKHGLVVSTEKIQKYDNLKYLGTHIQGDSVSYQKLQIRTDKLRTLNDFQKLLGNINWIRPFLKLTTGELKPLFEILNGDSNPISTRKLTPEACKALQLMNERLSTARVKRLDLSQPWSLCILKTEYTPTACLWQDGVVEWIHLPHISPKVITPYDIFCTQLIIKGRHRSKELFSKDPDYIVVPYTKVQFDLLLQEKEDWPISLLGFLGEVHFHLPKDPLLTFTLQTAIIFPHMTSTTPLEKGIVIFTDGSANGRSVTYIQGREPIIKENTQNTAQQAEIVAVITAFEEVSQPFNLYTDSKYVTGLFPEIETATLSPRTKIYTELKHLQRLIHKRQEKFYIGHIRGHTGLPGPLAQGNAYADSLTRILTAAGKRTADGSEFEKRTADGSEFESPKKKAKVE

SEQ ID NO: 3169 - protein, 2116 aa, synthetic construct
MPAAKRVKLDGGDKKYSIGLDIGTNSVGWAVITDEYKVPSKKFKVLGNTDRHSIKKNLIGALLFDSGETAEATRLKRTARRRYTRRKNRICYLQEIFSNEMAKVDDSFFHRLEESFLVEEDKKHERHPIFGNIVDEVAYHEKYPTIYHLRKKLVDSTDKADLRLIYLALAHMIKFRGHFLIEGDLNPDNSDVDKLFIQLVQTYNQLFEENPINASGVDAKAILSARLSKSRRLENLIAQLPGEKKNGLFGNLIALSLGLTPNFKSNFDLAEDAKLQLSKDTYDDDLDNLLAQIGDQYADLFLAAKNLSDAILLSDILRVNTEITKAPLSASMIKRYDEHHQDLTLLKALVRQQLPEKYKEIFFDQSKNGYAGYIDGGASQEEFYKFIKPILEKMDGTEELLVKLNREDLLRKQRTFDNGSIPHQIHLGELHAILRRQEDFYPFLKDNREKIEKILTFRIPYYVGPLARGNSRFAWMTRKSEETITPWNFEEVVDKGASAQSFIERMTNFDKNLPNEKVLPKHSLLYEYFTVYNELTKVKYVTEGMRKPAFLSGEQKKAIVDLLFKTNRKVTVKQLKEDYFKKIECFDSVEISGVEDRFNASLGTYHDLLKIIKDKDFLDNEENEDILEDIVLTLTLFEDREMIEERLKTYAHLFDDKVMKQLKRRRYTGWGRLSRKLINGIRDKQSGKTILDFLKSDGFANRNFMQLIHDDSLTFKEDIQKAQVSGQGDSLHEHIANLAGSPAIKKGILQTVKVVDELVKVMGRHKPENIVIEMARENQTTQKGQKNSRERMKRIEEGIKELGSQILKEHPVENTQLQNEKLYLYYLQNGRDMYVDQELDINRLSDYDVDHIVPQSFLKDDSIDNKVLTRSDKARGKSDNVPSEEVVKKMKNYWRQLLNAKLITQRKFDNLTKAERGGLSELDKAGFIKRQLVETRQITKHVAQILDSRMNTKYDENDKLIREVKVITLKSKLVSDFRKDFQFYKVREINNYHHAHDAYLNAVVGTALIKKYPKLESEFVYGDYKVYDVRKMIAKSEQEIGKATAKYFFYSNIMNFFKTEITLANGEIRKRPLIETNGETGEIVWDKGRDFATVRKVLSMPQVNIVKKTEVQTGGFSKESILPKRNSDKLIARKKDWDPKKYGGFDSPTVAYSVLVVAKVEKGKSKKLKSVKELLGITIMERSSFEKNPIDFLEAKGYKEVKKDLIIKLPKYSLFELENGRKRMLASAGELQKGNELALPSKYVNFLYLASHYEKLKGSPEDNEQKQLFVEQHKHYLDEIIEQISEFSKRVILADANLDKVLSAYNKHRDKPIREQAENIIHLFTLTNLGAPAAFKYFDTTIDRKRYTSTKEVLDATLIHQSITGLYETRIDLSQLGGDGGPAPAPAPAPAPGGVQEISDSRPMLHIYLNGRRFLGLLDTGADKTCIAGRDWPANWPIHQTESSLQGLGMACGVARSSQPLRWQHEDKSGIIHPFVIPTLPFTLWGRDIMKDIKVRLMTDSPDDSQDLMIGAIESNLFADQISWKSDQPVWLNQWPLKQEKLQALQQLVTEQLQLGHLEESNSPWNTPVFVIKKKSGKWRLLQDLRAVNATMHDMGALQPGLPSPVAVPKGWEIIIIDLQDCFFNIKLHPEDCKRFAFSVPSPNFKRPYQRFQWKVLPQGMKNSPTLCQKFVDKAILTVRDKYQDSYIVHYMDDILLAHPSRSIVDEILTSMIQALNKHGLVVSTEKIQKYDNLKYLGTHIQGDSVSYQKLQIRTDKLRTLNDFQKLLGNINWIRPFLKLTTGELKPLFEILNGDSNPISTRKLTPEACKALQLMNERLSTARVKRLDLSQPWSLCILKTEYTPTACLWQDGVVEWIHLPHISPKVITPYDIFCTQLIIKGRHRSKELFSKDPDYIVVPYTKVQFDLLLQEKEDWPISLLGFLGEVHFHLPKDPLLTFTLQTAIIFPHMTSTTPLEKGIVIFTDGSANGRSVTYIQGREPIIKENTQNTAQQAEIVAVITAFEEVSQPFNLYTDSKYVTGLFPEIETATLSPRTKIYTELKHLQRLIHKRQEKFYIGHIRGHTGLPGPLAQGNAYADSLTRILTAAGKRTADGSEFEKRTADGSEFESPKKKAKVE

SEQ ID NO: 3170 - protein, 2116 aa, synthetic construct
MPAAKRVKLDGGDKKYSIGLDIGTNSVGWAVITDEYKVPSKKFKVLGNTDRHSIKKNLIGALLFDSGETAEATRLKRTARRRYTRRKNRICYLQEIFSNEMAKVDDSFFHRLEESFLVEEDKKHERHPIFGNIVDEVAYHEKYPTIYHLRKKLVDSTDKADLRLIYLALAHMIKFRGHFLIEGDLNPDNSDVDKLFIQLVQTYNQLFEENPINASGVDAKAILSARLSKSRRLENLIAQLPGEKKNGLFGNLIALSLGLTPNFKSNFDLAEDAKLQLSKDTYDDDLDNLLAQIGDQYADLFLAAKNLSDAILLSDILRVNTEITKAPLSASMIKRYDEHHQDLTLLKALVRQQLPEKYKEIFFDQSKNGYAGYIDGGASQEEFYKFIKPILEKMDGTEELLVKLNREDLLRKQRTFDNGSIPHQIHLGELHAILRRQEDFYPFLKDNREKIEKILTFRIPYYVGPLARGNSRFAWMTRKSEETITPWNFEEVVDKGASAQSFIERMTNFDKNLPNEKVLPKHSLLYEYFTVYNELTKVKYVTEGMRKPAFLSGEQKKAIVDLLFKTNRKVTVKQLKEDYFKKIECFDSVEISGVEDRFNASLGTYHDLLKIIKDKDFLDNEENEDILEDIVLTLTLFEDREMIEERLKTYAHLFDDKVMKQLKRRRYTGWGRLSRKLINGIRDKQSGKTILDFLKSDGFANRNFMQLIHDDSLTFKEDIQKAQVSGQGDSLHEHIANLAGSPAIKKGILQTVKVVDELVKVMGRHKPENIVIEMARENQTTQKGQKNSRERMKRIEEGIKELGSQILKEHPVENTQLQNEKLYLYYLQNGRDMYVDQELDINRLSDYDVDHIVPQSFLKDDSIDNKVLTRSDKARGKSDNVPSEEVVKKMKNYWRQLLNAKLITQRKFDNLTKAERGGLSELDKAGFIKRQLVETRQITKHVAQILDSRMNTKYDENDKLIREVKVITLKSKLVSDFRKDFQFYKVREINNYHHAHDAYLNAVVGTALIKKYPKLESEFVYGDYKVYDVRKMIAKSEQEIGKATAKYFFYSNIMNFFKTEITLANGEIRKRPLIETNGETGEIVWDKGRDFATVRKVLSMPQVNIVKKTEVQTGGFSKESILPKRNSDKLIARKKDWDPKKYGGFDSPTVAYSVLVVAKVEKGKSKKLKSVKELLGITIMERSSFEKNPIDFLEAKGYKEVKKDLIIKLPKYSLFELENGRKRMLASAGELQKGNELALPSKYVNFLYLASHYEKLKGSPEDNEQKQLFVEQHKHYLDEIIEQISEFSKRVILADANLDKVLSAYNKHRDKPIREQAENIIHLFTLTNLGAPAAFKYFDTTIDRKRYTSTKEVLDATLIHQSITGLYETRIDLSQLGGDGGGGSEAAAKPAPGGVQEISDSRPMLHIYLNGRRFLGLLDTGADKTCIAGRDWPANWPIHQTESSLQGLGMACGVARSSQPLRWQHEDKSGIIHPFVIPTLPFTLWGRDIMKDIKVRLMTDSPDDSQDLMIGAIESNLFADQISWKSDQPVWLNQWPLKQEKLQALQQLVTEQLQLGHLEESNSPWNTPVFVIKKKSGKWRLLQDLRAVNATMHDMGALQPGLPSPVAVPKGWEIIIIDLQDCFFNIKLHPEDCKRFAFSVPSPNFKRPYQRFQWKVLPQGMKNSPTLCQKFVDKAILTVRDKYQDSYIVHYMDDILLAHPSRSIVDEILTSMIQALNKHGLVVSTEKIQKYDNLKYLGTHIQGDSVSYQKLQIRTDKLRTLNDFQKLLGNINWIRPFLKLTTGELKPLFEILNGDSNPISTRKLTPEACKALQLMNERLSTARVKRLDLSQPWSLCILKTEYTPTACLWQDGVVEWIHLPHISPKVITPYDIFCTQLIIKGRHRSKELFSKDPDYIVVPYTKVQFDLLLQEKEDWPISLLGFLGEVHFHLPKDPLLTFTLQTAIIFPHMTSTTPLEKGIVIFTDGSANGRSVTYIQGREPIIKENTQNTAQQAEIVAVITAFEEVSQPFNLYTDSKYVTGLFPEIETATLSPRTKIYTELKHLQRLIHKRQEKFYIGHIRGHTGLPGPLAQGNAYADSLTRILTAAGKRTADGSEFEKRTADGSEFESPKKKAKVE

SEQ ID NO: 3171 - protein, 2116 aa, synthetic construct
MPAAKRVKLDGGDKKYSIGLDIGTNSVGWAVITDEYKVPSKKFKVLGNTDRHSIKKNLIGALLFDSGETAEATRLKRTARRRYTRRKNRICYLQEIFSNEMAKVDDSFFHRLEESFLVEEDKKHERHPIFGNIVDEVAYHEKYPTIYHLRKKLVDSTDKADLRLIYLALAHMIKFRGHFLIEGDLNPDNSDVDKLFIQLVQTYNQLFEENPINASGVDAKAILSARLSKSRRLENLIAQLPGEKKNGLFGNLIALSLGLTPNFKSNFDLAEDAKLQLSKDTYDDDLDNLLAQIGDQYADLFLAAKNLSDAILLSDILRVNTEITKAPLSASMIKRYDEHHQDLTLLKALVRQQLPEKYKEIFFDQSKNGYAGYIDGGASQEEFYKFIKPILEKMDGTEELLVKLNREDLLRKQRTFDNGSIPHQIHLGELHAILRRQEDFYPFLKDNREKIEKILTFRIPYYVGPLARGNSRFAWMTRKSEETITPWNFEEVVDKGASAQSFIERMTNFDKNLPNEKVLPKHSLLYEYFTVYNELTKVKYVTEGMRKPAFLSGEQKKAIVDLLFKTNRKVTVKQLKEDYFKKIECFDSVEISGVEDRFNASLGTYHDLLKIIKDKDFLDNEENEDILEDIVLTLTLFEDREMIEERLKTYAHLFDDKVMKQLKRRRYTGWGRLSRKLINGIRDKQSGKTILDFLKSDGFANRNFMQLIHDDSLTFKEDIQKAQVSGQGDSLHEHIANLAGSPAIKKGILQTVKVVDELVKVMGRHKPENIVIEMARENQTTQKGQKNSRERMKRIEEGIKELGSQILKEHPVENTQLQNEKLYLYYLQNGRDMYVDQELDINRLSDYDVDHIVPQSFLKDDSIDNKVLTRSDKARGKSDNVPSEEVVKKMKNYWRQLLNAKLITQRKFDNLTKAERGGLSELDKAGFIKRQLVETRQITKHVAQILDSRMNTKYDENDKLIREVKVITLKSKLVSDFRKDFQFYKVREINNYHHAHDAYLNAVVGTALIKKYPKLESEFVYGDYKVYDVRKMIAKSEQEIGKATAKYFFYSNIMNFFKTEITLANGEIRKRPLIETNGETGEIVWDKGRDFATVRKVLSMPQVNIVKKTEVQTGGFSKESILPKRNSDKLIARKKDWDPKKYGGFDSPTVAYSVLVVAKVEKGKSKKLKSVKELLGITIMERSSFEKNPIDFLEAKGYKEVKKDLIIKLPKYSLFELENGRKRMLASAGELQKGNELALPSKYVNFLYLASHYEKLKGSPEDNEQKQLFVEQHKHYLDEIIEQISEFSKRVILADANLDKVLSAYNKHRDKPIREQAENIIHLFTLTNLGAPAAFKYFDTTIDRKRYTSTKEVLDATLIHQSITGLYETRIDLSQLGGDGGEAAAKGSSGGSGGWVQEISDSRPMLHIYLNGRRFLGLLNTGADKTCIAGRDWPANWPIHQTESSLQGLGMACGVARSSQPLRWQHEDKSGIIHPFVIPTLPFTLWGRDIMKDIKVRLMTDSPDDSQDLMIGAIESNLFADQISWKSDQPVWLNQWPLKQEKLQALQQLVTEQLQLGHLEESNSPWNTPVFVIKKKSGKWRLLQDLRAVNATMHDMGALQPGLPSPVAVPKGWEIIIIDLQDCFFNIKLHPEDCKRFAFSVPSPNFKRPYQRFQWKVLPQGMKNSPTLCQKFVDKAILTVRDKYQDSYIVHYMDDILLAHPSRSIVDEILTSMIQALNKHGLVVSTEKIQKYDNLKYLGTHIQGDSVSYQKLQIRTDKLRTLNDFQKLLGNINWIRPFLKLTTGELKPLFEILNGDSNPISTRKLTPEACKALQLMNERLSTARVKRLDLSQPWSLCILKTEYTPTACLWQDGVVEWIHLPHISPKVITPYDIFCTQLIIKGRHRSKELFSKDPDYIVVPYTKVQFDLLLQEKEDWPISLLGFLGEVHFHLPKDPLLTFTLQTAIIFPHMTSTTPLEKGIVIFTDGSANGRSVTYIQGREPIIKENTQNTAQQAEIVAVITAFEEVSQPFNLYTDSKYVTGLFPEIETATLSPRTKIYTELKHLQRLIHKRQEKFYIGHIRGHTGLPGPLAQGNAYADSLTRILTAGKRTADGSEFEKRTADGSEFESPKKKAKVE

SEQ ID NO: 3172 - protein, 2135 aa, synthetic construct
MPAAKRVKLDGGDKKYSIGLDIGTNSVGWAVITDEYKVPSKKFKVLGNTDRHSIKKNLIGALLFDSGETAEATRLKRTARRRYTRRKNRICYLQEIFSNEMAKVDDSFFHRLEESFLVEEDKKHERHPIFGNIVDEVAYHEKYPTIYHLRKKLVDSTDKADLRLIYLALAHMIKFRGHFLIEGDLNPDNSDVDKLFIQLVQTYNQLFEENPINASGVDAKAILSARLSKSRRLENLIAQLPGEKKNGLFGNLIALSLGLTPNFKSNFDLAEDAKLQLSKDTYDDDLDNLLAQIGDQYADLFLAAKNLSDAILLSDILRVNTEITKAPLSASMIKRYDEHHQDLTLLKALVRQQLPEKYKEIFFDQSKNGYAGYIDGGASQEEFYKFIKPILEKMDGTEELLVKLNREDLLRKQRTFDNGSIPHQIHLGELHAILRRQEDFYPFLKDNREKIEKILTFRIPYYVGPLARGNSRFAWMTRKSEETITPWNFEEVVDKGASAQSFIERMTNFDKNLPNEKVLPKHSLLYEYFTVYNELTKVKYVTEGMRKPAFLSGEQKKAIVDLLFKTNRKVTVKQLKEDYFKKIECFDSVEISGVEDRFNASLGTYHDLLKIIKDKDFLDNEENEDILEDIVLTLTLFEDREMIEERLKTYAHLFDDKVMKQLKRRRYTGWGRLSRKLINGIRDKQSGKTILDFLKSDGFANRNFMQLIHDDSLTFKEDIQKAQVSGQGDSLHEHIANLAGSPAIKKGILQTVKVVDELVKVMGRHKPENIVIEMARENQTTQKGQKNSRERMKRIEEGIKELGSQILKEHPVENTQLQNEKLYLYYLQNGRDMYVDQELDINRLSDYDVDHIVPQSFLKDDSIDNKVLTRSDKARGKSDNVPSEEVVKKMKNYWRQLLNAKLITQRKFDNLTKAERGGLSELDKAGFIKRQLVETRQITKHVAQILDSRMNTKYDENDKLIREVKVITLKSKLVSDFRKDFQFYKVREINNYHHAHDAYLNAVVGTALIKKYPKLESEFVYGDYKVYDVRKMIAKSEQEIGKATAKYFFYSNIMNFFKTEITLANGEIRKRPLIETNGETGEIVWDKGRDFATVRKVLSMPQVNIVKKTEVQTGGFSKESILPKRNSDKLIARKKDWDPKKYGGFDSPTVAYSVLVVAKVEKGKSKKLKSVKELLGITIMERSSFEKNPIDFLEAKGYKEVKKDLIIKLPKYSLFELENGRKRMLASAGELQKGNELALPSKYVNFLYLASHYEKLKGSPEDNEQKQLFVEQHKHYLDEIIEQISEFSKRVILADANLDKVLSAYNKHRDKPIREQAENIIHLFTLTNLGAPAAFKYFDTTIDRKRYTSTKEVLDATLIHQSITGLYETRIDLSQLGGDGGEAAAKEAAAKEAAAKEAAAKEAAAKEAAAKGGWVQEISDSRPMLHIYLNGRRFLGLLNTGADKTCIAGRDWPANWPIHQTESSLQGLGMACGVARSSQPLRWQHEDKSGIIHPFVIPTLPFTLWGRDIMKDIKVRLMTDSPDDSQDLMIGAIESNLFADQISWKSDQPVWLNQWPLKQEKLQALQQLVTEQLQLGHLEESNSPWNTPVFVIKKKSGKWRLLQDLRAVNATMHDMGALQPGLPSPVAVPKGWEIIIIDLQDCFFNIKLHPEDCKRFAFSVPSPNFKRPYQRFQWKVLPQGMKNSPTLCQKFVDKAILTVRDKYQDSYIVHYMDDILLAHPSRSIVDEILTSMIQALNKHGLVVSTEKIQKYDNLKYLGTHIQGDSVSYQKLQIRTDKLRTLNDFQKLLGNINWIRPFLKLTTGELKPLFEILNGDSNPISTRKLTPEACKALQLMNERLSTARVKRLDLSQPWSLCILKTEYTPTACLWQDGVVEWIHLPHISPKVITPYDIFCTQLIIKGRHRSKELFSKDPDYIVVPYTKVQFDLLLQEKEDWPISLLGFLGEVHFHLPKDPLLTFTLQTAIIFPHMTSTTPLEKGIVIFTDGSANGRSVTYIQGREPIIKENTQNTAQQAEIVAVITAFEEVSQPFNLYTDSKYVTGLFPEIETATLSPRTKIYTELKHLQRLIHKRQEKFYIGHIRGHTGLPGPLAQGNAYADSLTRILTAGKRTADGSEFEKRTADGSEFESPKKKAKVE

SEQ ID NO: 3173 - protein, 2135 aa, synthetic construct
MPAAKRVKLDGGDKKYSIGLDIGTNSVGWAVITDEYKVPSKKFKVLGNTDRHSIKKNLIGALLFDSGETAEATRLKRTARRRYTRRKNRICYLQEIFSNEMAKVDDSFFHRLEESFLVEEDKKHERHPIFGNIVDEVAYHEKYPTIYHLRKKLVDSTDKADLRLIYLALAHMIKFRGHFLIEGDLNPDNSDVDKLFIQLVQTYNQLFEENPINASGVDAKAILSARLSKSRRLENLIAQLPGEKKNGLFGNLIALSLGLTPNFKSNFDLAEDAKLQLSKDTYDDDLDNLLAQIGDQYADLFLAAKNLSDAILLSDILRVNTEITKAPLSASMIKRYDEHHQDLTLLKALVRQQLPEKYKEIFFDQSKNGYAGYIDGGASQEEFYKFIKPILEKMDGTEELLVKLNREDLLRKQRTFDNGSIPHQIHLGELHAILRRQEDFYPFLKDNREKIEKILTFRIPYYVGPLARGNSRFAWMTRKSEETITPWNFEEVVDKGASAQSFIERMTNFDKNLPNEKVLPKHSLLYEYFTVYNELTKVKYVTEGMRKPAFLSGEQKKAIVDLLFKTNRKVTVKQLKEDYFKKIECFDSVEISGVEDRFNASLGTYHDLLKIIKDKDFLDNEENEDILEDIVLTLTLFEDREMIEERLKTYAHLFDDKVMKQLKRRRYTGWGRLSRKLINGIRDKQSGKTILDFLKSDGFANRNFMQLIHDDSLTFKEDIQKAQVSGQGDSLHEHIANLAGSPAIKKGILQTVKVVDELVKVMGRHKPENIVIEMARENQTTQKGQKNSRERMKRIEEGIKELGSQILKEHPVENTQLQNEKLYLYYLQNGRDMYVDQELDINRLSDYDVDHIVPQSFLKDDSIDNKVLTRSDKARGKSDNVPSEEVVKKMKNYWRQLLNAKLITQRKFDNLTKAERGGLSELDKAGFIKRQLVETRQITKHVAQILDSRMNTKYDENDKLIREVKVITLKSKLVSDFRKDFQFYKVREINNYHHAHDAYLNAVVGTALIKKYPKLESEFVYGDYKVYDVRKMIAKSEQEIGKATAKYFFYSNIMNFFKTEITLANGEIRKRPLIETNGETGEIVWDKGRDFATVRKVLSMPQVNIVKKTEVQTGGFSKESILPKRNSDKLIARKKDWDPKKYGGFDSPTVAYSVLVVAKVEKGKSKKLKSVKELLGITIMERSSFEKNPIDFLEAKGYKEVKKDLIIKLPKYSLFELENGRKRMLASAGELQKGNELALPSKYVNFLYLASHYEKLKGSPEDNEQKQLFVEQHKHYLDEIIEQISEFSKRVILADANLDKVLSAYNKHRDKPIREQAENIIHLFTLTNLGAPAAFKYFDTTIDRKRYTSTKEVLDATLIHQSITGLYETRIDLSQLGGDGGGGGGSGGGGSGGGGSGGGGSGGGGSGGGGSGGWVQEISDSRPMLHIYLNGRRFLGLLNTGADKTCIAGRDWPANWPIHQTESSLQGLGMACGVARSSQPLRWQHEDKSGIIHPFVIPTLPFTLWGRDIMKDIKVRLMTDSPDDSQDLMIGAIESNLFADQISWKSDQPVWLNQWPLKQEKLQALQQLVTEQLQLGHLEESNSPWNTPVFVIKKKSGKWRLLQDLRAVNATMHDMGALQPGLPSPVAVPKGWEIIIIDLQDCFFNIKLHPEDCKRFAFSVPSPNFKRPYQRFQWKVLPQGMKNSPTLCQKFVDKAILTVRDKYQDSYIVHYMDDILLAHPSRSIVDEILTSMIQALNKHGLVVSTEKIQKYDNLKYLGTHIQGDSVSYQKLQIRTDKLRTLNDFQKLLGNINWIRPFLKLTTGELKPLFEILNGDSNPISTRKLTPEACKALQLMNERLSTARVKRLDLSQPWSLCILKTEYTPTACLWQDGVVEWIHLPHISPKVITPYDIFCTQLIIKGRHRSKELFSKDPDYIVVPYTKVQFDLLLQEKEDWPISLLGFLGEVHFHLPKDPLLTFTLQTAIIFPHMTSTTPLEKGIVIFTDGSANGRSVTYIQGREPIIKENTQNTAQQAEIVAVITAFEEVSQPFNLYTDSKYVTGLFPEIETATLSPRTKIYTELKHLQRLIHKRQEKFYIGHIRGHTGLPGPLAQGNAYADSLTRILTAGKRTADGSEFEKRTADGSEFESPKKKAKVE

SEQ ID NO: 3174 - protein, 2130 aa, synthetic construct
MPAAKRVKLDGGDKKYSIGLDIGTNSVGWAVITDEYKVPSKKFKVLGNTDRHSIKKNLIGALLFDSGETAEATRLKRTARRRYTRRKNRICYLQEIFSNEMAKVDDSFFHRLEESFLVEEDKKHERHPIFGNIVDEVAYHEKYPTIYHLRKKLVDSTDKADLRLIYLALAHMIKFRGHFLIEGDLNPDNSDVDKLFIQLVQTYNQLFEENPINASGVDAKAILSARLSKSRRLENLIAQLPGEKKNGLFGNLIALSLGLTPNFKSNFDLAEDAKLQLSKDTYDDDLDNLLAQIGDQYADLFLAAKNLSDAILLSDILRVNTEITKAPLSASMIKRYDEHHQDLTLLKALVRQQLPEKYKEIFFDQSKNGYAGYIDGGASQEEFYKFIKPILEKMDGTEELLVKLNREDLLRKQRTFDNGSIPHQIHLGELHAILRRQEDFYPFLKDNREKIEKILTFRIPYYVGPLARGNSRFAWMTRKSEETITPWNFEEVVDKGASAQSFIERMTNFDKNLPNEKVLPKHSLLYEYFTVYNELTKVKYVTEGMRKPAFLSGEQKKAIVDLLFKTNRKVTVKQLKEDYFKKIECFDSVEISGVEDRFNASLGTYHDLLKIIKDKDFLDNEENEDILEDIVLTLTLFEDREMIEERLKTYAHLFDDKVMKQLKRRRYTGWGRLSRKLINGIRDKQSGKTILDFLKSDGFANRNFMQLIHDDSLTFKEDIQKAQVSGQGDSLHEHIANLAGSPAIKKGILQTVKVVDELVKVMGRHKPENIVIEMARENQTTQKGQKNSRERMKRIEEGIKELGSQILKEHPVENTQLQNEKLYLYYLQNGRDMYVDQELDINRLSDYDVDHIVPQSFLKDDSIDNKVLTRSDKARGKSDNVPSEEVVKKMKNYWRQLLNAKLITQRKFDNLTKAERGGLSELDKAGFIKRQLVETRQITKHVAQILDSRMNTKYDENDKLIREVKVITLKSKLVSDFRKDFQFYKVREINNYHHAHDAYLNAVVGTALIKKYPKLESEFVYGDYKVYDVRKMIAKSEQEIGKATAKYFFYSNIMNFFKTEITLANGEIRKRPLIETNGETGEIVWDKGRDFATVRKVLSMPQVNIVKKTEVQTGGFSKESILPKRNSDKLIARKKDWDPKKYGGFDSPTVAYSVLVVAKVEKGKSKKLKSVKELLGITIMERSSFEKNPIDFLEAKGYKEVKKDLIIKLPKYSLFELENGRKRMLASAGELQKGNELALPSKYVNFLYLASHYEKLKGSPEDNEQKQLFVEQHKHYLDEIIEQISEFSKRVILADANLDKVLSAYNKHRDKPIREQAENIIHLFTLTNLGAPAAFKYFDTTIDRKRYTSTKEVLDATLIHQSITGLYETRIDLSQLGGDGGEAAAKEAAAKEAAAKEAAAKEAAAKGGWVQEISDSRPMLHIYLNGRRFLGLLNTGADKTCIAGRDWPANWPIHQTESSLQGLGMACGVARSSQPLRWQHEDKSGIIHPFVIPTLPFTLWGRDIMKDIKVRLMTDSPDDSQDLMIGAIESNLFADQISWKSDQPVWLNQWPLKQEKLQALQQLVTEQLQLGHLEESNSPWNTPVFVIKKKSGKWRLLQDLRAVNATMHDMGALQPGLPSPVAVPKGWEIIIIDLQDCFFNIKLHPEDCKRFAFSVPSPNFKRPYQRFQWKVLPQGMKNSPTLCQKFVDKAILTVRDKYQDSYIVHYMDDILLAHPSRSIVDEILTSMIQALNKHGLVVSTEKIQKYDNLKYLGTHIQGDSVSYQKLQIRTDKLRTLNDFQKLLGNINWIRPFLKLTTGELKPLFEILNGDSNPISTRKLTPEACKALQLMNERLSTARVKRLDLSQPWSLCILKTEYTPTACLWQDGVVEWIHLPHISPKVITPYDIFCTQLIIKGRHRSKELFSKDPDYIVVPYTKVQFDLLLQEKEDWPISLLGFLGEVHFHLPKDPLLTFTLQTAIIFPHMTSTTPLEKGIVIFTDGSANGRSVTYIQGREPIIKENTQNTAQQAEIVAVITAFEEVSQPFNLYTDSKYVTGLFPEIETATLSPRTKIYTELKHLQRLIHKRQEKFYIGHIRGHTGLPGPLAQGNAYADSLTRILTAGKRTADGSEFEKRTADGSEFESPKKKAKVE

SEQ ID NO: 3175 - protein, 2116 aa, synthetic construct
MPAAKRVKLDGGDKKYSIGLDIGTNSVGWAVITDEYKVPSKKFKVLGNTDRHSIKKNLIGALLFDSGETAEATRLKRTARRRYTRRKNRICYLQEIFSNEMAKVDDSFFHRLEESFLVEEDKKHERHPIFGNIVDEVAYHEKYPTIYHLRKKLVDSTDKADLRLIYLALAHMIKFRGHFLIEGDLNPDNSDVDKLFIQLVQTYNQLFEENPINASGVDAKAILSARLSKSRRLENLIAQLPGEKKNGLFGNLIALSLGLTPNFKSNFDLAEDAKLQLSKDTYDDDLDNLLAQIGDQYADLFLAAKNLSDAILLSDILRVNTEITKAPLSASMIKRYDEHHQDLTLLKALVRQQLPEKYKEIFFDQSKNGYAGYIDGGASQEEFYKFIKPILEKMDGTEELLVKLNREDLLRKQRTFDNGSIPHQIHLGELHAILRRQEDFYPFLKDNREKIEKILTFRIPYYVGPLARGNSRFAWMTRKSEETITPWNFEEVVDKGASAQSFIERMTNFDKNLPNEKVLPKHSLLYEYFTVYNELTKVKYVTEGMRKPAFLSGEQKKAIVDLLFKTNRKVTVKQLKEDYFKKIECFDSVEISGVEDRFNASLGTYHDLLKIIKDKDFLDNEENEDILEDIVLTLTLFEDREMIEERLKTYAHLFDDKVMKQLKRRRYTGWGRLSRKLINGIRDKQSGKTILDFLKSDGFANRNFMQLIHDDSLTFKEDIQKAQVSGQGDSLHEHIANLAGSPAIKKGILQTVKVVDELVKVMGRHKPENIVIEMARENQTTQKGQKNSRERMKRIEEGIKELGSQILKEHPVENTQLQNEKLYLYYLQNGRDMYVDQELDINRLSDYDVDHIVPQSFLKDDSIDNKVLTRSDKARGKSDNVPSEEVVKKMKNYWRQLLNAKLITQRKFDNLTKAERGGLSELDKAGFIKRQLVETRQITKHVAQILDSRMNTKYDENDKLIREVKVITLKSKLVSDFRKDFQFYKVREINNYHHAHDAYLNAVVGTALIKKYPKLESEFVYGDYKVYDVRKMIAKSEQEIGKATAKYFFYSNIMNFFKTEITLANGEIRKRPLIETNGETGEIVWDKGRDFATVRKVLSMPQVNIVKKTEVQTGGFSKESILPKRNSDKLIARKKDWDPKKYGGFDSPTVAYSVLVVAKVEKGKSKKLKSVKELLGITIMERSSFEKNPIDFLEAKGYKEVKKDLIIKLPKYSLFELENGRKRMLASAGELQKGNELALPSKYVNFLYLASHYEKLKGSPEDNEQKQLFVEQHKHYLDEIIEQISEFSKRVILADANLDKVLSAYNKHRDKPIREQAENIIHLFTLTNLGAPAAFKYFDTTIDRKRYTSTKEVLDATLIHQSITGLYETRIDLSQLGGDGGPAPAPAPAPAPGGWVQEISDSRPMLHIYLNGRRFLGLLNTGADKTCIAGRDWPANWPIHQTESSLQGLGMACGVARSSQPLRWQHEDKSGIIHPFVIPTLPFTLWGRDIMKDIKVRLMTDSPDDSQDLMIGAIESNLFADQISWKSDQPVWLNQWPLKQEKLQALQQLVTEQLQLGHLEESNSPWNTPVFVIKKKSGKWRLLQDLRAVNATMHDMGALQPGLPSPVAVPKGWEIIIIDLQDCFFNIKLHPEDCKRFAFSVPSPNFKRPYQRFQWKVLPQGMKNSPTLCQKFVDKAILTVRDKYQDSYIVHYMDDILLAHPSRSIVDEILTSMIQALNKHGLVVSTEKIQKYDNLKYLGTHIQGDSVSYQKLQIRTDKLRTLNDFQKLLGNINWIRPFLKLTTGELKPLFEILNGDSNPISTRKLTPEACKALQLMNERLSTARVKRLDLSQPWSLCILKTEYTPTACLWQDGVVEWIHLPHISPKVITPYDIFCTQLIIKGRHRSKELFSKDPDYIVVPYTKVQFDLLLQEKEDWPISLLGFLGEVHFHLPKDPLLTFTLQTAIIFPHMTSTTPLEKGIVIFTDGSANGRSVTYIQGREPIIKENTQNTAQQAEIVAVITAFEEVSQPFNLYTDSKYVTGLFPEIETATLSPRTKIYTELKHLQRLIHKRQEKFYIGHIRGHTGLPGPLAQGNAYADSLTRILTAGKRTADGSEFEKRTADGSEFESPKKKAKVE

SEQ ID NO: 3176 - protein, 2114 aa, synthetic construct
MPAAKRVKLDGGDKKYSIGLDIGTNSVGWAVITDEYKVPSKKFKVLGNTDRHSIKKNLIGALLFDSGETAEATRLKRTARRRYTRRKNRICYLQEIFSNEMAKVDDSFFHRLEESFLVEEDKKHERHPIFGNIVDEVAYHEKYPTIYHLRKKLVDSTDKADLRLIYLALAHMIKFRGHFLIEGDLNPDNSDVDKLFIQLVQTYNQLFEENPINASGVDAKAILSARLSKSRRLENLIAQLPGEKKNGLFGNLIALSLGLTPNFKSNFDLAEDAKLQLSKDTYDDDLDNLLAQIGDQYADLFLAAKNLSDAILLSDILRVNTEITKAPLSASMIKRYDEHHQDLTLLKALVRQQLPEKYKEIFFDQSKNGYAGYIDGGASQEEFYKFIKPILEKMDGTEELLVKLNREDLLRKQRTFDNGSIPHQIHLGELHAILRRQEDFYPFLKDNREKIEKILTFRIPYYVGPLARGNSRFAWMTRKSEETITPWNFEEVVDKGASAQSFIERMTNFDKNLPNEKVLPKHSLLYEYFTVYNELTKVKYVTEGMRKPAFLSGEQKKAIVDLLFKTNRKVTVKQLKEDYFKKIECFDSVEISGVEDRFNASLGTYHDLLKIIKDKDFLDNEENEDILEDIVLTLTLFEDREMIEERLKTYAHLFDDKVMKQLKRRRYTGWGRLSRKLINGIRDKQSGKTILDFLKSDGFANRNFMQLIHDDSLTFKEDIQKAQVSGQGDSLHEHIANLAGSPAIKKGILQTVKVVDELVKVMGRHKPENIVIEMARENQTTQKGQKNSRERMKRIEEGIKELGSQILKEHPVENTQLQNEKLYLYYLQNGRDMYVDQELDINRLSDYDVDHIVPQSFLKDDSIDNKVLTRSDKARGKSDNVPSEEVVKKMKNYWRQLLNAKLITQRKFDNLTKAERGGLSELDKAGFIKRQLVETRQITKHVAQILDSRMNTKYDENDKLIREVKVITLKSKLVSDFRKDFQFYKVREINNYHHAHDAYLNAVVGTALIKKYPKLESEFVYGDYKVYDVRKMIAKSEQEIGKATAKYFFYSNIMNFFKTEITLANGEIRKRPLIETNGETGEIVWDKGRDFATVRKVLSMPQVNIVKKTEVQTGGFSKESILPKRNSDKLIARKKDWDPKKYGGFDSPTVAYSVLVVAKVEKGKSKKLKSVKELLGITIMERSSFEKNPIDFLEAKGYKEVKKDLIIKLPKYSLFELENGRKRMLASAGELQKGNELALPSKYVNFLYLASHYEKLKGSPEDNEQKQLFVEQHKHYLDEIIEQISEFSKRVILADANLDKVLSAYNKHRDKPIREQAENIIHLFTLTNLGAPAAFKYFDTTIDRKRYTSTKEVLDATLIHQSITGLYETRIDLSQLGGDGGPAPGSSGGSGGWVQEISDSRPMLHIYLNGRRFLGLLNTGADKTCIAGRDWPANWPIHQTESSLQGLGMACGVARSSQPLRWQHEDKSGIIHPFVIPTLPFTLWGRDIMKDIKVRLMTDSPDDSQDLMIGAIESNLFADQISWKSDQPVWLNQWPLKQEKLQALQQLVTEQLQLGHLEESNSPWNTPVFVIKKKSGKWRLLQDLRAVNATMHDMGALQPGLPSPVAVPKGWEIIIIDLQDCFFNIKLHPEDCKRFAFSVPSPNFKRPYQRFQWKVLPQGMKNSPTLCQKFVDKAILTVRDKYQDSYIVHYMDDILLAHPSRSIVDEILTSMIQALNKHGLVVSTEKIQKYDNLKYLGTHIQGDSVSYQKLQIRTDKLRTLNDFQKLLGNINWIRPFLKLTTGELKPLFEILNGDSNPISTRKLTPEACKALQLMNERLSTARVKRLDLSQPWSLCILKTEYTPTACLWQDGVVEWIHLPHISPKVITPYDIFCTQLIIKGRHRSKELFSKDPDYIVVPYTKVQFDLLLQEKEDWPISLLGFLGEVHFHLPKDPLLTFTLQTAIIFPHMTSTTPLEKGIVIFTDGSANGRSVTYIQGREPIIKENTQNTAQQAEIVAVITAFEEVSQPFNLYTDSKYVTGLFPEIETATLSPRTKIYTELKHLQRLIHKRQEKFYIGHIRGHTGLPGPLAQGNAYADSLTRILTAGKRTADGSEFEKRTADGSEFESPKKKAKVE

SEQ ID NO: 3177 - protein, 2113 aa, synthetic construct
MPAAKRVKLDGGDKKYSIGLDIGTNSVGWAVITDEYKVPSKKFKVLGNTDRHSIKKNLIGALLFDSGETAEATRLKRTARRRYTRRKNRICYLQEIFSNEMAKVDDSFFHRLEESFLVEEDKKHERHPIFGNIVDEVAYHEKYPTIYHLRKKLVDSTDKADLRLIYLALAHMIKFRGHFLIEGDLNPDNSDVDKLFIQLVQTYNQLFEENPINASGVDAKAILSARLSKSRRLENLIAQLPGEKKNGLFGNLIALSLGLTPNFKSNFDLAEDAKLQLSKDTYDDDLDNLLAQIGDQYADLFLAAKNLSDAILLSDILRVNTEITKAPLSASMIKRYDEHHQDLTLLKALVRQQLPEKYKEIFFDQSKNGYAGYIDGGASQEEFYKFIKPILEKMDGTEELLVKLNREDLLRKQRTFDNGSIPHQIHLGELHAILRRQEDFYPFLKDNREKIEKILTFRIPYYVGPLARGNSRFAWMTRKSEETITPWNFEEVVDKGASAQSFIERMTNFDKNLPNEKVLPKHSLLYEYFTVYNELTKVKYVTEGMRKPAFLSGEQKKAIVDLLFKTNRKVTVKQLKEDYFKKIECFDSVEISGVEDRFNASLGTYHDLLKIIKDKDFLDNEENEDILEDIVLTLTLFEDREMIEERLKTYAHLFDDKVMKQLKRRRYTGWGRLSRKLINGIRDKQSGKTILDFLKSDGFANRNFMQLIHDDSLTFKEDIQKAQVSGQGDSLHEHIANLAGSPAIKKGILQTVKVVDELVKVMGRHKPENIVIEMARENQTTQKGQKNSRERMKRIEEGIKELGSQILKEHPVENTQLQNEKLYLYYLQNGRDMYVDQELDINRLSDYDVDHIVPQSFLKDDSIDNKVLTRSDKARGKSDNVPSEEVVKKMKNYWRQLLNAKLITQRKFDNLTKAERGGLSELDKAGFIKRQLVETRQITKHVAQILDSRMNTKYDENDKLIREVKVITLKSKLVSDFRKDFQFYKVREINNYHHAHDAYLNAVVGTALIKKYPKLESEFVYGDYKVYDVRKMIAKSEQEIGKATAKYFFYSNIMNFFKTEITLANGEIRKRPLIETNGETGEIVWDKGRDFATVRKVLSMPQVNIVKKTEVQTGGFSKESILPKRNSDKLIARKKDWDPKKYGGFDSPTVAYSVLVVAKVEKGKSKKLKSVKELLGITIMERSSFEKNPIDFLEAKGYKEVKKDLIIKLPKYSLFELENGRKRMLASAGELQKGNELALPSKYVNFLYLASHYEKLKGSPEDNEQKQLFVEQHKHYLDEIIEQISEFSKRVILADANLDKVLSAYNKHRDKPIREQAENIIHLFTLTNLGAPAAFKYFDTTIDRKRYTSTKEVLDATLIHQSITGLYETRIDLSQLGGDGGGGGEAAAKGGWVQEISDSRPMLHIYLNGRRFLGLLNTGADKTCIAGRDWPANWPIHQTESSLQGLGMACGVARSSQPLRWQHEDKSGIIHPFVIPTLPFTLWGRDIMKDIKVRLMTDSPDDSQDLMIGAIESNLFADQISWKSDQPVWLNQWPLKQEKLQALQQLVTEQLQLGHLEESNSPWNTPVFVIKKKSGKWRLLQDLRAVNATMHDMGALQPGLPSPVAVPKGWEIIIIDLQDCFFNIKLHPEDCKRFAFSVPSPNFKRPYQRFQWKVLPQGMKNSPTLCQKFVDKAILTVRDKYQDSYIVHYMDDILLAHPSRSIVDEILTSMIQALNKHGLVVSTEKIQKYDNLKYLGTHIQGDSVSYQKLQIRTDKLRTLNDFQKLLGNINWIRPFLKLTTGELKPLFEILNGDSNPISTRKLTPEACKALQLMNERLSTARVKRLDLSQPWSLCILKTEYTPTACLWQDGVVEWIHLPHISPKVITPYDIFCTQLIIKGRHRSKELFSKDPDYIVVPYTKVQFDLLLQEKEDWPISLLGFLGEVHFHLPKDPLLTFTLQTAIIFPHMTSTTPLEKGIVIFTDGSANGRSVTYIQGREPIIKENTQNTAQQAEIVAVITAFEEVSQPFNLYTDSKYVTGLFPEIETATLSPRTKIYTELKHLQRLIHKRQEKFYIGHIRGHTGLPGPLAQGNAYADSLTRILTAGKRTADGSEFEKRTADGSEFESPKKKAKVE

SEQ ID NO: 3178 - protein, 2116 aa, synthetic construct
MPAAKRVKLDGGDKKYSIGLDIGTNSVGWAVITDEYKVPSKKFKVLGNTDRHSIKKNLIGALLFDSGETAEATRLKRTARRRYTRRKNRICYLQEIFSNEMAKVDDSFFHRLEESFLVEEDKKHERHPIFGNIVDEVAYHEKYPTIYHLRKKLVDSTDKADLRLIYLALAHMIKFRGHFLIEGDLNPDNSDVDKLFIQLVQTYNQLFEENPINASGVDAKAILSARLSKSRRLENLIAQLPGEKKNGLFGNLIALSLGLTPNFKSNFDLAEDAKLQLSKDTYDDDLDNLLAQIGDQYADLFLAAKNLSDAILLSDILRVNTEITKAPLSASMIKRYDEHHQDLTLLKALVRQQLPEKYKEIFFDQSKNGYAGYIDGGASQEEFYKFIKPILEKMDGTEELLVKLNREDLLRKQRTFDNGSIPHQIHLGELHAILRRQEDFYPFLKDNREKIEKILTFRIPYYVGPLARGNSRFAWMTRKSEETITPWNFEEVVDKGASAQSFIERMTNFDKNLPNEKVLPKHSLLYEYFTVYNELTKVKYVTEGMRKPAFLSGEQKKAIVDLLFKTNRKVTVKQLKEDYFKKIECFDSVEISGVEDRFNASLGTYHDLLKIIKDKDFLDNEENEDILEDIVLTLTLFEDREMIEERLKTYAHLFDDKVMKQLKRRRYTGWGRLSRKLINGIRDKQSGKTILDFLKSDGFANRNFMQLIHDDSLTFKEDIQKAQVSGQGDSLHEHIANLAGSPAIKKGILQTVKVVDELVKVMGRHKPENIVIEMARENQTTQKGQKNSRERMKRIEEGIKELGSQILKEHPVENTQLQNEKLYLYYLQNGRDMYVDQELDINRLSDYDVDHIVPQSFLKDDSIDNKVLTRSDKARGKSDNVPSEEVVKKMKNYWRQLLNAKLITQRKFDNLTKAERGGLSELDKAGFIKRQLVETRQITKHVAQILDSRMNTKYDENDKLIREVKVITLKSKLVSDFRKDFQFYKVREINNYHHAHDAYLNAVVGTALIKKYPKLESEFVYGDYKVYDVRKMIAKSEQEIGKATAKYFFYSNIMNFFKTEITLANGEIRKRPLIETNGETGEIVWDKGRDFATVRKVLSMPQVNIVKKTEVQTGGFSKESILPKRNSDKLIARKKDWDPKKYGGFDSPTVAYSVLVVAKVEKGKSKKLKSVKELLGITIMERSSFEKNPIDFLEAKGYKEVKKDLIIKLPKYSLFELENGRKRMLASAGELQKGNELALPSKYVNFLYLASHYEKLKGSPEDNEQKQLFVEQHKHYLDEIIEQISEFSKRVILADANLDKVLSAYNKHRDKPIREQAENIIHLFTLTNLGAPAAFKYFDTTIDRKRYTSTKEVLDATLIHQSITGLYETRIDLSQLGGDGGGGSPAPEAAAKGGWVQEISDSRPMLHIYLNGRRFLGLLNTGADKTCIAGRDWPANWPIHQTESSLQGLGMACGVARSSQPLRWQHEDKSGIIHPFVIPTLPFTLWGRDIMKDIKVRLMTDSPDDSQDLMIGAIESNLFADQISWKSDQPVWLNQWPLKQEKLQALQQLVTEQLQLGHLEESNSPWNTPVFVIKKKSGKWRLLQDLRAVNATMHDMGALQPGLPSPVAVPKGWEIIIIDLQDCFFNIKLHPEDCKRFAFSVPSPNFKRPYQRFQWKVLPQGMKNSPTLCQKFVDKAILTVRDKYQDSYIVHYMDDILLAHPSRSIVDEILTSMIQALNKHGLVVSTEKIQKYDNLKYLGTHIQGDSVSYQKLQIRTDKLRTLNDFQKLLGNINWIRPFLKLTTGELKPLFEILNGDSNPISTRKLTPEACKALQLMNERLSTARVKRLDLSQPWSLCILKTEYTPTACLWQDGVVEWIHLPHISPKVITPYDIFCTQLIIKGRHRSKELFSKDPDYIVVPYTKVQFDLLLQEKEDWPISLLGFLGEVHFHLPKDPLLTFTLQTAIIFPHMTSTTPLEKGIVIFTDGSANGRSVTYIQGREPIIKENTQNTAQQAEIVAVITAFEEVSQPFNLYTDSKYVTGLFPEIETATLSPRTKIYTELKHLQRLIHKRQEKFYIGHIRGHTGLPGPLAQGNAYADSLTRILTAGKRTADGSEFEKRTADGSEFESPKKKAKVE

SEQ ID NO: 3179 - protein, 2114 aa, synthetic construct
MPAAKRVKLDGGDKKYSIGLDIGTNSVGWAVITDEYKVPSKKFKVLGNTDRHSIKKNLIGALLFDSGETAEATRLKRTARRRYTRRKNRICYLQEIFSNEMAKVDDSFFHRLEESFLVEEDKKHERHPIFGNIVDEVAYHEKYPTIYHLRKKLVDSTDKADLRLIYLALAHMIKFRGHFLIEGDLNPDNSDVDKLFIQLVQTYNQLFEENPINASGVDAKAILSARLSKSRRLENLIAQLPGEKKNGLFGNLIALSLGLTPNFKSNFDLAEDAKLQLSKDTYDDDLDNLLAQIGDQYADLFLAAKNLSDAILLSDILRVNTEITKAPLSASMIKRYDEHHQDLTLLKALVRQQLPEKYKEIFFDQSKNGYAGYIDGGASQEEFYKFIKPILEKMDGTEELLVKLNREDLLRKQRTFDNGSIPHQIHLGELHAILRRQEDFYPFLKDNREKIEKILTFRIPYYVGPLARGNSRFAWMTRKSEETITPWNFEEVVDKGASAQSFIERMTNFDKNLPNEKVLPKHSLLYEYFTVYNELTKVKYVTEGMRKPAFLSGEQKKAIVDLLFKTNRKVTVKQLKEDYFKKIECFDSVEISGVEDRFNASLGTYHDLLKIIKDKDFLDNEENEDILEDIVLTLTLFEDREMIEERLKTYAHLFDDKVMKQLKRRRYTGWGRLSRKLINGIRDKQSGKTILDFLKSDGFANRNFMQLIHDDSLTFKEDIQKAQVSGQGDSLHEHIANLAGSPAIKKGILQTVKVVDELVKVMGRHKPENIVIEMARENQTTQKGQKNSRERMKRIEEGIKELGSQILKEHPVENTQLQNEKLYLYYLQNGRDMYVDQELDINRLSDYDVDHIVPQSFLKDDSIDNKVLTRSDKARGKSDNVPSEEVVKKMKNYWRQLLNAKLITQRKFDNLTKAERGGLSELDKAGFIKRQLVETRQITKHVAQILDSRMNTKYDENDKLIREVKVITLKSKLVSDFRKDFQFYKVREINNYHHAHDAYLNAVVGTALIKKYPKLESEFVYGDYKVYDVRKMIAKSEQEIGKATAKYFFYSNIMNFFKTEITLANGEIRKRPLIETNGETGEIVWDKGRDFATVRKVLSMPQVNIVKKTEVQTGGFSKESILPKRNSDKLIARKKDWDPKKYGGFDSPTVAYSVLVVAKVEKGKSKKLKSVKELLGITIMERSSFEKNPIDFLEAKGYKEVKKDLIIKLPKYSLFELENGRKRMLASAGELQKGNELALPSKYVNFLYLASHYEKLKGSPEDNEQKQLFVEQHKHYLDEIIEQISEFSKRVILADANLDKVLSAYNKHRDKPIREQAENIIHLFTLTNLGAPAAFKYFDTTIDRKRYTSTKEVLDATLIHQSITGLYETRIDLSQLGGDGGGGSGSSGGGGGWVQEISDSRPMLHIYLNGRRFLGLLNTGADKTCIAGRDWPANWPIHQTESSLQGLGMACGVARSSQPLRWQHEDKSGIIHPFVIPTLPFTLWGRDIMKDIKVRLMTDSPDDSQDLMIGAIESNLFADQISWKSDQPVWLNQWPLKQEKLQALQQLVTEQLQLGHLEESNSPWNTPVFVIKKKSGKWRLLQDLRAVNATMHDMGALQPGLPSPVAVPKGWEIIIIDLQDCFFNIKLHPEDCKRFAFSVPSPNFKRPYQRFQWKVLPQGMKNSPTLCQKFVDKAILTVRDKYQDSYIVHYMDDILLAHPSRSIVDEILTSMIQALNKHGLVVSTEKIQKYDNLKYLGTHIQGDSVSYQKLQIRTDKLRTLNDFQKLLGNINWIRPFLKLTTGELKPLFEILNGDSNPISTRKLTPEACKALQLMNERLSTARVKRLDLSQPWSLCILKTEYTPTACLWQDGVVEWIHLPHISPKVITPYDIFCTQLIIKGRHRSKELFSKDPDYIVVPYTKVQFDLLLQEKEDWPISLLGFLGEVHFHLPKDPLLTFTLQTAIIFPHMTSTTPLEKGIVIFTDGSANGRSVTYIQGREPIIKENTQNTAQQAEIVAVITAFEEVSQPFNLYTDSKYVTGLFPEIETATLSPRTKIYTELKHLQRLIHKRQEKFYIGHIRGHTGLPGPLAQGNAYADSLTRILTAGKRTADGSEFEKRTADGSEFESPKKKAKVE

SEQ ID NO: 3180 - protein, 2114 aa, synthetic construct
MPAAKRVKLDGGDKKYSIGLDIGTNSVGWAVITDEYKVPSKKFKVLGNTDRHSIKKNLIGALLFDSGETAEATRLKRTARRRYTRRKNRICYLQEIFSNEMAKVDDSFFHRLEESFLVEEDKKHERHPIFGNIVDEVAYHEKYPTIYHLRKKLVDSTDKADLRLIYLALAHMIKFRGHFLIEGDLNPDNSDVDKLFIQLVQTYNQLFEENPINASGVDAKAILSARLSKSRRLENLIAQLPGEKKNGLFGNLIALSLGLTPNFKSNFDLAEDAKLQLSKDTYDDDLDNLLAQIGDQYADLFLAAKNLSDAILLSDILRVNTEITKAPLSASMIKRYDEHHQDLTLLKALVRQQLPEKYKEIFFDQSKNGYAGYIDGGASQEEFYKFIKPILEKMDGTEELLVKLNREDLLRKQRTFDNGSIPHQIHLGELHAILRRQEDFYPFLKDNREKIEKILTFRIPYYVGPLARGNSRFAWMTRKSEETITPWNFEEVVDKGASAQSFIERMTNFDKNLPNEKVLPKHSLLYEYFTVYNELTKVKYVTEGMRKPAFLSGEQKKAIVDLLFKTNRKVTVKQLKEDYFKKIECFDSVEISGVEDRFNASLGTYHDLLKIIKDKDFLDNEENEDILEDIVLTLTLFEDREMIEERLKTYAHLFDDKVMKQLKRRRYTGWGRLSRKLINGIRDKQSGKTILDFLKSDGFANRNFMQLIHDDSLTFKEDIQKAQVSGQGDSLHEHIANLAGSPAIKKGILQTVKVVDELVKVMGRHKPENIVIEMARENQTTQKGQKNSRERMKRIEEGIKELGSQILKEHPVENTQLQNEKLYLYYLQNGRDMYVDQELDINRLSDYDVDHIVPQSFLKDDSIDNKVLTRSDKARGKSDNVPSEEVVKKMKNYWRQLLNAKLITQRKFDNLTKAERGGLSELDKAGFIKRQLVETRQITKHVAQILDSRMNTKYDENDKLIREVKVITLKSKLVSDFRKDFQFYKVREINNYHHAHDAYLNAVVGTALIKKYPKLESEFVYGDYKVYDVRKMIAKSEQEIGKATAKYFFYSNIMNFFKTEITLANGEIRKRPLIETNGETGEIVWDKGRDFATVRKVLSMPQVNIVKKTEVQTGGFSKESILPKRNSDKLIARKKDWDPKKYGGFDSPTVAYSVLVVAKVEKGKSKKLKSVKELLGITIMERSSFEKNPIDFLEAKGYKEVKKDLIIKLPKYSLFELENGRKRMLASAGELQKGNELALPSKYVNFLYLASHYEKLKGSPEDNEQKQLFVEQHKHYLDEIIEQISEFSKRVILADANLDKVLSAYNKHRDKPIREQAENIIHLFTLTNLGAPAAFKYFDTTIDRKRYTSTKEVLDATLIHQSITGLYETRIDLSQLGGDGGPAPAPAPAPGGWVQEISDSRPMLHIYLNGRRFLGLLNTGADKTCIAGRDWPANWPIHQTESSLQGLGMACGVARSSQPLRWQHEDKSGIIHPFVIPTLPFTLWGRDIMKDIKVRLMTDSPDDSQDLMIGAIESNLFADQISWKSDQPVWLNQWPLKQEKLQALQQLVTEQLQLGHLEESNSPWNTPVFVIKKKSGKWRLLQDLRAVNATMHDMGALQPGLPSPVAVPKGWEIIIIDLQDCFFNIKLHPEDCKRFAFSVPSPNFKRPYQRFQWKVLPQGMKNSPTLCQKFVDKAILTVRDKYQDSYIVHYMDDILLAHPSRSIVDEILTSMIQALNKHGLVVSTEKIQKYDNLKYLGTHIQGDSVSYQKLQIRTDKLRTLNDFQKLLGNINWIRPFLKLTTGELKPLFEILNGDSNPISTRKLTPEACKALQLMNERLSTARVKRLDLSQPWSLCILKTEYTPTACLWQDGVVEWIHLPHISPKVITPYDIFCTQLIIKGRHRSKELFSKDPDYIVVPYTKVQFDLLLQEKEDWPISLLGFLGEVHFHLPKDPLLTFTLQTAIIFPHMTSTTPLEKGIVIFTDGSANGRSVTYIQGREPIIKENTQNTAQQAEIVAVITAFEEVSQPFNLYTDSKYVTGLFPEIETATLSPRTKIYTELKHLQRLIHKRQEKFYIGHIRGHTGLPGPLAQGNAYADSLTRILTAGKRTADGSEFEKRTADGSEFESPKKKAKVE

SEQ ID NO: 3181 - protein, 2116 aa, synthetic construct
MPAAKRVKLDGGDKKYSIGLDIGTNSVGWAVITDEYKVPSKKFKVLGNTDRHSIKKNLIGALLFDSGETAEATRLKRTARRRYTRRKNRICYLQEIFSNEMAKVDDSFFHRLEESFLVEEDKKHERHPIFGNIVDEVAYHEKYPTIYHLRKKLVDSTDKADLRLIYLALAHMIKFRGHFLIEGDLNPDNSDVDKLFIQLVQTYNQLFEENPINASGVDAKAILSARLSKSRRLENLIAQLPGEKKNGLFGNLIALSLGLTPNFKSNFDLAEDAKLQLSKDTYDDDLDNLLAQIGDQYADLFLAAKNLSDAILLSDILRVNTEITKAPLSASMIKRYDEHHQDLTLLKALVRQQLPEKYKEIFFDQSKNGYAGYIDGGASQEEFYKFIKPILEKMDGTEELLVKLNREDLLRKQRTFDNGSIPHQIHLGELHAILRRQEDFYPFLKDNREKIEKILTFRIPYYVGPLARGNSRFAWMTRKSEETITPWNFEEVVDKGASAQSFIERMTNFDKNLPNEKVLPKHSLLYEYFTVYNELTKVKYVTEGMRKPAFLSGEQKKAIVDLLFKTNRKVTVKQLKEDYFKKIECFDSVEISGVEDRFNASLGTYHDLLKIIKDKDFLDNEENEDILEDIVLTLTLFEDREMIEERLKTYAHLFDDKVMKQLKRRRYTGWGRLSRKLINGIRDKQSGKTILDFLKSDGFANRNFMQLIHDDSLTFKEDIQKAQVSGQGDSLHEHIANLAGSPAIKKGILQTVKVVDELVKVMGRHKPENIVIEMARENQTTQKGQKNSRERMKRIEEGIKELGSQILKEHPVENTQLQNEKLYLYYLQNGRDMYVDQELDINRLSDYDVDHIVPQSFLKDDSIDNKVLTRSDKARGKSDNVPSEEVVKKMKNYWRQLLNAKLITQRKFDNLTKAERGGLSELDKAGFIKRQLVETRQITKHVAQILDSRMNTKYDENDKLIREVKVITLKSKLVSDFRKDFQFYKVREINNYHHAHDAYLNAVVGTALIKKYPKLESEFVYGDYKVYDVRKMIAKSEQEIGKATAKYFFYSNIMNFFKTEITLANGEIRKRPLIETNGETGEIVWDKGRDFATVRKVLSMPQVNIVKKTEVQTGGFSKESILPKRNSDKLIARKKDWDPKKYGGFDSPTVAYSVLVVAKVEKGKSKKLKSVKELLGITIMERSSFEKNPIDFLEAKGYKEVKKDLIIKLPKYSLFELENGRKRMLASAGELQKGNELALPSKYVNFLYLASHYEKLKGSPEDNEQKQLFVEQHKHYLDEIIEQISEFSKRVILADANLDKVLSAYNKHRDKPIREQAENIIHLFTLTNLGAPAAFKYFDTTIDRKRYTSTKEVLDATLIHQSITGLYETRIDLSQLGGDGGGSSGGGEAAAKGGWVQEISDSRPMLHIYLNGRRFLGLLNTGADKTCIAGRDWPANWPIHQTESSLQGLGMACGVARSSQPLRWQHEDKSGIIHPFVIPTLPFTLWGRDIMKDIKVRLMTDSPDDSQDLMIGAIESNLFADQISWKSDQPVWLNQWPLKQEKLQALQQLVTEQLQLGHLEESNSPWNTPVFVIKKKSGKWRLLQDLRAVNATMHDMGALQPGLPSPVAVPKGWEIIIIDLQDCFFNIKLHPEDCKRFAFSVPSPNFKRPYQRFQWKVLPQGMKNSPTLCQKFVDKAILTVRDKYQDSYIVHYMDDILLAHPSRSIVDEILTSMIQALNKHGLVVSTEKIQKYDNLKYLGTHIQGDSVSYQKLQIRTDKLRTLNDFQKLLGNINWIRPFLKLTTGELKPLFEILNGDSNPISTRKLTPEACKALQLMNERLSTARVKRLDLSQPWSLCILKTEYTPTACLWQDGVVEWIHLPHISPKVITPYDIFCTQLIIKGRHRSKELFSKDPDYIVVPYTKVQFDLLLQEKEDWPISLLGFLGEVHFHLPKDPLLTFTLQTAIIFPHMTSTTPLEKGIVIFTDGSANGRSVTYIQGREPIIKENTQNTAQQAEIVAVITAFEEVSQPFNLYTDSKYVTGLFPEIETATLSPRTKIYTELKHLQRLIHKRQEKFYIGHIRGHTGLPGPLAQGNAYADSLTRILTAGKRTADGSEFEKRTADGSEFESPKKKAKVE

SEQ ID NO: 3182 - protein, 2116 aa, synthetic construct
MPAAKRVKLDGGDKKYSIGLDIGTNSVGWAVITDEYKVPSKKFKVLGNTDRHSIKKNLIGALLFDSGETAEATRLKRTARRRYTRRKNRICYLQEIFSNEMAKVDDSFFHRLEESFLVEEDKKHERHPIFGNIVDEVAYHEKYPTIYHLRKKLVDSTDKADLRLIYLALAHMIKFRGHFLIEGDLNPDNSDVDKLFIQLVQTYNQLFEENPINASGVDAKAILSARLSKSRRLENLIAQLPGEKKNGLFGNLIALSLGLTPNFKSNFDLAEDAKLQLSKDTYDDDLDNLLAQIGDQYADLFLAAKNLSDAILLSDILRVNTEITKAPLSASMIKRYDEHHQDLTLLKALVRQQLPEKYKEIFFDQSKNGYAGYIDGGASQEEFYKFIKPILEKMDGTEELLVKLNREDLLRKQRTFDNGSIPHQIHLGELHAILRRQEDFYPFLKDNREKIEKILTFRIPYYVGPLARGNSRFAWMTRKSEETITPWNFEEVVDKGASAQSFIERMTNFDKNLPNEKVLPKHSLLYEYFTVYNELTKVKYVTEGMRKPAFLSGEQKKAIVDLLFKTNRKVTVKQLKEDYFKKIECFDSVEISGVEDRFNASLGTYHDLLKIIKDKDFLDNEENEDILEDIVLTLTLFEDREMIEERLKTYAHLFDDKVMKQLKRRRYTGWGRLSRKLINGIRDKQSGKTILDFLKSDGFANRNFMQLIHDDSLTFKEDIQKAQVSGQGDSLHEHIANLAGSPAIKKGILQTVKVVDELVKVMGRHKPENIVIEMARENQTTQKGQKNSRERMKRIEEGIKELGSQILKEHPVENTQLQNEKLYLYYLQNGRDMYVDQELDINRLSDYDVDHIVPQSFLKDDSIDNKVLTRSDKARGKSDNVPSEEVVKKMKNYWRQLLNAKLITQRKFDNLTKAERGGLSELDKAGFIKRQLVETRQITKHVAQILDSRMNTKYDENDKLIREVKVITLKSKLVSDFRKDFQFYKVREINNYHHAHDAYLNAVVGTALIKKYPKLESEFVYGDYKVYDVRKMIAKSEQEIGKATAKYFFYSNIMNFFKTEITLANGEIRKRPLIETNGETGEIVWDKGRDFATVRKVLSMPQVNIVKKTEVQTGGFSKESILPKRNSDKLIARKKDWDPKKYGGFDSPTVAYSVLVVAKVEKGKSKKLKSVKELLGITIMERSSFEKNPIDFLEAKGYKEVKKDLIIKLPKYSLFELENGRKRMLASAGELQKGNELALPSKYVNFLYLASHYEKLKGSPEDNEQKQLFVEQHKHYLDEIIEQISEFSKRVILADANLDKVLSAYNKHRDKPIREQAENIIHLFTLTNLGAPAAFKYFDTTIDRKRYTSTKEVLDATLIHQSITGLYETRIDLSQLGGDGGGSSEAAAKPAPGGWVQEISDSRPMLHIYLNGRRFLGLLNTGADKTCIAGRDWPANWPIHQTESSLQGLGMACGVARSSQPLRWQHEDKSGIIHPFVIPTLPFTLWGRDIMKDIKVRLMTDSPDDSQDLMIGAIESNLFADQISWKSDQPVWLNQWPLKQEKLQALQQLVTEQLQLGHLEESNSPWNTPVFVIKKKSGKWRLLQDLRAVNATMHDMGALQPGLPSPVAVPKGWEIIIIDLQDCFFNIKLHPEDCKRFAFSVPSPNFKRPYQRFQWKVLPQGMKNSPTLCQKFVDKAILTVRDKYQDSYIVHYMDDILLAHPSRSIVDEILTSMIQALNKHGLVVSTEKIQKYDNLKYLGTHIQGDSVSYQKLQIRTDKLRTLNDFQKLLGNINWIRPFLKLTTGELKPLFEILNGDSNPISTRKLTPEACKALQLMNERLSTARVKRLDLSQPWSLCILKTEYTPTACLWQDGVVEWIHLPHISPKVITPYDIFCTQLIIKGRHRSKELFSKDPDYIVVPYTKVQFDLLLQEKEDWPISLLGFLGEVHFHLPKDPLLTFTLQTAIIFPHMTSTTPLEKGIVIFTDGSANGRSVTYIQGREPIIKENTQNTAQQAEIVAVITAFEEVSQPFNLYTDSKYVTGLFPEIETATLSPRTKIYTELKHLQRLIHKRQEKFYIGHIRGHTGLPGPLAQGNAYADSLTRILTAGKRTADGSEFEKRTADGSEFESPKKKAKVE

SEQ ID NO: 3183 - protein, 2111 aa, synthetic construct
MPAAKRVKLDGGDKKYSIGLDIGTNSVGWAVITDEYKVPSKKFKVLGNTDRHSIKKNLIGALLFDSGETAEATRLKRTARRRYTRRKNRICYLQEIFSNEMAKVDDSFFHRLEESFLVEEDKKHERHPIFGNIVDEVAYHEKYPTIYHLRKKLVDSTDKADLRLIYLALAHMIKFRGHFLIEGDLNPDNSDVDKLFIQLVQTYNQLFEENPINASGVDAKAILSARLSKSRRLENLIAQLPGEKKNGLFGNLIALSLGLTPNFKSNFDLAEDAKLQLSKDTYDDDLDNLLAQIGDQYADLFLAAKNLSDAILLSDILRVNTEITKAPLSASMIKRYDEHHQDLTLLKALVRQQLPEKYKEIFFDQSKNGYAGYIDGGASQEEFYKFIKPILEKMDGTEELLVKLNREDLLRKQRTFDNGSIPHQIHLGELHAILRRQEDFYPFLKDNREKIEKILTFRIPYYVGPLARGNSRFAWMTRKSEETITPWNFEEVVDKGASAQSFIERMTNFDKNLPNEKVLPKHSLLYEYFTVYNELTKVKYVTEGMRKPAFLSGEQKKAIVDLLFKTNRKVTVKQLKEDYFKKIECFDSVEISGVEDRFNASLGTYHDLLKIIKDKDFLDNEENEDILEDIVLTLTLFEDREMIEERLKTYAHLFDDKVMKQLKRRRYTGWGRLSRKLINGIRDKQSGKTILDFLKSDGFANRNFMQLIHDDSLTFKEDIQKAQVSGQGDSLHEHIANLAGSPAIKKGILQTVKVVDELVKVMGRHKPENIVIEMARENQTTQKGQKNSRERMKRIEEGIKELGSQILKEHPVENTQLQNEKLYLYYLQNGRDMYVDQELDINRLSDYDVDHIVPQSFLKDDSIDNKVLTRSDKARGKSDNVPSEEVVKKMKNYWRQLLNAKLITQRKFDNLTKAERGGLSELDKAGFIKRQLVETRQITKHVAQILDSRMNTKYDENDKLIREVKVITLKSKLVSDFRKDFQFYKVREINNYHHAHDAYLNAVVGTALIKKYPKLESEFVYGDYKVYDVRKMIAKSEQEIGKATAKYFFYSNIMNFFKTEITLANGEIRKRPLIETNGETGEIVWDKGRDFATVRKVLSMPQVNIVKKTEVQTGGFSKESILPKRNSDKLIARKKDWDPKKYGGFDSPTVAYSVLVVAKVEKGKSKKLKSVKELLGITIMERSSFEKNPIDFLEAKGYKEVKKDLIIKLPKYSLFELENGRKRMLASAGELQKGNELALPSKYVNFLYLASHYEKLKGSPEDNEQKQLFVEQHKHYLDEIIEQISEFSKRVILADANLDKVLSAYNKHRDKPIREQAENIIHLFTLTNLGAPAAFKYFDTTIDRKRYTSTKEVLDATLIHQSITGLYETRIDLSQLGGDGGGGSGSSGGWVQEISDSRPMLHIYLNGRRFLGLLNTGADKTCIAGRDWPANWPIHQTESSLQGLGMACGVARSSQPLRWQHEDKSGIIHPFVIPTLPFTLWGRDIMKDIKVRLMTDSPDDSQDLMIGAIESNLFADQISWKSDQPVWLNQWPLKQEKLQALQQLVTEQLQLGHLEESNSPWNTPVFVIKKKSGKWRLLQDLRAVNATMHDMGALQPGLPSPVAVPKGWEIIIIDLQDCFFNIKLHPEDCKRFAFSVPSPNFKRPYQRFQWKVLPQGMKNSPTLCQKFVDKAILTVRDKYQDSYIVHYMDDILLAHPSRSIVDEILTSMIQALNKHGLVVSTEKIQKYDNLKYLGTHIQGDSVSYQKLQIRTDKLRTLNDFQKLLGNINWIRPFLKLTTGELKPLFEILNGDSNPISTRKLTPEACKALQLMNERLSTARVKRLDLSQPWSLCILKTEYTPTACLWQDGVVEWIHLPHISPKVITPYDIFCTQLIIKGRHRSKELFSKDPDYIVVPYTKVQFDLLLQEKEDWPISLLGFLGEVHFHLPKDPLLTFTLQTAIIFPHMTSTTPLEKGIVIFTDGSANGRSVTYIQGREPIIKENTQNTAQQAEIVAVITAFEEVSQPFNLYTDSKYVTGLFPEIETATLSPRTKIYTELKHLQRLIHKRQEKFYIGHIRGHTGLPGPLAQGNAYADSLTRILTAGKRTADGSEFEKRTADGSEFESPKKKAKVE

SEQ ID NO: 3184 - protein, 2114 aa, synthetic construct
MPAAKRVKLDGGDKKYSIGLDIGTNSVGWAVITDEYKVPSKKFKVLGNTDRHSIKKNLIGALLFDSGETAEATRLKRTARRRYTRRKNRICYLQEIFSNEMAKVDDSFFHRLEESFLVEEDKKHERHPIFGNIVDEVAYHEKYPTIYHLRKKLVDSTDKADLRLIYLALAHMIKFRGHFLIEGDLNPDNSDVDKLFIQLVQTYNQLFEENPINASGVDAKAILSARLSKSRRLENLIAQLPGEKKNGLFGNLIALSLGLTPNFKSNFDLAEDAKLQLSKDTYDDDLDNLLAQIGDQYADLFLAAKNLSDAILLSDILRVNTEITKAPLSASMIKRYDEHHQDLTLLKALVRQQLPEKYKEIFFDQSKNGYAGYIDGGASQEEFYKFIKPILEKMDGTEELLVKLNREDLLRKQRTFDNGSIPHQIHLGELHAILRRQEDFYPFLKDNREKIEKILTFRIPYYVGPLARGNSRFAWMTRKSEETITPWNFEEVVDKGASAQSFIERMTNFDKNLPNEKVLPKHSLLYEYFTVYNELTKVKYVTEGMRKPAFLSGEQKKAIVDLLFKTNRKVTVKQLKEDYFKKIECFDSVEISGVEDRFNASLGTYHDLLKIIKDKDFLDNEENEDILEDIVLTLTLFEDREMIEERLKTYAHLFDDKVMKQLKRRRYTGWGRLSRKLINGIRDKQSGKTILDFLKSDGFANRNFMQLIHDDSLTFKEDIQKAQVSGQGDSLHEHIANLAGSPAIKKGILQTVKVVDELVKVMGRHKPENIVIEMARENQTTQKGQKNSRERMKRIEEGIKELGSQILKEHPVENTQLQNEKLYLYYLQNGRDMYVDQELDINRLSDYDVDHIVPQSFLKDDSIDNKVLTRSDKARGKSDNVPSEEVVKKMKNYWRQLLNAKLITQRKFDNLTKAERGGLSELDKAGFIKRQLVETRQITKHVAQILDSRMNTKYDENDKLIREVKVITLKSKLVSDFRKDFQFYKVREINNYHHAHDAYLNAVVGTALIKKYPKLESEFVYGDYKVYDVRKMIAKSEQEIGKATAKYFFYSNIMNFFKTEITLANGEIRKRPLIETNGETGEIVWDKGRDFATVRKVLSMPQVNIVKKTEVQTGGFSKESILPKRNSDKLIARKKDWDPKKYGGFDSPTVAYSVLVVAKVEKGKSKKLKSVKELLGITIMERSSFEKNPIDFLEAKGYKEVKKDLIIKLPKYSLFELENGRKRMLASAGELQKGNELALPSKYVNFLYLASHYEKLKGSPEDNEQKQLFVEQHKHYLDEIIEQISEFSKRVILADANLDKVLSAYNKHRDKPIREQAENIIHLFTLTNLGAPAAFKYFDTTIDRKRYTSTKEVLDATLIHQSITGLYETRIDLSQLGGDGGGGGGSSGGSGGWVQEISDSRPMLHIYLNGRRFLGLLNTGADKTCIAGRDWPANWPIHQTESSLQGLGMACGVARSSQPLRWQHEDKSGIIHPFVIPTLPFTLWGRDIMKDIKVRLMTDSPDDSQDLMIGAIESNLFADQISWKSDQPVWLNQWPLKQEKLQALQQLVTEQLQLGHLEESNSPWNTPVFVIKKKSGKWRLLQDLRAVNATMHDMGALQPGLPSPVAVPKGWEIIIIDLQDCFFNIKLHPEDCKRFAFSVPSPNFKRPYQRFQWKVLPQGMKNSPTLCQKFVDKAILTVRDKYQDSYIVHYMDDILLAHPSRSIVDEILTSMIQALNKHGLVVSTEKIQKYDNLKYLGTHIQGDSVSYQKLQIRTDKLRTLNDFQKLLGNINWIRPFLKLTTGELKPLFEILNGDSNPISTRKLTPEACKALQLMNERLSTARVKRLDLSQPWSLCILKTEYTPTACLWQDGVVEWIHLPHISPKVITPYDIFCTQLIIKGRHRSKELFSKDPDYIVVPYTKVQFDLLLQEKEDWPISLLGFLGEVHFHLPKDPLLTFTLQTAIIFPHMTSTTPLEKGIVIFTDGSANGRSVTYIQGREPIIKENTQNTAQQAEIVAVITAFEEVSQPFNLYTDSKYVTGLFPEIETATLSPRTKIYTELKHLQRLIHKRQEKFYIGHIRGHTGLPGPLAQGNAYADSLTRILTAGKRTADGSEFEKRTADGSEFESPKKKAKVE

SEQ ID NO: 3185 - protein, 2120 aa, synthetic construct
MPAAKRVKLDGGDKKYSIGLDIGTNSVGWAVITDEYKVPSKKFKVLGNTDRHSIKKNLIGALLFDSGETAEATRLKRTARRRYTRRKNRICYLQEIFSNEMAKVDDSFFHRLEESFLVEEDKKHERHPIFGNIVDEVAYHEKYPTIYHLRKKLVDSTDKADLRLIYLALAHMIKFRGHFLIEGDLNPDNSDVDKLFIQLVQTYNQLFEENPINASGVDAKAILSARLSKSRRLENLIAQLPGEKKNGLFGNLIALSLGLTPNFKSNFDLAEDAKLQLSKDTYDDDLDNLLAQIGDQYADLFLAAKNLSDAILLSDILRVNTEITKAPLSASMIKRYDEHHQDLTLLKALVRQQLPEKYKEIFFDQSKNGYAGYIDGGASQEEFYKFIKPILEKMDGTEELLVKLNREDLLRKQRTFDNGSIPHQIHLGELHAILRRQEDFYPFLKDNREKIEKILTFRIPYYVGPLARGNSRFAWMTRKSEETITPWNFEEVVDKGASAQSFIERMTNFDKNLPNEKVLPKHSLLYEYFTVYNELTKVKYVTEGMRKPAFLSGEQKKAIVDLLFKTNRKVTVKQLKEDYFKKIECFDSVEISGVEDRFNASLGTYHDLLKIIKDKDFLDNEENEDILEDIVLTLTLFEDREMIEERLKTYAHLFDDKVMKQLKRRRYTGWGRLSRKLINGIRDKQSGKTILDFLKSDGFANRNFMQLIHDDSLTFKEDIQKAQVSGQGDSLHEHIANLAGSPAIKKGILQTVKVVDELVKVMGRHKPENIVIEMARENQTTQKGQKNSRERMKRIEEGIKELGSQILKEHPVENTQLQNEKLYLYYLQNGRDMYVDQELDINRLSDYDVDHIVPQSFLKDDSIDNKVLTRSDKARGKSDNVPSEEVVKKMKNYWRQLLNAKLITQRKFDNLTKAERGGLSELDKAGFIKRQLVETRQITKHVAQILDSRMNTKYDENDKLIREVKVITLKSKLVSDFRKDFQFYKVREINNYHHAHDAYLNAVVGTALIKKYPKLESEFVYGDYKVYDVRKMIAKSEQEIGKATAKYFFYSNIMNFFKTEITLANGEIRKRPLIETNGETGEIVWDKGRDFATVRKVLSMPQVNIVKKTEVQTGGFSKESILPKRNSDKLIARKKDWDPKKYGGFDSPTVAYSVLVVAKVEKGKSKKLKSVKELLGITIMERSSFEKNPIDFLEAKGYKEVKKDLIIKLPKYSLFELENGRKRMLASAGELQKGNELALPSKYVNFLYLASHYEKLKGSPEDNEQKQLFVEQHKHYLDEIIEQISEFSKRVILADANLDKVLSAYNKHRDKPIREQAENIIHLFTLTNLGAPAAFKYFDTTIDRKRYTSTKEVLDATLIHQSITGLYETRIDLSQLGGDGGEAAAKGGGGSEAAAKGGWVQEISDSRPMLHIYLNGRRFLGLLNTGADKTCIAGRDWPANWPIHQTESSLQGLGMACGVARSSQPLRWQHEDKSGIIHPFVIPTLPFTLWGRDIMKDIKVRLMTDSPDDSQDLMIGAIESNLFADQISWKSDQPVWLNQWPLKQEKLQALQQLVTEQLQLGHLEESNSPWNTPVFVIKKKSGKWRLLQDLRAVNATMHDMGALQPGLPSPVAVPKGWEIIIIDLQDCFFNIKLHPEDCKRFAFSVPSPNFKRPYQRFQWKVLPQGMKNSPTLCQKFVDKAILTVRDKYQDSYIVHYMDDILLAHPSRSIVDEILTSMIQALNKHGLVVSTEKIQKYDNLKYLGTHIQGDSVSYQKLQIRTDKLRTLNDFQKLLGNINWIRPFLKLTTGELKPLFEILNGDSNPISTRKLTPEACKALQLMNERLSTARVKRLDLSQPWSLCILKTEYTPTACLWQDGVVEWIHLPHISPKVITPYDIFCTQLIIKGRHRSKELFSKDPDYIVVPYTKVQFDLLLQEKEDWPISLLGFLGEVHFHLPKDPLLTFTLQTAIIFPHMTSTTPLEKGIVIFTDGSANGRSVTYIQGREPIIKENTQNTAQQAEIVAVITAFEEVSQPFNLYTDSKYVTGLFPEIETATLSPRTKIYTELKHLQRLIHKRQEKFYIGHIRGHTGLPGPLAQGNAYADSLTRILTAGKRTADGSEFEKRTADGSEFESPKKKAKVE

SEQ ID NO: 3186 - protein, 2108 aa, synthetic construct
MPAAKRVKLDGGDKKYSIGLDIGTNSVGWAVITDEYKVPSKKFKVLGNTDRHSIKKNLIGALLFDSGETAEATRLKRTARRRYTRRKNRICYLQEIFSNEMAKVDDSFFHRLEESFLVEEDKKHERHPIFGNIVDEVAYHEKYPTIYHLRKKLVDSTDKADLRLIYLALAHMIKFRGHFLIEGDLNPDNSDVDKLFIQLVQTYNQLFEENPINASGVDAKAILSARLSKSRRLENLIAQLPGEKKNGLFGNLIALSLGLTPNFKSNFDLAEDAKLQLSKDTYDDDLDNLLAQIGDQYADLFLAAKNLSDAILLSDILRVNTEITKAPLSASMIKRYDEHHQDLTLLKALVRQQLPEKYKEIFFDQSKNGYAGYIDGGASQEEFYKFIKPILEKMDGTEELLVKLNREDLLRKQRTFDNGSIPHQIHLGELHAILRRQEDFYPFLKDNREKIEKILTFRIPYYVGPLARGNSRFAWMTRKSEETITPWNFEEVVDKGASAQSFIERMTNFDKNLPNEKVLPKHSLLYEYFTVYNELTKVKYVTEGMRKPAFLSGEQKKAIVDLLFKTNRKVTVKQLKEDYFKKIECFDSVEISGVEDRFNASLGTYHDLLKIIKDKDFLDNEENEDILEDIVLTLTLFEDREMIEERLKTYAHLFDDKVMKQLKRRRYTGWGRLSRKLINGIRDKQSGKTILDFLKSDGFANRNFMQLIHDDSLTFKEDIQKAQVSGQGDSLHEHIANLAGSPAIKKGILQTVKVVDELVKVMGRHKPENIVIEMARENQTTQKGQKNSRERMKRIEEGIKELGSQILKEHPVENTQLQNEKLYLYYLQNGRDMYVDQELDINRLSDYDVDHIVPQSFLKDDSIDNKVLTRSDKARGKSDNVPSEEVVKKMKNYWRQLLNAKLITQRKFDNLTKAERGGLSELDKAGFIKRQLVETRQITKHVAQILDSRMNTKYDENDKLIREVKVITLKSKLVSDFRKDFQFYKVREINNYHHAHDAYLNAVVGTALIKKYPKLESEFVYGDYKVYDVRKMIAKSEQEIGKATAKYFFYSNIMNFFKTEITLANGEIRKRPLIETNGETGEIVWDKGRDFATVRKVLSMPQVNIVKKTEVQTGGFSKESILPKRNSDKLIARKKDWDPKKYGGFDSPTVAYSVLVVAKVEKGKSKKLKSVKELLGITIMERSSFEKNPIDFLEAKGYKEVKKDLIIKLPKYSLFELENGRKRMLASAGELQKGNELALPSKYVNFLYLASHYEKLKGSPEDNEQKQLFVEQHKHYLDEIIEQISEFSKRVILADANLDKVLSAYNKHRDKPIREQAENIIHLFTLTNLGAPAAFKYFDTTIDRKRYTSTKEVLDATLIHQSITGLYETRIDLSQLGGDGGGGSGGWVQEISDSRPMLHIYLNGRRFLGLLNTGADKTCIAGRDWPANWPIHQTESSLQGLGMACGVARSSQPLRWQHEDKSGIIHPFVIPTLPFTLWGRDIMKDIKVRLMTDSPDDSQDLMIGAIESNLFADQISWKSDQPVWLNQWPLKQEKLQALQQLVTEQLQLGHLEESNSPWNTPVFVIKKKSGKWRLLQDLRAVNATMHDMGALQPGLPSPVAVPKGWEIIIIDLQDCFFNIKLHPEDCKRFAFSVPSPNFKRPYQRFQWKVLPQGMKNSPTLCQKFVDKAILTVRDKYQDSYIVHYMDDILLAHPSRSIVDEILTSMIQALNKHGLVVSTEKIQKYDNLKYLGTHIQGDSVSYQKLQIRTDKLRTLNDFQKLLGNINWIRPFLKLTTGELKPLFEILNGDSNPISTRKLTPEACKALQLMNERLSTARVKRLDLSQPWSLCILKTEYTPTACLWQDGVVEWIHLPHISPKVITPYDIFCTQLIIKGRHRSKELFSKDPDYIVVPYTKVQFDLLLQEKEDWPISLLGFLGEVHFHLPKDPLLTFTLQTAIIFPHMTSTTPLEKGIVIFTDGSANGRSVTYIQGREPIIKENTQNTAQQAEIVAVITAFEEVSQPFNLYTDSKYVTGLFPEIETATLSPRTKIYTELKHLQRLIHKRQEKFYIGHIRGHTGLPGPLAQGNAYADSLTRILTAGKRTADGSEFEKRTADGSEFESPKKKAKVE

SEQ ID NO: 3187 - protein, 2114 aa, synthetic construct
MPAAKRVKLDGGDKKYSIGLDIGTNSVGWAVITDEYKVPSKKFKVLGNTDRHSIKKNLIGALLFDSGETAEATRLKRTARRRYTRRKNRICYLQEIFSNEMAKVDDSFFHRLEESFLVEEDKKHERHPIFGNIVDEVAYHEKYPTIYHLRKKLVDSTDKADLRLIYLALAHMIKFRGHFLIEGDLNPDNSDVDKLFIQLVQTYNQLFEENPINASGVDAKAILSARLSKSRRLENLIAQLPGEKKNGLFGNLIALSLGLTPNFKSNFDLAEDAKLQLSKDTYDDDLDNLLAQIGDQYADLFLAAKNLSDAILLSDILRVNTEITKAPLSASMIKRYDEHHQDLTLLKALVRQQLPEKYKEIFFDQSKNGYAGYIDGGASQEEFYKFIKPILEKMDGTEELLVKLNREDLLRKQRTFDNGSIPHQIHLGELHAILRRQEDFYPFLKDNREKIEKILTFRIPYYVGPLARGNSRFAWMTRKSEETITPWNFEEVVDKGASAQSFIERMTNFDKNLPNEKVLPKHSLLYEYFTVYNELTKVKYVTEGMRKPAFLSGEQKKAIVDLLFKTNRKVTVKQLKEDYFKKIECFDSVEISGVEDRFNASLGTYHDLLKIIKDKDFLDNEENEDILEDIVLTLTLFEDREMIEERLKTYAHLFDDKVMKQLKRRRYTGWGRLSRKLINGIRDKQSGKTILDFLKSDGFANRNFMQLIHDDSLTFKEDIQKAQVSGQGDSLHEHIANLAGSPAIKKGILQTVKVVDELVKVMGRHKPENIVIEMARENQTTQKGQKNSRERMKRIEEGIKELGSQILKEHPVENTQLQNEKLYLYYLQNGRDMYVDQELDINRLSDYDVDHIVPQSFLKDDSIDNKVLTRSDKARGKSDNVPSEEVVKKMKNYWRQLLNAKLITQRKFDNLTKAERGGLSELDKAGFIKRQLVETRQITKHVAQILDSRMNTKYDENDKLIREVKVITLKSKLVSDFRKDFQFYKVREINNYHHAHDAYLNAVVGTALIKKYPKLESEFVYGDYKVYDVRKMIAKSEQEIGKATAKYFFYSNIMNFFKTEITLANGEIRKRPLIETNGETGEIVWDKGRDFATVRKVLSMPQVNIVKKTEVQTGGFSKESILPKRNSDKLIARKKDWDPKKYGGFDSPTVAYSVLVVAKVEKGKSKKLKSVKELLGITIMERSSFEKNPIDFLEAKGYKEVKKDLIIKLPKYSLFELENGRKRMLASAGELQKGNELALPSKYVNFLYLASHYEKLKGSPEDNEQKQLFVEQHKHYLDEIIEQISEFSKRVILADANLDKVLSAYNKHRDKPIREQAENIIHLFTLTNLGAPAAFKYFDTTIDRKRYTSTKEVLDATLIHQSITGLYETRIDLSQLGGDGGGSSPAPGGGGGWVQEISDSRPMLHIYLNGRRFLGLLNTGADKTCIAGRDWPANWPIHQTESSLQGLGMACGVARSSQPLRWQHEDKSGIIHPFVIPTLPFTLWGRDIMKDIKVRLMTDSPDDSQDLMIGAIESNLFADQISWKSDQPVWLNQWPLKQEKLQALQQLVTEQLQLGHLEESNSPWNTPVFVIKKKSGKWRLLQDLRAVNATMHDMGALQPGLPSPVAVPKGWEIIIIDLQDCFFNIKLHPEDCKRFAFSVPSPNFKRPYQRFQWKVLPQGMKNSPTLCQKFVDKAILTVRDKYQDSYIVHYMDDILLAHPSRSIVDEILTSMIQALNKHGLVVSTEKIQKYDNLKYLGTHIQGDSVSYQKLQIRTDKLRTLNDFQKLLGNINWIRPFLKLTTGELKPLFEILNGDSNPISTRKLTPEACKALQLMNERLSTARVKRLDLSQPWSLCILKTEYTPTACLWQDGVVEWIHLPHISPKVITPYDIFCTQLIIKGRHRSKELFSKDPDYIVVPYTKVQFDLLLQEKEDWPISLLGFLGEVHFHLPKDPLLTFTLQTAIIFPHMTSTTPLEKGIVIFTDGSANGRSVTYIQGREPIIKENTQNTAQQAEIVAVITAFEEVSQPFNLYTDSKYVTGLFPEIETATLSPRTKIYTELKHLQRLIHKRQEKFYIGHIRGHTGLPGPLAQGNAYADSLTRILTAGKRTADGSEFEKRTADGSEFESPKKKAKVE

SEQ ID NO: 3188 - protein, 2114 aa, synthetic construct
MPAAKRVKLDGGDKKYSIGLDIGTNSVGWAVITDEYKVPSKKFKVLGNTDRHSIKKNLIGALLFDSGETAEATRLKRTARRRYTRRKNRICYLQEIFSNEMAKVDDSFFHRLEESFLVEEDKKHERHPIFGNIVDEVAYHEKYPTIYHLRKKLVDSTDKADLRLIYLALAHMIKFRGHFLIEGDLNPDNSDVDKLFIQLVQTYNQLFEENPINASGVDAKAILSARLSKSRRLENLIAQLPGEKKNGLFGNLIALSLGLTPNFKSNFDLAEDAKLQLSKDTYDDDLDNLLAQIGDQYADLFLAAKNLSDAILLSDILRVNTEITKAPLSASMIKRYDEHHQDLTLLKALVRQQLPEKYKEIFFDQSKNGYAGYIDGGASQEEFYKFIKPILEKMDGTEELLVKLNREDLLRKQRTFDNGSIPHQIHLGELHAILRRQEDFYPFLKDNREKIEKILTFRIPYYVGPLARGNSRFAWMTRKSEETITPWNFEEVVDKGASAQSFIERMTNFDKNLPNEKVLPKHSLLYEYFTVYNELTKVKYVTEGMRKPAFLSGEQKKAIVDLLFKTNRKVTVKQLKEDYFKKIECFDSVEISGVEDRFNASLGTYHDLLKIIKDKDFLDNEENEDILEDIVLTLTLFEDREMIEERLKTYAHLFDDKVMKQLKRRRYTGWGRLSRKLINGIRDKQSGKTILDFLKSDGFANRNFMQLIHDDSLTFKEDIQKAQVSGQGDSLHEHIANLAGSPAIKKGILQTVKVVDELVKVMGRHKPENIVIEMARENQTTQKGQKNSRERMKRIEEGIKELGSQILKEHPVENTQLQNEKLYLYYLQNGRDMYVDQELDINRLSDYDVDHIVPQSFLKDDSIDNKVLTRSDKARGKSDNVPSEEVVKKMKNYWRQLLNAKLITQRKFDNLTKAERGGLSELDKAGFIKRQLVETRQITKHVAQILDSRMNTKYDENDKLIREVKVITLKSKLVSDFRKDFQFYKVREINNYHHAHDAYLNAVVGTALIKKYPKLESEFVYGDYKVYDVRKMIAKSEQEIGKATAKYFFYSNIMNFFKTEITLANGEIRKRPLIETNGETGEIVWDKGRDFATVRKVLSMPQVNIVKKTEVQTGGFSKESILPKRNSDKLIARKKDWDPKKYGGFDSPTVAYSVLVVAKVEKGKSKKLKSVKELLGITIMERSSFEKNPIDFLEAKGYKEVKKDLIIKLPKYSLFELENGRKRMLASAGELQKGNELALPSKYVNFLYLASHYEKLKGSPEDNEQKQLFVEQHKHYLDEIIEQISEFSKRVILADANLDKVLSAYNKHRDKPIREQAENIIHLFTLTNLGAPAAFKYFDTTIDRKRYTSTKEVLDATLIHQSITGLYETRIDLSQLGGDGGPAPGSSGGGGGWVQEISDSRPMLHIYLNGRRFLGLLNTGADKTCIAGRDWPANWPIHQTESSLQGLGMACGVARSSQPLRWQHEDKSGIIHPFVIPTLPFTLWGRDIMKDIKVRLMTDSPDDSQDLMIGAIESNLFADQISWKSDQPVWLNQWPLKQEKLQALQQLVTEQLQLGHLEESNSPWNTPVFVIKKKSGKWRLLQDLRAVNATMHDMGALQPGLPSPVAVPKGWEIIIIDLQDCFFNIKLHPEDCKRFAFSVPSPNFKRPYQRFQWKVLPQGMKNSPTLCQKFVDKAILTVRDKYQDSYIVHYMDDILLAHPSRSIVDEILTSMIQALNKHGLVVSTEKIQKYDNLKYLGTHIQGDSVSYQKLQIRTDKLRTLNDFQKLLGNINWIRPFLKLTTGELKPLFEILNGDSNPISTRKLTPEACKALQLMNERLSTARVKRLDLSQPWSLCILKTEYTPTACLWQDGVVEWIHLPHISPKVITPYDIFCTQLIIKGRHRSKELFSKDPDYIVVPYTKVQFDLLLQEKEDWPISLLGFLGEVHFHLPKDPLLTFTLQTAIIFPHMTSTTPLEKGIVIFTDGSANGRSVTYIQGREPIIKENTQNTAQQAEIVAVITAFEEVSQPFNLYTDSKYVTGLFPEIETATLSPRTKIYTELKHLQRLIHKRQEKFYIGHIRGHTGLPGPLAQGNAYADSLTRILTAGKRTADGSEFEKRTADGSEFESPKKKAKVE

SEQ ID NO: 3189 - protein, 2116 aa, synthetic construct
MPAAKRVKLDGGDKKYSIGLDIGTNSVGWAVITDEYKVPSKKFKVLGNTDRHSIKKNLIGALLFDSGETAEATRLKRTARRRYTRRKNRICYLQEIFSNEMAKVDDSFFHRLEESFLVEEDKKHERHPIFGNIVDEVAYHEKYPTIYHLRKKLVDSTDKADLRLIYLALAHMIKFRGHFLIEGDLNPDNSDVDKLFIQLVQTYNQLFEENPINASGVDAKAILSARLSKSRRLENLIAQLPGEKKNGLFGNLIALSLGLTPNFKSNFDLAEDAKLQLSKDTYDDDLDNLLAQIGDQYADLFLAAKNLSDAILLSDILRVNTEITKAPLSASMIKRYDEHHQDLTLLKALVRQQLPEKYKEIFFDQSKNGYAGYIDGGASQEEFYKFIKPILEKMDGTEELLVKLNREDLLRKQRTFDNGSIPHQIHLGELHAILRRQEDFYPFLKDNREKIEKILTFRIPYYVGPLARGNSRFAWMTRKSEETITPWNFEEVVDKGASAQSFIERMTNFDKNLPNEKVLPKHSLLYEYFTVYNELTKVKYVTEGMRKPAFLSGEQKKAIVDLLFKTNRKVTVKQLKEDYFKKIECFDSVEISGVEDRFNASLGTYHDLLKIIKDKDFLDNEENEDILEDIVLTLTLFEDREMIEERLKTYAHLFDDKVMKQLKRRRYTGWGRLSRKLINGIRDKQSGKTILDFLKSDGFANRNFMQLIHDDSLTFKEDIQKAQVSGQGDSLHEHIANLAGSPAIKKGILQTVKVVDELVKVMGRHKPENIVIEMARENQTTQKGQKNSRERMKRIEEGIKELGSQILKEHPVENTQLQNEKLYLYYLQNGRDMYVDQELDINRLSDYDVDHIVPQSFLKDDSIDNKVLTRSDKARGKSDNVPSEEVVKKMKNYWRQLLNAKLITQRKFDNLTKAERGGLSELDKAGFIKRQLVETRQITKHVAQILDSRMNTKYDENDKLIREVKVITLKSKLVSDFRKDFQFYKVREINNYHHAHDAYLNAVVGTALIKKYPKLESEFVYGDYKVYDVRKMIAKSEQEIGKATAKYFFYSNIMNFFKTEITLANGEIRKRPLIETNGETGEIVWDKGRDFATVRKVLSMPQVNIVKKTEVQTGGFSKESILPKRNSDKLIARKKDWDPKKYGGFDSPTVAYSVLVVAKVEKGKSKKLKSVKELLGITIMERSSFEKNPIDFLEAKGYKEVKKDLIIKLPKYSLFELENGRKRMLASAGELQKGNELALPSKYVNFLYLASHYEKLKGSPEDNEQKQLFVEQHKHYLDEIIEQISEFSKRVILADANLDKVLSAYNKHRDKPIREQAENIIHLFTLTNLGAPAAFKYFDTTIDRKRYTSTKEVLDATLIHQSITGLYETRIDLSQLGGDGGEAAAKGGSPAPGGWVQEISDSRPMLHIYLNGRRFLGLLNTGADKTCIAGRDWPANWPIHQTESSLQGLGMACGVARSSQPLRWQHEDKSGIIHPFVIPTLPFTLWGRDIMKDIKVRLMTDSPDDSQDLMIGAIESNLFADQISWKSDQPVWLNQWPLKQEKLQALQQLVTEQLQLGHLEESNSPWNTPVFVIKKKSGKWRLLQDLRAVNATMHDMGALQPGLPSPVAVPKGWEIIIIDLQDCFFNIKLHPEDCKRFAFSVPSPNFKRPYQRFQWKVLPQGMKNSPTLCQKFVDKAILTVRDKYQDSYIVHYMDDILLAHPSRSIVDEILTSMIQALNKHGLVVSTEKIQKYDNLKYLGTHIQGDSVSYQKLQIRTDKLRTLNDFQKLLGNINWIRPFLKLTTGELKPLFEILNGDSNPISTRKLTPEACKALQLMNERLSTARVKRLDLSQPWSLCILKTEYTPTACLWQDGVVEWIHLPHISPKVITPYDIFCTQLIIKGRHRSKELFSKDPDYIVVPYTKVQFDLLLQEKEDWPISLLGFLGEVHFHLPKDPLLTFTLQTAIIFPHMTSTTPLEKGIVIFTDGSANGRSVTYIQGREPIIKENTQNTAQQAEIVAVITAFEEVSQPFNLYTDSKYVTGLFPEIETATLSPRTKIYTELKHLQRLIHKRQEKFYIGHIRGHTGLPGPLAQGNAYADSLTRILTAGKRTADGSEFEKRTADGSEFESPKKKAKVE

SEQ ID NO: 3190 - protein, 2114 aa, synthetic construct
MPAAKRVKLDGGDKKYSIGLDIGTNSVGWAVITDEYKVPSKKFKVLGNTDRHSIKKNLIGALLFDSGETAEATRLKRTARRRYTRRKNRICYLQEIFSNEMAKVDDSFFHRLEESFLVEEDKKHERHPIFGNIVDEVAYHEKYPTIYHLRKKLVDSTDKADLRLIYLALAHMIKFRGHFLIEGDLNPDNSDVDKLFIQLVQTYNQLFEENPINASGVDAKAILSARLSKSRRLENLIAQLPGEKKNGLFGNLIALSLGLTPNFKSNFDLAEDAKLQLSKDTYDDDLDNLLAQIGDQYADLFLAAKNLSDAILLSDILRVNTEITKAPLSASMIKRYDEHHQDLTLLKALVRQQLPEKYKEIFFDQSKNGYAGYIDGGASQEEFYKFIKPILEKMDGTEELLVKLNREDLLRKQRTFDNGSIPHQIHLGELHAILRRQEDFYPFLKDNREKIEKILTFRIPYYVGPLARGNSRFAWMTRKSEETITPWNFEEVVDKGASAQSFIERMTNFDKNLPNEKVLPKHSLLYEYFTVYNELTKVKYVTEGMRKPAFLSGEQKKAIVDLLFKTNRKVTVKQLKEDYFKKIECFDSVEISGVEDRFNASLGTYHDLLKIIKDKDFLDNEENEDILEDIVLTLTLFEDREMIEERLKTYAHLFDDKVMKQLKRRRYTGWGRLSRKLINGIRDKQSGKTILDFLKSDGFANRNFMQLIHDDSLTFKEDIQKAQVSGQGDSLHEHIANLAGSPAIKKGILQTVKVVDELVKVMGRHKPENIVIEMARENQTTQKGQKNSRERMKRIEEGIKELGSQILKEHPVENTQLQNEKLYLYYLQNGRDMYVDQELDINRLSDYDVDHIVPQSFLKDDSIDNKVLTRSDKARGKSDNVPSEEVVKKMKNYWRQLLNAKLITQRKFDNLTKAERGGLSELDKAGFIKRQLVETRQITKHVAQILDSRMNTKYDENDKLIREVKVITLKSKLVSDFRKDFQFYKVREINNYHHAHDAYLNAVVGTALIKKYPKLESEFVYGDYKVYDVRKMIAKSEQEIGKATAKYFFYSNIMNFFKTEITLANGEIRKRPLIETNGETGEIVWDKGRDFATVRKVLSMPQVNIVKKTEVQTGGFSKESILPKRNSDKLIARKKDWDPKKYGGFDSPTVAYSVLVVAKVEKGKSKKLKSVKELLGITIMERSSFEKNPIDFLEAKGYKEVKKDLIIKLPKYSLFELENGRKRMLASAGELQKGNELALPSKYVNFLYLASHYEKLKGSPEDNEQKQLFVEQHKHYLDEIIEQISEFSKRVILADANLDKVLSAYNKHRDKPIREQAENIIHLFTLTNLGAPAAFKYFDTTIDRKRYTSTKEVLDATLIHQSITGLYETRIDLSQLGGDGGGSSGGSGGGGGWVQEISDSRPMLHIYLNGRRFLGLLNTGADKTCIAGRDWPANWPIHQTESSLQGLGMACGVARSSQPLRWQHEDKSGIIHPFVIPTLPFTLWGRDIMKDIKVRLMTDSPDDSQDLMIGAIESNLFADQISWKSDQPVWLNQWPLKQEKLQALQQLVTEQLQLGHLEESNSPWNTPVFVIKKKSGKWRLLQDLRAVNATMHDMGALQPGLPSPVAVPKGWEIIIIDLQDCFFNIKLHPEDCKRFAFSVPSPNFKRPYQRFQWKVLPQGMKNSPTLCQKFVDKAILTVRDKYQDSYIVHYMDDILLAHPSRSIVDEILTSMIQALNKHGLVVSTEKIQKYDNLKYLGTHIQGDSVSYQKLQIRTDKLRTLNDFQKLLGNINWIRPFLKLTTGELKPLFEILNGDSNPISTRKLTPEACKALQLMNERLSTARVKRLDLSQPWSLCILKTEYTPTACLWQDGVVEWIHLPHISPKVITPYDIFCTQLIIKGRHRSKELFSKDPDYIVVPYTKVQFDLLLQEKEDWPISLLGFLGEVHFHLPKDPLLTFTLQTAIIFPHMTSTTPLEKGIVIFTDGSANGRSVTYIQGREPIIKENTQNTAQQAEIVAVITAFEEVSQPFNLYTDSKYVTGLFPEIETATLSPRTKIYTELKHLQRLIHKRQEKFYIGHIRGHTGLPGPLAQGNAYADSLTRILTAGKRTADGSEFEKRTADGSEFESPKKKAKVE

SEQ ID NO: 3191 - protein, 2116 aa, synthetic construct
MPAAKRVKLDGGDKKYSIGLDIGTNSVGWAVITDEYKVPSKKFKVLGNTDRHSIKKNLIGALLFDSGETAEATRLKRTARRRYTRRKNRICYLQEIFSNEMAKVDDSFFHRLEESFLVEEDKKHERHPIFGNIVDEVAYHEKYPTIYHLRKKLVDSTDKADLRLIYLALAHMIKFRGHFLIEGDLNPDNSDVDKLFIQLVQTYNQLFEENPINASGVDAKAILSARLSKSRRLENLIAQLPGEKKNGLFGNLIALSLGLTPNFKSNFDLAEDAKLQLSKDTYDDDLDNLLAQIGDQYADLFLAAKNLSDAILLSDILRVNTEITKAPLSASMIKRYDEHHQDLTLLKALVRQQLPEKYKEIFFDQSKNGYAGYIDGGASQEEFYKFIKPILEKMDGTEELLVKLNREDLLRKQRTFDNGSIPHQIHLGELHAILRRQEDFYPFLKDNREKIEKILTFRIPYYVGPLARGNSRFAWMTRKSEETITPWNFEEVVDKGASAQSFIERMTNFDKNLPNEKVLPKHSLLYEYFTVYNELTKVKYVTEGMRKPAFLSGEQKKAIVDLLFKTNRKVTVKQLKEDYFKKIECFDSVEISGVEDRFNASLGTYHDLLKIIKDKDFLDNEENEDILEDIVLTLTLFEDREMIEERLKTYAHLFDDKVMKQLKRRRYTGWGRLSRKLINGIRDKQSGKTILDFLKSDGFANRNFMQLIHDDSLTFKEDIQKAQVSGQGDSLHEHIANLAGSPAIKKGILQTVKVVDELVKVMGRHKPENIVIEMARENQTTQKGQKNSRERMKRIEEGIKELGSQILKEHPVENTQLQNEKLYLYYLQNGRDMYVDQELDINRLSDYDVDHIVPQSFLKDDSIDNKVLTRSDKARGKSDNVPSEEVVKKMKNYWRQLLNAKLITQRKFDNLTKAERGGLSELDKAGFIKRQLVETRQITKHVAQILDSRMNTKYDENDKLIREVKVITLKSKLVSDFRKDFQFYKVREINNYHHAHDAYLNAVVGTALIKKYPKLESEFVYGDYKVYDVRKMIAKSEQEIGKATAKYFFYSNIMNFFKTEITLANGEIRKRPLIETNGETGEIVWDKGRDFATVRKVLSMPQVNIVKKTEVQTGGFSKESILPKRNSDKLIARKKDWDPKKYGGFDSPTVAYSVLVVAKVEKGKSKKLKSVKELLGITIMERSSFEKNPIDFLEAKGYKEVKKDLIIKLPKYSLFELENGRKRMLASAGELQKGNELALPSKYVNFLYLASHYEKLKGSPEDNEQKQLFVEQHKHYLDEIIEQISEFSKRVILADANLDKVLSAYNKHRDKPIREQAENIIHLFTLTNLGAPAAFKYFDTTIDRKRYTSTKEVLDATLIHQSITGLYETRIDLSQLGGDGGGGGEAAAKPAPGGWVQEISDSRPMLHIYLNGRRFLGLLNTGADKTCIAGRDWPANWPIHQTESSLQGLGMACGVARSSQPLRWQHEDKSGIIHPFVIPTLPFTLWGRDIMKDIKVRLMTDSPDDSQDLMIGAIESNLFADQISWKSDQPVWLNQWPLKQEKLQALQQLVTEQLQLGHLEESNSPWNTPVFVIKKKSGKWRLLQDLRAVNATMHDMGALQPGLPSPVAVPKGWEIIIIDLQDCFFNIKLHPEDCKRFAFSVPSPNFKRPYQRFQWKVLPQGMKNSPTLCQKFVDKAILTVRDKYQDSYIVHYMDDILLAHPSRSIVDEILTSMIQALNKHGLVVSTEKIQKYDNLKYLGTHIQGDSVSYQKLQIRTDKLRTLNDFQKLLGNINWIRPFLKLTTGELKPLFEILNGDSNPISTRKLTPEACKALQLMNERLSTARVKRLDLSQPWSLCILKTEYTPTACLWQDGVVEWIHLPHISPKVITPYDIFCTQLIIKGRHRSKELFSKDPDYIVVPYTKVQFDLLLQEKEDWPISLLGFLGEVHFHLPKDPLLTFTLQTAIIFPHMTSTTPLEKGIVIFTDGSANGRSVTYIQGREPIIKENTQNTAQQAEIVAVITAFEEVSQPFNLYTDSKYVTGLFPEIETATLSPRTKIYTELKHLQRLIHKRQEKFYIGHIRGHTGLPGPLAQGNAYADSLTRILTAGKRTADGSEFEKRTADGSEFESPKKKAKVE

SEQ ID NO: 3192 - protein, 2116 aa, synthetic construct
MPAAKRVKLDGGDKKYSIGLDIGTNSVGWAVITDEYKVPSKKFKVLGNTDRHSIKKNLIGALLFDSGETAEATRLKRTARRRYTRRKNRICYLQEIFSNEMAKVDDSFFHRLEESFLVEEDKKHERHPIFGNIVDEVAYHEKYPTIYHLRKKLVDSTDKADLRLIYLALAHMIKFRGHFLIEGDLNPDNSDVDKLFIQLVQTYNQLFEENPINASGVDAKAILSARLSKSRRLENLIAQLPGEKKNGLFGNLIALSLGLTPNFKSNFDLAEDAKLQLSKDTYDDDLDNLLAQIGDQYADLFLAAKNLSDAILLSDILRVNTEITKAPLSASMIKRYDEHHQDLTLLKALVRQQLPEKYKEIFFDQSKNGYAGYIDGGASQEEFYKFIKPILEKMDGTEELLVKLNREDLLRKQRTFDNGSIPHQIHLGELHAILRRQEDFYPFLKDNREKIEKILTFRIPYYVGPLARGNSRFAWMTRKSEETITPWNFEEVVDKGASAQSFIERMTNFDKNLPNEKVLPKHSLLYEYFTVYNELTKVKYVTEGMRKPAFLSGEQKKAIVDLLFKTNRKVTVKQLKEDYFKKIECFDSVEISGVEDRFNASLGTYHDLLKIIKDKDFLDNEENEDILEDIVLTLTLFEDREMIEERLKTYAHLFDDKVMKQLKRRRYTGWGRLSRKLINGIRDKQSGKTILDFLKSDGFANRNFMQLIHDDSLTFKEDIQKAQVSGQGDSLHEHIANLAGSPAIKKGILQTVKVVDELVKVMGRHKPENIVIEMARENQTTQKGQKNSRERMKRIEEGIKELGSQILKEHPVENTQLQNEKLYLYYLQNGRDMYVDQELDINRLSDYDVDHIVPQSFLKDDSIDNKVLTRSDKARGKSDNVPSEEVVKKMKNYWRQLLNAKLITQRKFDNLTKAERGGLSELDKAGFIKRQLVETRQITKHVAQILDSRMNTKYDENDKLIREVKVITLKSKLVSDFRKDFQFYKVREINNYHHAHDAYLNAVVGTALIKKYPKLESEFVYGDYKVYDVRKMIAKSEQEIGKATAKYFFYSNIMNFFKTEITLANGEIRKRPLIETNGETGEIVWDKGRDFATVRKVLSMPQVNIVKKTEVQTGGFSKESILPKRNSDKLIARKKDWDPKKYGGFDSPTVAYSVLVVAKVEKGKSKKLKSVKELLGITIMERSSFEKNPIDFLEAKGYKEVKKDLIIKLPKYSLFELENGRKRMLASAGELQKGNELALPSKYVNFLYLASHYEKLKGSPEDNEQKQLFVEQHKHYLDEIIEQISEFSKRVILADANLDKVLSAYNKHRDKPIREQAENIIHLFTLTNLGAPAAFKYFDTTIDRKRYTSTKEVLDATLIHQSITGLYETRIDLSQLGGDGGGSSEAAAKGGSGGWVQEISDSRPMLHIYLNGRRFLGLLNTGADKTCIAGRDWPANWPIHQTESSLQGLGMACGVARSSQPLRWQHEDKSGIIHPFVIPTLPFTLWGRDIMKDIKVRLMTDSPDDSQDLMIGAIESNLFADQISWKSDQPVWLNQWPLKQEKLQALQQLVTEQLQLGHLEESNSPWNTPVFVIKKKSGKWRLLQDLRAVNATMHDMGALQPGLPSPVAVPKGWEIIIIDLQDCFFNIKLHPEDCKRFAFSVPSPNFKRPYQRFQWKVLPQGMKNSPTLCQKFVDKAILTVRDKYQDSYIVHYMDDILLAHPSRSIVDEILTSMIQALNKHGLVVSTEKIQKYDNLKYLGTHIQGDSVSYQKLQIRTDKLRTLNDFQKLLGNINWIRPFLKLTTGELKPLFEILNGDSNPISTRKLTPEACKALQLMNERLSTARVKRLDLSQPWSLCILKTEYTPTACLWQDGVVEWIHLPHISPKVITPYDIFCTQLIIKGRHRSKELFSKDPDYIVVPYTKVQFDLLLQEKEDWPISLLGFLGEVHFHLPKDPLLTFTLQTAIIFPHMTSTTPLEKGIVIFTDGSANGRSVTYIQGREPIIKENTQNTAQQAEIVAVITAFEEVSQPFNLYTDSKYVTGLFPEIETATLSPRTKIYTELKHLQRLIHKRQEKFYIGHIRGHTGLPGPLAQGNAYADSLTRILTAGKRTADGSEFEKRTADGSEFESPKKKAKVE

SEQ ID NO: 3193 - protein, 2125 aa, synthetic construct
MPAAKRVKLDGGDKKYSIGLDIGTNSVGWAVITDEYKVPSKKFKVLGNTDRHSIKKNLIGALLFDSGETAEATRLKRTARRRYTRRKNRICYLQEIFSNEMAKVDDSFFHRLEESFLVEEDKKHERHPIFGNIVDEVAYHEKYPTIYHLRKKLVDSTDKADLRLIYLALAHMIKFRGHFLIEGDLNPDNSDVDKLFIQLVQTYNQLFEENPINASGVDAKAILSARLSKSRRLENLIAQLPGEKKNGLFGNLIALSLGLTPNFKSNFDLAEDAKLQLSKDTYDDDLDNLLAQIGDQYADLFLAAKNLSDAILLSDILRVNTEITKAPLSASMIKRYDEHHQDLTLLKALVRQQLPEKYKEIFFDQSKNGYAGYIDGGASQEEFYKFIKPILEKMDGTEELLVKLNREDLLRKQRTFDNGSIPHQIHLGELHAILRRQEDFYPFLKDNREKIEKILTFRIPYYVGPLARGNSRFAWMTRKSEETITPWNFEEVVDKGASAQSFIERMTNFDKNLPNEKVLPKHSLLYEYFTVYNELTKVKYVTEGMRKPAFLSGEQKKAIVDLLFKTNRKVTVKQLKEDYFKKIECFDSVEISGVEDRFNASLGTYHDLLKIIKDKDFLDNEENEDILEDIVLTLTLFEDREMIEERLKTYAHLFDDKVMKQLKRRRYTGWGRLSRKLINGIRDKQSGKTILDFLKSDGFANRNFMQLIHDDSLTFKEDIQKAQVSGQGDSLHEHIANLAGSPAIKKGILQTVKVVDELVKVMGRHKPENIVIEMARENQTTQKGQKNSRERMKRIEEGIKELGSQILKEHPVENTQLQNEKLYLYYLQNGRDMYVDQELDINRLSDYDVDHIVPQSFLKDDSIDNKVLTRSDKARGKSDNVPSEEVVKKMKNYWRQLLNAKLITQRKFDNLTKAERGGLSELDKAGFIKRQLVETRQITKHVAQILDSRMNTKYDENDKLIREVKVITLKSKLVSDFRKDFQFYKVREINNYHHAHDAYLNAVVGTALIKKYPKLESEFVYGDYKVYDVRKMIAKSEQEIGKATAKYFFYSNIMNFFKTEITLANGEIRKRPLIETNGETGEIVWDKGRDFATVRKVLSMPQVNIVKKTEVQTGGFSKESILPKRNSDKLIARKKDWDPKKYGGFDSPTVAYSVLVVAKVEKGKSKKLKSVKELLGITIMERSSFEKNPIDFLEAKGYKEVKKDLIIKLPKYSLFELENGRKRMLASAGELQKGNELALPSKYVNFLYLASHYEKLKGSPEDNEQKQLFVEQHKHYLDEIIEQISEFSKRVILADANLDKVLSAYNKHRDKPIREQAENIIHLFTLTNLGAPAAFKYFDTTIDRKRYTSTKEVLDATLIHQSITGLYETRIDLSQLGGDGGGGGGSGGGGSGGGGSGGGGSGGWVQEISDSRPMLHIYLNGRRFLGLLNTGADKTCIAGRDWPANWPIHQTESSLQGLGMACGVARSSQPLRWQHEDKSGIIHPFVIPTLPFTLWGRDIMKDIKVRLMTDSPDDSQDLMIGAIESNLFADQISWKSDQPVWLNQWPLKQEKLQALQQLVTEQLQLGHLEESNSPWNTPVFVIKKKSGKWRLLQDLRAVNATMHDMGALQPGLPSPVAVPKGWEIIIIDLQDCFFNIKLHPEDCKRFAFSVPSPNFKRPYQRFQWKVLPQGMKNSPTLCQKFVDKAILTVRDKYQDSYIVHYMDDILLAHPSRSIVDEILTSMIQALNKHGLVVSTEKIQKYDNLKYLGTHIQGDSVSYQKLQIRTDKLRTLNDFQKLLGNINWIRPFLKLTTGELKPLFEILNGDSNPISTRKLTPEACKALQLMNERLSTARVKRLDLSQPWSLCILKTEYTPTACLWQDGVVEWIHLPHISPKVITPYDIFCTQLIIKGRHRSKELFSKDPDYIVVPYTKVQFDLLLQEKEDWPISLLGFLGEVHFHLPKDPLLTFTLQTAIIFPHMTSTTPLEKGIVIFTDGSANGRSVTYIQGREPIIKENTQNTAQQAEIVAVITAFEEVSQPFNLYTDSKYVTGLFPEIETATLSPRTKIYTELKHLQRLIHKRQEKFYIGHIRGHTGLPGPLAQGNAYADSLTRILTAGKRTADGSEFEKRTADGSEFESPKKKAKVE

SEQ ID NO: 3194 - protein, 2115 aa, synthetic construct
MPAAKRVKLDGGDKKYSIGLDIGTNSVGWAVITDEYKVPSKKFKVLGNTDRHSIKKNLIGALLFDSGETAEATRLKRTARRRYTRRKNRICYLQEIFSNEMAKVDDSFFHRLEESFLVEEDKKHERHPIFGNIVDEVAYHEKYPTIYHLRKKLVDSTDKADLRLIYLALAHMIKFRGHFLIEGDLNPDNSDVDKLFIQLVQTYNQLFEENPINASGVDAKAILSARLSKSRRLENLIAQLPGEKKNGLFGNLIALSLGLTPNFKSNFDLAEDAKLQLSKDTYDDDLDNLLAQIGDQYADLFLAAKNLSDAILLSDILRVNTEITKAPLSASMIKRYDEHHQDLTLLKALVRQQLPEKYKEIFFDQSKNGYAGYIDGGASQEEFYKFIKPILEKMDGTEELLVKLNREDLLRKQRTFDNGSIPHQIHLGELHAILRRQEDFYPFLKDNREKIEKILTFRIPYYVGPLARGNSRFAWMTRKSEETITPWNFEEVVDKGASAQSFIERMTNFDKNLPNEKVLPKHSLLYEYFTVYNELTKVKYVTEGMRKPAFLSGEQKKAIVDLLFKTNRKVTVKQLKEDYFKKIECFDSVEISGVEDRFNASLGTYHDLLKIIKDKDFLDNEENEDILEDIVLTLTLFEDREMIEERLKTYAHLFDDKVMKQLKRRRYTGWGRLSRKLINGIRDKQSGKTILDFLKSDGFANRNFMQLIHDDSLTFKEDIQKAQVSGQGDSLHEHIANLAGSPAIKKGILQTVKVVDELVKVMGRHKPENIVIEMARENQTTQKGQKNSRERMKRIEEGIKELGSQILKEHPVENTQLQNEKLYLYYLQNGRDMYVDQELDINRLSDYDVDHIVPQSFLKDDSIDNKVLTRSDKARGKSDNVPSEEVVKKMKNYWRQLLNAKLITQRKFDNLTKAERGGLSELDKAGFIKRQLVETRQITKHVAQILDSRMNTKYDENDKLIREVKVITLKSKLVSDFRKDFQFYKVREINNYHHAHDAYLNAVVGTALIKKYPKLESEFVYGDYKVYDVRKMIAKSEQEIGKATAKYFFYSNIMNFFKTEITLANGEIRKRPLIETNGETGEIVWDKGRDFATVRKVLSMPQVNIVKKTEVQTGGFSKESILPKRNSDKLIARKKDWDPKKYGGFDSPTVAYSVLVVAKVEKGKSKKLKSVKELLGITIMERSSFEKNPIDFLEAKGYKEVKKDLIIKLPKYSLFELENGRKRMLASAGELQKGNELALPSKYVNFLYLASHYEKLKGSPEDNEQKQLFVEQHKHYLDEIIEQISEFSKRVILADANLDKVLSAYNKHRDKPIREQAENIIHLFTLTNLGAPAAFKYFDTTIDRKRYTSTKEVLDATLIHQSITGLYETRIDLSQLGGDGGGGGGSGGGGSGGWVQEISDSRPMLHIYLNGRRFLGLLNTGADKTCIAGRDWPANWPIHQTESSLQGLGMACGVARSSQPLRWQHEDKSGIIHPFVIPTLPFTLWGRDIMKDIKVRLMTDSPDDSQDLMIGAIESNLFADQISWKSDQPVWLNQWPLKQEKLQALQQLVTEQLQLGHLEESNSPWNTPVFVIKKKSGKWRLLQDLRAVNATMHDMGALQPGLPSPVAVPKGWEIIIIDLQDCFFNIKLHPEDCKRFAFSVPSPNFKRPYQRFQWKVLPQGMKNSPTLCQKFVDKAILTVRDKYQDSYIVHYMDDILLAHPSRSIVDEILTSMIQALNKHGLVVSTEKIQKYDNLKYLGTHIQGDSVSYQKLQIRTDKLRTLNDFQKLLGNINWIRPFLKLTTGELKPLFEILNGDSNPISTRKLTPEACKALQLMNERLSTARVKRLDLSQPWSLCILKTEYTPTACLWQDGVVEWIHLPHISPKVITPYDIFCTQLIIKGRHRSKELFSKDPDYIVVPYTKVQFDLLLQEKEDWPISLLGFLGEVHFHLPKDPLLTFTLQTAIIFPHMTSTTPLEKGIVIFTDGSANGRSVTYIQGREPIIKENTQNTAQQAEIVAVITAFEEVSQPFNLYTDSKYVTGLFPEIETATLSPRTKIYTELKHLQRLIHKRQEKFYIGHIRGHTGLPGPLAQGNAYADSLTRILTAGKRTADGSEFEKRTADGSEFESPKKKAKVE

SEQ ID NO: 3195 - protein, 2114 aa, synthetic construct
MPAAKRVKLDGGDKKYSIGLDIGTNSVGWAVITDEYKVPSKKFKVLGNTDRHSIKKNLIGALLFDSGETAEATRLKRTARRRYTRRKNRICYLQEIFSNEMAKVDDSFFHRLEESFLVEEDKKHERHPIFGNIVDEVAYHEKYPTIYHLRKKLVDSTDKADLRLIYLALAHMIKFRGHFLIEGDLNPDNSDVDKLFIQLVQTYNQLFEENPINASGVDAKAILSARLSKSRRLENLIAQLPGEKKNGLFGNLIALSLGLTPNFKSNFDLAEDAKLQLSKDTYDDDLDNLLAQIGDQYADLFLAAKNLSDAILLSDILRVNTEITKAPLSASMIKRYDEHHQDLTLLKALVRQQLPEKYKEIFFDQSKNGYAGYIDGGASQEEFYKFIKPILEKMDGTEELLVKLNREDLLRKQRTFDNGSIPHQIHLGELHAILRRQEDFYPFLKDNREKIEKILTFRIPYYVGPLARGNSRFAWMTRKSEETITPWNFEEVVDKGASAQSFIERMTNFDKNLPNEKVLPKHSLLYEYFTVYNELTKVKYVTEGMRKPAFLSGEQKKAIVDLLFKTNRKVTVKQLKEDYFKKIECFDSVEISGVEDRFNASLGTYHDLLKIIKDKDFLDNEENEDILEDIVLTLTLFEDREMIEERLKTYAHLFDDKVMKQLKRRRYTGWGRLSRKLINGIRDKQSGKTILDFLKSDGFANRNFMQLIHDDSLTFKEDIQKAQVSGQGDSLHEHIANLAGSPAIKKGILQTVKVVDELVKVMGRHKPENIVIEMARENQTTQKGQKNSRERMKRIEEGIKELGSQILKEHPVENTQLQNEKLYLYYLQNGRDMYVDQELDINRLSDYDVDHIVPQSFLKDDSIDNKVLTRSDKARGKSDNVPSEEVVKKMKNYWRQLLNAKLITQRKFDNLTKAERGGLSELDKAGFIKRQLVETRQITKHVAQILDSRMNTKYDENDKLIREVKVITLKSKLVSDFRKDFQFYKVREINNYHHAHDAYLNAVVGTALIKKYPKLESEFVYGDYKVYDVRKMIAKSEQEIGKATAKYFFYSNIMNFFKTEITLANGEIRKRPLIETNGETGEIVWDKGRDFATVRKVLSMPQVNIVKKTEVQTGGFSKESILPKRNSDKLIARKKDWDPKKYGGFDSPTVAYSVLVVAKVEKGKSKKLKSVKELLGITIMERSSFEKNPIDFLEAKGYKEVKKDLIIKLPKYSLFELENGRKRMLASAGELQKGNELALPSKYVNFLYLASHYEKLKGSPEDNEQKQLFVEQHKHYLDEIIEQISEFSKRVILADANLDKVLSAYNKHRDKPIREQAENIIHLFTLTNLGAPAAFKYFDTTIDRKRYTSTKEVLDATLIHQSITGLYETRIDLSQLGGDGGPAPGGGGSSGGWVQEISDSRPMLHIYLNGRRFLGLLNTGADKTCIAGRDWPANWPIHQTESSLQGLGMACGVARSSQPLRWQHEDKSGIIHPFVIPTLPFTLWGRDIMKDIKVRLMTDSPDDSQDLMIGAIESNLFADQISWKSDQPVWLNQWPLKQEKLQALQQLVTEQLQLGHLEESNSPWNTPVFVIKKKSGKWRLLQDLRAVNATMHDMGALQPGLPSPVAVPKGWEIIIIDLQDCFFNIKLHPEDCKRFAFSVPSPNFKRPYQRFQWKVLPQGMKNSPTLCQKFVDKAILTVRDKYQDSYIVHYMDDILLAHPSRSIVDEILTSMIQALNKHGLVVSTEKIQKYDNLKYLGTHIQGDSVSYQKLQIRTDKLRTLNDFQKLLGNINWIRPFLKLTTGELKPLFEILNGDSNPISTRKLTPEACKALQLMNERLSTARVKRLDLSQPWSLCILKTEYTPTACLWQDGVVEWIHLPHISPKVITPYDIFCTQLIIKGRHRSKELFSKDPDYIVVPYTKVQFDLLLQEKEDWPISLLGFLGEVHFHLPKDPLLTFTLQTAIIFPHMTSTTPLEKGIVIFTDGSANGRSVTYIQGREPIIKENTQNTAQQAEIVAVITAFEEVSQPFNLYTDSKYVTGLFPEIETATLSPRTKIYTELKHLQRLIHKRQEKFYIGHIRGHTGLPGPLAQGNAYADSLTRILTAGKRTADGSEFEKRTADGSEFESPKKKAKVE

SEQ ID NO: 3196 - protein, 2024 aa, synthetic construct
MPAAKRVKLDGGDKKYSIGLDIGTNSVGWAVITDEYKVPSKKFKVLGNTDRHSIKKNLIGALLFDSGETAEATRLKRTARRRYTRRKNRICYLQEIFSNEMAKVDDSFFHRLEESFLVEEDKKHERHPIFGNIVDEVAYHEKYPTIYHLRKKLVDSTDKADLRLIYLALAHMIKFRGHFLIEGDLNPDNSDVDKLFIQLVQTYNQLFEENPINASGVDAKAILSARLSKSRRLENLIAQLPGEKKNGLFGNLIALSLGLTPNFKSNFDLAEDAKLQLSKDTYDDDLDNLLAQIGDQYADLFLAAKNLSDAILLSDILRVNTEITKAPLSASMIKRYDEHHQDLTLLKALVRQQLPEKYKEIFFDQSKNGYAGYIDGGASQEEFYKFIKPILEKMDGTEELLVKLNREDLLRKQRTFDNGSIPHQIHLGELHAILRRQEDFYPFLKDNREKIEKILTFRIPYYVGPLARGNSRFAWMTRKSEETITPWNFEEVVDKGASAQSFIERMTNFDKNLPNEKVLPKHSLLYEYFTVYNELTKVKYVTEGMRKPAFLSGEQKKAIVDLLFKTNRKVTVKQLKEDYFKKIECFDSVEISGVEDRFNASLGTYHDLLKIIKDKDFLDNEENEDILEDIVLTLTLFEDREMIEERLKTYAHLFDDKVMKQLKRRRYTGWGRLSRKLINGIRDKQSGKTILDFLKSDGFANRNFMQLIHDDSLTFKEDIQKAQVSGQGDSLHEHIANLAGSPAIKKGILQTVKVVDELVKVMGRHKPENIVIEMARENQTTQKGQKNSRERMKRIEEGIKELGSQILKEHPVENTQLQNEKLYLYYLQNGRDMYVDQELDINRLSDYDVDHIVPQSFLKDDSIDNKVLTRSDKARGKSDNVPSEEVVKKMKNYWRQLLNAKLITQRKFDNLTKAERGGLSELDKAGFIKRQLVETRQITKHVAQILDSRMNTKYDENDKLIREVKVITLKSKLVSDFRKDFQFYKVREINNYHHAHDAYLNAVVGTALIKKYPKLESEFVYGDYKVYDVRKMIAKSEQEIGKATAKYFFYSNIMNFFKTEITLANGEIRKRPLIETNGETGEIVWDKGRDFATVRKVLSMPQVNIVKKTEVQTGGFSKESILPKRNSDKLIARKKDWDPKKYGGFDSPTVAYSVLVVAKVEKGKSKKLKSVKELLGITIMERSSFEKNPIDFLEAKGYKEVKKDLIIKLPKYSLFELENGRKRMLASAGELQKGNELALPSKYVNFLYLASHYEKLKGSPEDNEQKQLFVEQHKHYLDEIIEQISEFSKRVILADANLDKVLSAYNKHRDKPIREQAENIIHLFTLTNLGAPAAFKYFDTTIDRKRYTSTKEVLDATLIHQSITGLYETRIDLSQLGGDGGGGGPAPEAAAKGGGRDIMKDIKVRLMTDSPDDSQDLMIGAIESNLFADQISWKSDQPVWLNQWPLKQEKLQALQQLVTEQLQLGHLEESNSPWNTPVFVIKKKSGKWRLLQDLRAVNATMHDMGALQPGLPSPVAVPKGWEIIIIDLQDCFFNIKLHPEDCKRFAFSVPSPNFKRPYQRFQWKVLPQGMKNSPTLCQKFVDKAILTVRDKYQDSYIVHYMDDILLAHPSRSIVDEILTSMIQALNKHGLVVSTEKIQKYDNLKYLGTHIQGDSVSYQKLQIRTDKLRTLNDFQKLLGNINWIRPFLKLTTGELKPLFEILNGDSNPISTRKLTPEACKALQLMNERLSTARVKRLDLSQPWSLCILKTEYTPTACLWQDGVVEWIHLPHISPKVITPYDIFCTQLIIKGRHRSKELFSKDPDYIVVPYTKVQFDLLLQEKEDWPISLLGFLGEVHFHLPKDPLLTFTLQTAIIFPHMTSTTPLEKGIVIFTDGSANGRSVTYIQGREPIIKENTQNTAQQAEIVAVITAFEEVSQPFNLYTDSKYVTGLFPEIETATLSPRTKIYTELKHLQRLIHKRQEKFYIGHIRGHTGLPGPLAQGNAYADSLTRILTAGKRTADGSEFEKRTADGSEFESPKKKAKVE

SEQ ID NO: 3197 - protein, 2059 aa, synthetic construct
MPAAKRVKLDGGDKKYSIGLDIGTNSVGWAVITDEYKVPSKKFKVLGNTDRHSIKKNLIGALLFDSGETAEATRLKRTARRRYTRRKNRICYLQEIFSNEMAKVDDSFFHRLEESFLVEEDKKHERHPIFGNIVDEVAYHEKYPTIYHLRKKLVDSTDKADLRLIYLALAHMIKFRGHFLIEGDLNPDNSDVDKLFIQLVQTYNQLFEENPINASGVDAKAILSARLSKSRRLENLIAQLPGEKKNGLFGNLIALSLGLTPNFKSNFDLAEDAKLQLSKDTYDDDLDNLLAQIGDQYADLFLAAKNLSDAILLSDILRVNTEITKAPLSASMIKRYDEHHQDLTLLKALVRQQLPEKYKEIFFDQSKNGYAGYIDGGASQEEFYKFIKPILEKMDGTEELLVKLNREDLLRKQRTFDNGSIPHQIHLGELHAILRRQEDFYPFLKDNREKIEKILTFRIPYYVGPLARGNSRFAWMTRKSEETITPWNFEEVVDKGASAQSFIERMTNFDKNLPNEKVLPKHSLLYEYFTVYNELTKVKYVTEGMRKPAFLSGEQKKAIVDLLFKTNRKVTVKQLKEDYFKKIECFDSVEISGVEDRFNASLGTYHDLLKIIKDKDFLDNEENEDILEDIVLTLTLFEDREMIEERLKTYAHLFDDKVMKQLKRRRYTGWGRLSRKLINGIRDKQSGKTILDFLKSDGFANRNFMQLIHDDSLTFKEDIQKAQVSGQGDSLHEHIANLAGSPAIKKGILQTVKVVDELVKVMGRHKPENIVIEMARENQTTQKGQKNSRERMKRIEEGIKELGSQILKEHPVENTQLQNEKLYLYYLQNGRDMYVDQELDINRLSDYDVDHIVPQSFLKDDSIDNKVLTRSDKARGKSDNVPSEEVVKKMKNYWRQLLNAKLITQRKFDNLTKAERGGLSELDKAGFIKRQLVETRQITKHVAQILDSRMNTKYDENDKLIREVKVITLKSKLVSDFRKDFQFYKVREINNYHHAHDAYLNAVVGTALIKKYPKLESEFVYGDYKVYDVRKMIAKSEQEIGKATAKYFFYSNIMNFFKTEITLANGEIRKRPLIETNGETGEIVWDKGRDFATVRKVLSMPQVNIVKKTEVQTGGFSKESILPKRNSDKLIARKKDWDPKKYGGFDSPTVAYSVLVVAKVEKGKSKKLKSVKELLGITIMERSSFEKNPIDFLEAKGYKEVKKDLIIKLPKYSLFELENGRKRMLASAGELQKGNELALPSKYVNFLYLASHYEKLKGSPEDNEQKQLFVEQHKHYLDEIIEQISEFSKRVILADANLDKVLSAYNKHRDKPIREQAENIIHLFTLTNLGAPAAFKYFDTTIDRKRYTSTKEVLDATLIHQSITGLYETRIDLSQLGGDGGAEAAAKEAAAKEAAAKEAAAKALEAEAAAKEAAAKEAAAKEAAAKAGGGRDIMKDIKVRLMTDSPDDSQDLMIGAIESNLFADQISWKSDQPVWLNQWPLKQEKLQALQQLVTEQLQLGHLEESNSPWNTPVFVIKKKSGKWRLLQDLRAVNATMHDMGALQPGLPSPVAVPKGWEIIIIDLQDCFFNIKLHPEDCKRFAFSVPSPNFKRPYQRFQWKVLPQGMKNSPTLCQKFVDKAILTVRDKYQDSYIVHYMDDILLAHPSRSIVDEILTSMIQALNKHGLVVSTEKIQKYDNLKYLGTHIQGDSVSYQKLQIRTDKLRTLNDFQKLLGNINWIRPFLKLTTGELKPLFEILNGDSNPISTRKLTPEACKALQLMNERLSTARVKRLDLSQPWSLCILKTEYTPTACLWQDGVVEWIHLPHISPKVITPYDIFCTQLIIKGRHRSKELFSKDPDYIVVPYTKVQFDLLLQEKEDWPISLLGFLGEVHFHLPKDPLLTFTLQTAIIFPHMTSTTPLEKGIVIFTDGSANGRSVTYIQGREPIIKENTQNTAQQAEIVAVITAFEEVSQPFNLYTDSKYVTGLFPEIETATLSPRTKIYTELKHLQRLIHKRQEKFYIGHIRGHTGLPGPLAQGNAYADSLTRILTAGKRTADGSEFEKRTADGSEFESPKKKAKVE

SEQ ID NO: 3198 - protein, 2024 aa, synthetic construct
MPAAKRVKLDGGDKKYSIGLDIGTNSVGWAVITDEYKVPSKKFKVLGNTDRHSIKKNLIGALLFDSGETAEATRLKRTARRRYTRRKNRICYLQEIFSNEMAKVDDSFFHRLEESFLVEEDKKHERHPIFGNIVDEVAYHEKYPTIYHLRKKLVDSTDKADLRLIYLALAHMIKFRGHFLIEGDLNPDNSDVDKLFIQLVQTYNQLFEENPINASGVDAKAILSARLSKSRRLENLIAQLPGEKKNGLFGNLIALSLGLTPNFKSNFDLAEDAKLQLSKDTYDDDLDNLLAQIGDQYADLFLAAKNLSDAILLSDILRVNTEITKAPLSASMIKRYDEHHQDLTLLKALVRQQLPEKYKEIFFDQSKNGYAGYIDGGASQEEFYKFIKPILEKMDGTEELLVKLNREDLLRKQRTFDNGSIPHQIHLGELHAILRRQEDFYPFLKDNREKIEKILTFRIPYYVGPLARGNSRFAWMTRKSEETITPWNFEEVVDKGASAQSFIERMTNFDKNLPNEKVLPKHSLLYEYFTVYNELTKVKYVTEGMRKPAFLSGEQKKAIVDLLFKTNRKVTVKQLKEDYFKKIECFDSVEISGVEDRFNASLGTYHDLLKIIKDKDFLDNEENEDILEDIVLTLTLFEDREMIEERLKTYAHLFDDKVMKQLKRRRYTGWGRLSRKLINGIRDKQSGKTILDFLKSDGFANRNFMQLIHDDSLTFKEDIQKAQVSGQGDSLHEHIANLAGSPAIKKGILQTVKVVDELVKVMGRHKPENIVIEMARENQTTQKGQKNSRERMKRIEEGIKELGSQILKEHPVENTQLQNEKLYLYYLQNGRDMYVDQELDINRLSDYDVDHIVPQSFLKDDSIDNKVLTRSDKARGKSDNVPSEEVVKKMKNYWRQLLNAKLITQRKFDNLTKAERGGLSELDKAGFIKRQLVETRQITKHVAQILDSRMNTKYDENDKLIREVKVITLKSKLVSDFRKDFQFYKVREINNYHHAHDAYLNAVVGTALIKKYPKLESEFVYGDYKVYDVRKMIAKSEQEIGKATAKYFFYSNIMNFFKTEITLANGEIRKRPLIETNGETGEIVWDKGRDFATVRKVLSMPQVNIVKKTEVQTGGFSKESILPKRNSDKLIARKKDWDPKKYGGFDSPTVAYSVLVVAKVEKGKSKKLKSVKELLGITIMERSSFEKNPIDFLEAKGYKEVKKDLIIKLPKYSLFELENGRKRMLASAGELQKGNELALPSKYVNFLYLASHYEKLKGSPEDNEQKQLFVEQHKHYLDEIIEQISEFSKRVILADANLDKVLSAYNKHRDKPIREQAENIIHLFTLTNLGAPAAFKYFDTTIDRKRYTSTKEVLDATLIHQSITGLYETRIDLSQLGGDGGPAPGSSEAAAKGGGRDIMKDIKVRLMTDSPDDSQDLMIGAIESNLFADQISWKSDQPVWLNQWPLKQEKLQALQQLVTEQLQLGHLEESNSPWNTPVFVIKKKSGKWRLLQDLRAVNATMHDMGALQPGLPSPVAVPKGWEIIIIDLQDCFFNIKLHPEDCKRFAFSVPSPNFKRPYQRFQWKVLPQGMKNSPTLCQKFVDKAILTVRDKYQDSYIVHYMDDILLAHPSRSIVDEILTSMIQALNKHGLVVSTEKIQKYDNLKYLGTHIQGDSVSYQKLQIRTDKLRTLNDFQKLLGNINWIRPFLKLTTGELKPLFEILNGDSNPISTRKLTPEACKALQLMNERLSTARVKRLDLSQPWSLCILKTEYTPTACLWQDGVVEWIHLPHISPKVITPYDIFCTQLIIKGRHRSKELFSKDPDYIVVPYTKVQFDLLLQEKEDWPISLLGFLGEVHFHLPKDPLLTFTLQTAIIFPHMTSTTPLEKGIVIFTDGSANGRSVTYIQGREPIIKENTQNTAQQAEIVAVITAFEEVSQPFNLYTDSKYVTGLFPEIETATLSPRTKIYTELKHLQRLIHKRQEKFYIGHIRGHTGLPGPLAQGNAYADSLTRILTAGKRTADGSEFEKRTADGSEFESPKKKAKVE

SEQ ID NO: 3199 - protein, 2022 aa, synthetic construct
MPAAKRVKLDGGDKKYSIGLDIGTNSVGWAVITDEYKVPSKKFKVLGNTDRHSIKKNLIGALLFDSGETAEATRLKRTARRRYTRRKNRICYLQEIFSNEMAKVDDSFFHRLEESFLVEEDKKHERHPIFGNIVDEVAYHEKYPTIYHLRKKLVDSTDKADLRLIYLALAHMIKFRGHFLIEGDLNPDNSDVDKLFIQLVQTYNQLFEENPINASGVDAKAILSARLSKSRRLENLIAQLPGEKKNGLFGNLIALSLGLTPNFKSNFDLAEDAKLQLSKDTYDDDLDNLLAQIGDQYADLFLAAKNLSDAILLSDILRVNTEITKAPLSASMIKRYDEHHQDLTLLKALVRQQLPEKYKEIFFDQSKNGYAGYIDGGASQEEFYKFIKPILEKMDGTEELLVKLNREDLLRKQRTFDNGSIPHQIHLGELHAILRRQEDFYPFLKDNREKIEKILTFRIPYYVGPLARGNSRFAWMTRKSEETITPWNFEEVVDKGASAQSFIERMTNFDKNLPNEKVLPKHSLLYEYFTVYNELTKVKYVTEGMRKPAFLSGEQKKAIVDLLFKTNRKVTVKQLKEDYFKKIECFDSVEISGVEDRFNASLGTYHDLLKIIKDKDFLDNEENEDILEDIVLTLTLFEDREMIEERLKTYAHLFDDKVMKQLKRRRYTGWGRLSRKLINGIRDKQSGKTILDFLKSDGFANRNFMQLIHDDSLTFKEDIQKAQVSGQGDSLHEHIANLAGSPAIKKGILQTVKVVDELVKVMGRHKPENIVIEMARENQTTQKGQKNSRERMKRIEEGIKELGSQILKEHPVENTQLQNEKLYLYYLQNGRDMYVDQELDINRLSDYDVDHIVPQSFLKDDSIDNKVLTRSDKARGKSDNVPSEEVVKKMKNYWRQLLNAKLITQRKFDNLTKAERGGLSELDKAGFIKRQLVETRQITKHVAQILDSRMNTKYDENDKLIREVKVITLKSKLVSDFRKDFQFYKVREINNYHHAHDAYLNAVVGTALIKKYPKLESEFVYGDYKVYDVRKMIAKSEQEIGKATAKYFFYSNIMNFFKTEITLANGEIRKRPLIETNGETGEIVWDKGRDFATVRKVLSMPQVNIVKKTEVQTGGFSKESILPKRNSDKLIARKKDWDPKKYGGFDSPTVAYSVLVVAKVEKGKSKKLKSVKELLGITIMERSSFEKNPIDFLEAKGYKEVKKDLIIKLPKYSLFELENGRKRMLASAGELQKGNELALPSKYVNFLYLASHYEKLKGSPEDNEQKQLFVEQHKHYLDEIIEQISEFSKRVILADANLDKVLSAYNKHRDKPIREQAENIIHLFTLTNLGAPAAFKYFDTTIDRKRYTSTKEVLDATLIHQSITGLYETRIDLSQLGGDGGGGSGGGGSSGGGRDIMKDIKVRLMTDSPDDSQDLMIGAIESNLFADQISWKSDQPVWLNQWPLKQEKLQALQQLVTEQLQLGHLEESNSPWNTPVFVIKKKSGKWRLLQDLRAVNATMHDMGALQPGLPSPVAVPKGWEIIIIDLQDCFFNIKLHPEDCKRFAFSVPSPNFKRPYQRFQWKVLPQGMKNSPTLCQKFVDKAILTVRDKYQDSYIVHYMDDILLAHPSRSIVDEILTSMIQALNKHGLVVSTEKIQKYDNLKYLGTHIQGDSVSYQKLQIRTDKLRTLNDFQKLLGNINWIRPFLKLTTGELKPLFEILNGDSNPISTRKLTPEACKALQLMNERLSTARVKRLDLSQPWSLCILKTEYTPTACLWQDGVVEWIHLPHISPKVITPYDIFCTQLIIKGRHRSKELFSKDPDYIVVPYTKVQFDLLLQEKEDWPISLLGFLGEVHFHLPKDPLLTFTLQTAIIFPHMTSTTPLEKGIVIFTDGSANGRSVTYIQGREPIIKENTQNTAQQAEIVAVITAFEEVSQPFNLYTDSKYVTGLFPEIETATLSPRTKIYTELKHLQRLIHKRQEKFYIGHIRGHTGLPGPLAQGNAYADSLTRILTAGKRTADGSEFEKRTADGSEFESPKKKAKVE

SEQ ID NO: 3200 - protein, 2024 aa, synthetic construct
MPAAKRVKLDGGDKKYSIGLDIGTNSVGWAVITDEYKVPSKKFKVLGNTDRHSIKKNLIGALLFDSGETAEATRLKRTARRRYTRRKNRICYLQEIFSNEMAKVDDSFFHRLEESFLVEEDKKHERHPIFGNIVDEVAYHEKYPTIYHLRKKLVDSTDKADLRLIYLALAHMIKFRGHFLIEGDLNPDNSDVDKLFIQLVQTYNQLFEENPINASGVDAKAILSARLSKSRRLENLIAQLPGEKKNGLFGNLIALSLGLTPNFKSNFDLAEDAKLQLSKDTYDDDLDNLLAQIGDQYADLFLAAKNLSDAILLSDILRVNTEITKAPLSASMIKRYDEHHQDLTLLKALVRQQLPEKYKEIFFDQSKNGYAGYIDGGASQEEFYKFIKPILEKMDGTEELLVKLNREDLLRKQRTFDNGSIPHQIHLGELHAILRRQEDFYPFLKDNREKIEKILTFRIPYYVGPLARGNSRFAWMTRKSEETITPWNFEEVVDKGASAQSFIERMTNFDKNLPNEKVLPKHSLLYEYFTVYNELTKVKYVTEGMRKPAFLSGEQKKAIVDLLFKTNRKVTVKQLKEDYFKKIECFDSVEISGVEDRFNASLGTYHDLLKIIKDKDFLDNEENEDILEDIVLTLTLFEDREMIEERLKTYAHLFDDKVMKQLKRRRYTGWGRLSRKLINGIRDKQSGKTILDFLKSDGFANRNFMQLIHDDSLTFKEDIQKAQVSGQGDSLHEHIANLAGSPAIKKGILQTVKVVDELVKVMGRHKPENIVIEMARENQTTQKGQKNSRERMKRIEEGIKELGSQILKEHPVENTQLQNEKLYLYYLQNGRDMYVDQELDINRLSDYDVDHIVPQSFLKDDSIDNKVLTRSDKARGKSDNVPSEEVVKKMKNYWRQLLNAKLITQRKFDNLTKAERGGLSELDKAGFIKRQLVETRQITKHVAQILDSRMNTKYDENDKLIREVKVITLKSKLVSDFRKDFQFYKVREINNYHHAHDAYLNAVVGTALIKKYPKLESEFVYGDYKVYDVRKMIAKSEQEIGKATAKYFFYSNIMNFFKTEITLANGEIRKRPLIETNGETGEIVWDKGRDFATVRKVLSMPQVNIVKKTEVQTGGFSKESILPKRNSDKLIARKKDWDPKKYGGFDSPTVAYSVLVVAKVEKGKSKKLKSVKELLGITIMERSSFEKNPIDFLEAKGYKEVKKDLIIKLPKYSLFELENGRKRMLASAGELQKGNELALPSKYVNFLYLASHYEKLKGSPEDNEQKQLFVEQHKHYLDEIIEQISEFSKRVILADANLDKVLSAYNKHRDKPIREQAENIIHLFTLTNLGAPAAFKYFDTTIDRKRYTSTKEVLDATLIHQSITGLYETRIDLSQLGGDGGPAPEAAAKGGGGGGRDIMKDIKVRLMTDSPDDSQDLMIGAIESNLFADQISWKSDQPVWLNQWPLKQEKLQALQQLVTEQLQLGHLEESNSPWNTPVFVIKKKSGKWRLLQDLRAVNATMHDMGALQPGLPSPVAVPKGWEIIIIDLQDCFFNIKLHPEDCKRFAFSVPSPNFKRPYQRFQWKVLPQGMKNSPTLCQKFVDKAILTVRDKYQDSYIVHYMDDILLAHPSRSIVDEILTSMIQALNKHGLVVSTEKIQKYDNLKYLGTHIQGDSVSYQKLQIRTDKLRTLNDFQKLLGNINWIRPFLKLTTGELKPLFEILNGDSNPISTRKLTPEACKALQLMNERLSTARVKRLDLSQPWSLCILKTEYTPTACLWQDGVVEWIHLPHISPKVITPYDIFCTQLIIKGRHRSKELFSKDPDYIVVPYTKVQFDLLLQEKEDWPISLLGFLGEVHFHLPKDPLLTFTLQTAIIFPHMTSTTPLEKGIVIFTDGSANGRSVTYIQGREPIIKENTQNTAQQAEIVAVITAFEEVSQPFNLYTDSKYVTGLFPEIETATLSPRTKIYTELKHLQRLIHKRQEKFYIGHIRGHTGLPGPLAQGNAYADSLTRILTAGKRTADGSEFEKRTADGSEFESPKKKAKVE

SEQ ID NO: 3201 - protein, 2028 aa, synthetic construct
MPAAKRVKLDGGDKKYSIGLDIGTNSVGWAVITDEYKVPSKKFKVLGNTDRHSIKKNLIGALLFDSGETAEATRLKRTARRRYTRRKNRICYLQEIFSNEMAKVDDSFFHRLEESFLVEEDKKHERHPIFGNIVDEVAYHEKYPTIYHLRKKLVDSTDKADLRLIYLALAHMIKFRGHFLIEGDLNPDNSDVDKLFIQLVQTYNQLFEENPINASGVDAKAILSARLSKSRRLENLIAQLPGEKKNGLFGNLIALSLGLTPNFKSNFDLAEDAKLQLSKDTYDDDLDNLLAQIGDQYADLFLAAKNLSDAILLSDILRVNTEITKAPLSASMIKRYDEHHQDLTLLKALVRQQLPEKYKEIFFDQSKNGYAGYIDGGASQEEFYKFIKPILEKMDGTEELLVKLNREDLLRKQRTFDNGSIPHQIHLGELHAILRRQEDFYPFLKDNREKIEKILTFRIPYYVGPLARGNSRFAWMTRKSEETITPWNFEEVVDKGASAQSFIERMTNFDKNLPNEKVLPKHSLLYEYFTVYNELTKVKYVTEGMRKPAFLSGEQKKAIVDLLFKTNRKVTVKQLKEDYFKKIECFDSVEISGVEDRFNASLGTYHDLLKIIKDKDFLDNEENEDILEDIVLTLTLFEDREMIEERLKTYAHLFDDKVMKQLKRRRYTGWGRLSRKLINGIRDKQSGKTILDFLKSDGFANRNFMQLIHDDSLTFKEDIQKAQVSGQGDSLHEHIANLAGSPAIKKGILQTVKVVDELVKVMGRHKPENIVIEMARENQTTQKGQKNSRERMKRIEEGIKELGSQILKEHPVENTQLQNEKLYLYYLQNGRDMYVDQELDINRLSDYDVDHIVPQSFLKDDSIDNKVLTRSDKARGKSDNVPSEEVVKKMKNYWRQLLNAKLITQRKFDNLTKAERGGLSELDKAGFIKRQLVETRQITKHVAQILDSRMNTKYDENDKLIREVKVITLKSKLVSDFRKDFQFYKVREINNYHHAHDAYLNAVVGTALIKKYPKLESEFVYGDYKVYDVRKMIAKSEQEIGKATAKYFFYSNIMNFFKTEITLANGEIRKRPLIETNGETGEIVWDKGRDFATVRKVLSMPQVNIVKKTEVQTGGFSKESILPKRNSDKLIARKKDWDPKKYGGFDSPTVAYSVLVVAKVEKGKSKKLKSVKELLGITIMERSSFEKNPIDFLEAKGYKEVKKDLIIKLPKYSLFELENGRKRMLASAGELQKGNELALPSKYVNFLYLASHYEKLKGSPEDNEQKQLFVEQHKHYLDEIIEQISEFSKRVILADANLDKVLSAYNKHRDKPIREQAENIIHLFTLTNLGAPAAFKYFDTTIDRKRYTSTKEVLDATLIHQSITGLYETRIDLSQLGGDGGEAAAKGGGGSEAAAKGGGRDIMKDIKVRLMTDSPDDSQDLMIGAIESNLFADQISWKSDQPVWLNQWPLKQEKLQALQQLVTEQLQLGHLEESNSPWNTPVFVIKKKSGKWRLLQDLRAVNATMHDMGALQPGLPSPVAVPKGWEIIIIDLQDCFFNIKLHPEDCKRFAFSVPSPNFKRPYQRFQWKVLPQGMKNSPTLCQKFVDKAILTVRDKYQDSYIVHYMDDILLAHPSRSIVDEILTSMIQALNKHGLVVSTEKIQKYDNLKYLGTHIQGDSVSYQKLQIRTDKLRTLNDFQKLLGNINWIRPFLKLTTGELKPLFEILNGDSNPISTRKLTPEACKALQLMNERLSTARVKRLDLSQPWSLCILKTEYTPTACLWQDGVVEWIHLPHISPKVITPYDIFCTQLIIKGRHRSKELFSKDPDYIVVPYTKVQFDLLLQEKEDWPISLLGFLGEVHFHLPKDPLLTFTLQTAIIFPHMTSTTPLEKGIVIFTDGSANGRSVTYIQGREPIIKENTQNTAQQAEIVAVITAFEEVSQPFNLYTDSKYVTGLFPEIETATLSPRTKIYTELKHLQRLIHKRQEKFYIGHIRGHTGLPGPLAQGNAYADSLTRILTAGKRTADGSEFEKRTADGSEFESPKKKAKVE

SEQ ID NO: 3202 - protein, 2019 aa, synthetic construct
MPAAKRVKLDGGDKKYSIGLDIGTNSVGWAVITDEYKVPSKKFKVLGNTDRHSIKKNLIGALLFDSGETAEATRLKRTARRRYTRRKNRICYLQEIFSNEMAKVDDSFFHRLEESFLVEEDKKHERHPIFGNIVDEVAYHEKYPTIYHLRKKLVDSTDKADLRLIYLALAHMIKFRGHFLIEGDLNPDNSDVDKLFIQLVQTYNQLFEENPINASGVDAKAILSARLSKSRRLENLIAQLPGEKKNGLFGNLIALSLGLTPNFKSNFDLAEDAKLQLSKDTYDDDLDNLLAQIGDQYADLFLAAKNLSDAILLSDILRVNTEITKAPLSASMIKRYDEHHQDLTLLKALVRQQLPEKYKEIFFDQSKNGYAGYIDGGASQEEFYKFIKPILEKMDGTEELLVKLNREDLLRKQRTFDNGSIPHQIHLGELHAILRRQEDFYPFLKDNREKIEKILTFRIPYYVGPLARGNSRFAWMTRKSEETITPWNFEEVVDKGASAQSFIERMTNFDKNLPNEKVLPKHSLLYEYFTVYNELTKVKYVTEGMRKPAFLSGEQKKAIVDLLFKTNRKVTVKQLKEDYFKKIECFDSVEISGVEDRFNASLGTYHDLLKIIKDKDFLDNEENEDILEDIVLTLTLFEDREMIEERLKTYAHLFDDKVMKQLKRRRYTGWGRLSRKLINGIRDKQSGKTILDFLKSDGFANRNFMQLIHDDSLTFKEDIQKAQVSGQGDSLHEHIANLAGSPAIKKGILQTVKVVDELVKVMGRHKPENIVIEMARENQTTQKGQKNSRERMKRIEEGIKELGSQILKEHPVENTQLQNEKLYLYYLQNGRDMYVDQELDINRLSDYDVDHIVPQSFLKDDSIDNKVLTRSDKARGKSDNVPSEEVVKKMKNYWRQLLNAKLITQRKFDNLTKAERGGLSELDKAGFIKRQLVETRQITKHVAQILDSRMNTKYDENDKLIREVKVITLKSKLVSDFRKDFQFYKVREINNYHHAHDAYLNAVVGTALIKKYPKLESEFVYGDYKVYDVRKMIAKSEQEIGKATAKYFFYSNIMNFFKTEITLANGEIRKRPLIETNGETGEIVWDKGRDFATVRKVLSMPQVNIVKKTEVQTGGFSKESILPKRNSDKLIARKKDWDPKKYGGFDSPTVAYSVLVVAKVEKGKSKKLKSVKELLGITIMERSSFEKNPIDFLEAKGYKEVKKDLIIKLPKYSLFELENGRKRMLASAGELQKGNELALPSKYVNFLYLASHYEKLKGSPEDNEQKQLFVEQHKHYLDEIIEQISEFSKRVILADANLDKVLSAYNKHRDKPIREQAENIIHLFTLTNLGAPAAFKYFDTTIDRKRYTSTKEVLDATLIHQSITGLYETRIDLSQLGGDGGGGGPAPGGGRDIMKDIKVRLMTDSPDDSQDLMIGAIESNLFADQISWKSDQPVWLNQWPLKQEKLQALQQLVTEQLQLGHLEESNSPWNTPVFVIKKKSGKWRLLQDLRAVNATMHDMGALQPGLPSPVAVPKGWEIIIIDLQDCFFNIKLHPEDCKRFAFSVPSPNFKRPYQRFQWKVLPQGMKNSPTLCQKFVDKAILTVRDKYQDSYIVHYMDDILLAHPSRSIVDEILTSMIQALNKHGLVVSTEKIQKYDNLKYLGTHIQGDSVSYQKLQIRTDKLRTLNDFQKLLGNINWIRPFLKLTTGELKPLFEILNGDSNPISTRKLTPEACKALQLMNERLSTARVKRLDLSQPWSLCILKTEYTPTACLWQDGVVEWIHLPHISPKVITPYDIFCTQLIIKGRHRSKELFSKDPDYIVVPYTKVQFDLLLQEKEDWPISLLGFLGEVHFHLPKDPLLTFTLQTAIIFPHMTSTTPLEKGIVIFTDGSANGRSVTYIQGREPIIKENTQNTAQQAEIVAVITAFEEVSQPFNLYTDSKYVTGLFPEIETATLSPRTKIYTELKHLQRLIHKRQEKFYIGHIRGHTGLPGPLAQGNAYADSLTRILTAGKRTADGSEFEKRTADGSEFESPKKKAKVE

SEQ ID NO: 3203 - protein, 2028 aa, synthetic construct
MPAAKRVKLDGGDKKYSIGLDIGTNSVGWAVITDEYKVPSKKFKVLGNTDRHSIKKNLIGALLFDSGETAEATRLKRTARRRYTRRKNRICYLQEIFSNEMAKVDDSFFHRLEESFLVEEDKKHERHPIFGNIVDEVAYHEKYPTIYHLRKKLVDSTDKADLRLIYLALAHMIKFRGHFLIEGDLNPDNSDVDKLFIQLVQTYNQLFEENPINASGVDAKAILSARLSKSRRLENLIAQLPGEKKNGLFGNLIALSLGLTPNFKSNFDLAEDAKLQLSKDTYDDDLDNLLAQIGDQYADLFLAAKNLSDAILLSDILRVNTEITKAPLSASMIKRYDEHHQDLTLLKALVRQQLPEKYKEIFFDQSKNGYAGYIDGGASQEEFYKFIKPILEKMDGTEELLVKLNREDLLRKQRTFDNGSIPHQIHLGELHAILRRQEDFYPFLKDNREKIEKILTFRIPYYVGPLARGNSRFAWMTRKSEETITPWNFEEVVDKGASAQSFIERMTNFDKNLPNEKVLPKHSLLYEYFTVYNELTKVKYVTEGMRKPAFLSGEQKKAIVDLLFKTNRKVTVKQLKEDYFKKIECFDSVEISGVEDRFNASLGTYHDLLKIIKDKDFLDNEENEDILEDIVLTLTLFEDREMIEERLKTYAHLFDDKVMKQLKRRRYTGWGRLSRKLINGIRDKQSGKTILDFLKSDGFANRNFMQLIHDDSLTFKEDIQKAQVSGQGDSLHEHIANLAGSPAIKKGILQTVKVVDELVKVMGRHKPENIVIEMARENQTTQKGQKNSRERMKRIEEGIKELGSQILKEHPVENTQLQNEKLYLYYLQNGRDMYVDQELDINRLSDYDVDHIVPQSFLKDDSIDNKVLTRSDKARGKSDNVPSEEVVKKMKNYWRQLLNAKLITQRKFDNLTKAERGGLSELDKAGFIKRQLVETRQITKHVAQILDSRMNTKYDENDKLIREVKVITLKSKLVSDFRKDFQFYKVREINNYHHAHDAYLNAVVGTALIKKYPKLESEFVYGDYKVYDVRKMIAKSEQEIGKATAKYFFYSNIMNFFKTEITLANGEIRKRPLIETNGETGEIVWDKGRDFATVRKVLSMPQVNIVKKTEVQTGGFSKESILPKRNSDKLIARKKDWDPKKYGGFDSPTVAYSVLVVAKVEKGKSKKLKSVKELLGITIMERSSFEKNPIDFLEAKGYKEVKKDLIIKLPKYSLFELENGRKRMLASAGELQKGNELALPSKYVNFLYLASHYEKLKGSPEDNEQKQLFVEQHKHYLDEIIEQISEFSKRVILADANLDKVLSAYNKHRDKPIREQAENIIHLFTLTNLGAPAAFKYFDTTIDRKRYTSTKEVLDATLIHQSITGLYETRIDLSQLGGDGGGGGGSGGGGSGGGGSGGGRDIMKDIKVRLMTDSPDDSQDLMIGAIESNLFADQISWKSDQPVWLNQWPLKQEKLQALQQLVTEQLQLGHLEESNSPWNTPVFVIKKKSGKWRLLQDLRAVNATMHDMGALQPGLPSPVAVPKGWEIIIIDLQDCFFNIKLHPEDCKRFAFSVPSPNFKRPYQRFQWKVLPQGMKNSPTLCQKFVDKAILTVRDKYQDSYIVHYMDDILLAHPSRSIVDEILTSMIQALNKHGLVVSTEKIQKYDNLKYLGTHIQGDSVSYQKLQIRTDKLRTLNDFQKLLGNINWIRPFLKLTTGELKPLFEILNGDSNPISTRKLTPEACKALQLMNERLSTARVKRLDLSQPWSLCILKTEYTPTACLWQDGVVEWIHLPHISPKVITPYDIFCTQLIIKGRHRSKELFSKDPDYIVVPYTKVQFDLLLQEKEDWPISLLGFLGEVHFHLPKDPLLTFTLQTAIIFPHMTSTTPLEKGIVIFTDGSANGRSVTYIQGREPIIKENTQNTAQQAEIVAVITAFEEVSQPFNLYTDSKYVTGLFPEIETATLSPRTKIYTELKHLQRLIHKRQEKFYIGHIRGHTGLPGPLAQGNAYADSLTRILTAGKRTADGSEFEKRTADGSEFESPKKKAKVE

SEQ ID NO: 3204 - protein, 2022 aa, synthetic construct
MPAAKRVKLDGGDKKYSIGLDIGTNSVGWAVITDEYKVPSKKFKVLGNTDRHSIKKNLIGALLFDSGETAEATRLKRTARRRYTRRKNRICYLQEIFSNEMAKVDDSFFHRLEESFLVEEDKKHERHPIFGNIVDEVAYHEKYPTIYHLRKKLVDSTDKADLRLIYLALAHMIKFRGHFLIEGDLNPDNSDVDKLFIQLVQTYNQLFEENPINASGVDAKAILSARLSKSRRLENLIAQLPGEKKNGLFGNLIALSLGLTPNFKSNFDLAEDAKLQLSKDTYDDDLDNLLAQIGDQYADLFLAAKNLSDAILLSDILRVNTEITKAPLSASMIKRYDEHHQDLTLLKALVRQQLPEKYKEIFFDQSKNGYAGYIDGGASQEEFYKFIKPILEKMDGTEELLVKLNREDLLRKQRTFDNGSIPHQIHLGELHAILRRQEDFYPFLKDNREKIEKILTFRIPYYVGPLARGNSRFAWMTRKSEETITPWNFEEVVDKGASAQSFIERMTNFDKNLPNEKVLPKHSLLYEYFTVYNELTKVKYVTEGMRKPAFLSGEQKKAIVDLLFKTNRKVTVKQLKEDYFKKIECFDSVEISGVEDRFNASLGTYHDLLKIIKDKDFLDNEENEDILEDIVLTLTLFEDREMIEERLKTYAHLFDDKVMKQLKRRRYTGWGRLSRKLINGIRDKQSGKTILDFLKSDGFANRNFMQLIHDDSLTFKEDIQKAQVSGQGDSLHEHIANLAGSPAIKKGILQTVKVVDELVKVMGRHKPENIVIEMARENQTTQKGQKNSRERMKRIEEGIKELGSQILKEHPVENTQLQNEKLYLYYLQNGRDMYVDQELDINRLSDYDVDHIVPQSFLKDDSIDNKVLTRSDKARGKSDNVPSEEVVKKMKNYWRQLLNAKLITQRKFDNLTKAERGGLSELDKAGFIKRQLVETRQITKHVAQILDSRMNTKYDENDKLIREVKVITLKSKLVSDFRKDFQFYKVREINNYHHAHDAYLNAVVGTALIKKYPKLESEFVYGDYKVYDVRKMIAKSEQEIGKATAKYFFYSNIMNFFKTEITLANGEIRKRPLIETNGETGEIVWDKGRDFATVRKVLSMPQVNIVKKTEVQTGGFSKESILPKRNSDKLIARKKDWDPKKYGGFDSPTVAYSVLVVAKVEKGKSKKLKSVKELLGITIMERSSFEKNPIDFLEAKGYKEVKKDLIIKLPKYSLFELENGRKRMLASAGELQKGNELALPSKYVNFLYLASHYEKLKGSPEDNEQKQLFVEQHKHYLDEIIEQISEFSKRVILADANLDKVLSAYNKHRDKPIREQAENIIHLFTLTNLGAPAAFKYFDTTIDRKRYTSTKEVLDATLIHQSITGLYETRIDLSQLGGDGGGSSGGGPAPGGGRDIMKDIKVRLMTDSPDDSQDLMIGAIESNLFADQISWKSDQPVWLNQWPLKQEKLQALQQLVTEQLQLGHLEESNSPWNTPVFVIKKKSGKWRLLQDLRAVNATMHDMGALQPGLPSPVAVPKGWEIIIIDLQDCFFNIKLHPEDCKRFAFSVPSPNFKRPYQRFQWKVLPQGMKNSPTLCQKFVDKAILTVRDKYQDSYIVHYMDDILLAHPSRSIVDEILTSMIQALNKHGLVVSTEKIQKYDNLKYLGTHIQGDSVSYQKLQIRTDKLRTLNDFQKLLGNINWIRPFLKLTTGELKPLFEILNGDSNPISTRKLTPEACKALQLMNERLSTARVKRLDLSQPWSLCILKTEYTPTACLWQDGVVEWIHLPHISPKVITPYDIFCTQLIIKGRHRSKELFSKDPDYIVVPYTKVQFDLLLQEKEDWPISLLGFLGEVHFHLPKDPLLTFTLQTAIIFPHMTSTTPLEKGIVIFTDGSANGRSVTYIQGREPIIKENTQNTAQQAEIVAVITAFEEVSQPFNLYTDSKYVTGLFPEIETATLSPRTKIYTELKHLQRLIHKRQEKFYIGHIRGHTGLPGPLAQGNAYADSLTRILTAGKRTADGSEFEKRTADGSEFESPKKKAKVE

SEQ ID NO: 3205 - protein, 2022 aa, synthetic construct
MPAAKRVKLDGGDKKYSIGLDIGTNSVGWAVITDEYKVPSKKFKVLGNTDRHSIKKNLIGALLFDSGETAEATRLKRTARRRYTRRKNRICYLQEIFSNEMAKVDDSFFHRLEESFLVEEDKKHERHPIFGNIVDEVAYHEKYPTIYHLRKKLVDSTDKADLRLIYLALAHMIKFRGHFLIEGDLNPDNSDVDKLFIQLVQTYNQLFEENPINASGVDAKAILSARLSKSRRLENLIAQLPGEKKNGLFGNLIALSLGLTPNFKSNFDLAEDAKLQLSKDTYDDDLDNLLAQIGDQYADLFLAAKNLSDAILLSDILRVNTEITKAPLSASMIKRYDEHHQDLTLLKALVRQQLPEKYKEIFFDQSKNGYAGYIDGGASQEEFYKFIKPILEKMDGTEELLVKLNREDLLRKQRTFDNGSIPHQIHLGELHAILRRQEDFYPFLKDNREKIEKILTFRIPYYVGPLARGNSRFAWMTRKSEETITPWNFEEVVDKGASAQSFIERMTNFDKNLPNEKVLPKHSLLYEYFTVYNELTKVKYVTEGMRKPAFLSGEQKKAIVDLLFKTNRKVTVKQLKEDYFKKIECFDSVEISGVEDRFNASLGTYHDLLKIIKDKDFLDNEENEDILEDIVLTLTLFEDREMIEERLKTYAHLFDDKVMKQLKRRRYTGWGRLSRKLINGIRDKQSGKTILDFLKSDGFANRNFMQLIHDDSLTFKEDIQKAQVSGQGDSLHEHIANLAGSPAIKKGILQTVKVVDELVKVMGRHKPENIVIEMARENQTTQKGQKNSRERMKRIEEGIKELGSQILKEHPVENTQLQNEKLYLYYLQNGRDMYVDQELDINRLSDYDVDHIVPQSFLKDDSIDNKVLTRSDKARGKSDNVPSEEVVKKMKNYWRQLLNAKLITQRKFDNLTKAERGGLSELDKAGFIKRQLVETRQITKHVAQILDSRMNTKYDENDKLIREVKVITLKSKLVSDFRKDFQFYKVREINNYHHAHDAYLNAVVGTALIKKYPKLESEFVYGDYKVYDVRKMIAKSEQEIGKATAKYFFYSNIMNFFKTEITLANGEIRKRPLIETNGETGEIVWDKGRDFATVRKVLSMPQVNIVKKTEVQTGGFSKESILPKRNSDKLIARKKDWDPKKYGGFDSPTVAYSVLVVAKVEKGKSKKLKSVKELLGITIMERSSFEKNPIDFLEAKGYKEVKKDLIIKLPKYSLFELENGRKRMLASAGELQKGNELALPSKYVNFLYLASHYEKLKGSPEDNEQKQLFVEQHKHYLDEIIEQISEFSKRVILADANLDKVLSAYNKHRDKPIREQAENIIHLFTLTNLGAPAAFKYFDTTIDRKRYTSTKEVLDATLIHQSITGLYETRIDLSQLGGDGGGSSGGSGGGGGGRDIMKDIKVRLMTDSPDDSQDLMIGAIESNLFADQISWKSDQPVWLNQWPLKQEKLQALQQLVTEQLQLGHLEESNSPWNTPVFVIKKKSGKWRLLQDLRAVNATMHDMGALQPGLPSPVAVPKGWEIIIIDLQDCFFNIKLHPEDCKRFAFSVPSPNFKRPYQRFQWKVLPQGMKNSPTLCQKFVDKAILTVRDKYQDSYIVHYMDDILLAHPSRSIVDEILTSMIQALNKHGLVVSTEKIQKYDNLKYLGTHIQGDSVSYQKLQIRTDKLRTLNDFQKLLGNINWIRPFLKLTTGELKPLFEILNGDSNPISTRKLTPEACKALQLMNERLSTARVKRLDLSQPWSLCILKTEYTPTACLWQDGVVEWIHLPHISPKVITPYDIFCTQLIIKGRHRSKELFSKDPDYIVVPYTKVQFDLLLQEKEDWPISLLGFLGEVHFHLPKDPLLTFTLQTAIIFPHMTSTTPLEKGIVIFTDGSANGRSVTYIQGREPIIKENTQNTAQQAEIVAVITAFEEVSQPFNLYTDSKYVTGLFPEIETATLSPRTKIYTELKHLQRLIHKRQEKFYIGHIRGHTGLPGPLAQGNAYADSLTRILTAGKRTADGSEFEKRTADGSEFESPKKKAKVE

SEQ ID NO: 3206 - protein, 2021 aa, synthetic construct
MPAAKRVKLDGGDKKYSIGLDIGTNSVGWAVITDEYKVPSKKFKVLGNTDRHSIKKNLIGALLFDSGETAEATRLKRTARRRYTRRKNRICYLQEIFSNEMAKVDDSFFHRLEESFLVEEDKKHERHPIFGNIVDEVAYHEKYPTIYHLRKKLVDSTDKADLRLIYLALAHMIKFRGHFLIEGDLNPDNSDVDKLFIQLVQTYNQLFEENPINASGVDAKAILSARLSKSRRLENLIAQLPGEKKNGLFGNLIALSLGLTPNFKSNFDLAEDAKLQLSKDTYDDDLDNLLAQIGDQYADLFLAAKNLSDAILLSDILRVNTEITKAPLSASMIKRYDEHHQDLTLLKALVRQQLPEKYKEIFFDQSKNGYAGYIDGGASQEEFYKFIKPILEKMDGTEELLVKLNREDLLRKQRTFDNGSIPHQIHLGELHAILRRQEDFYPFLKDNREKIEKILTFRIPYYVGPLARGNSRFAWMTRKSEETITPWNFEEVVDKGASAQSFIERMTNFDKNLPNEKVLPKHSLLYEYFTVYNELTKVKYVTEGMRKPAFLSGEQKKAIVDLLFKTNRKVTVKQLKEDYFKKIECFDSVEISGVEDRFNASLGTYHDLLKIIKDKDFLDNEENEDILEDIVLTLTLFEDREMIEERLKTYAHLFDDKVMKQLKRRRYTGWGRLSRKLINGIRDKQSGKTILDFLKSDGFANRNFMQLIHDDSLTFKEDIQKAQVSGQGDSLHEHIANLAGSPAIKKGILQTVKVVDELVKVMGRHKPENIVIEMARENQTTQKGQKNSRERMKRIEEGIKELGSQILKEHPVENTQLQNEKLYLYYLQNGRDMYVDQELDINRLSDYDVDHIVPQSFLKDDSIDNKVLTRSDKARGKSDNVPSEEVVKKMKNYWRQLLNAKLITQRKFDNLTKAERGGLSELDKAGFIKRQLVETRQITKHVAQILDSRMNTKYDENDKLIREVKVITLKSKLVSDFRKDFQFYKVREINNYHHAHDAYLNAVVGTALIKKYPKLESEFVYGDYKVYDVRKMIAKSEQEIGKATAKYFFYSNIMNFFKTEITLANGEIRKRPLIETNGETGEIVWDKGRDFATVRKVLSMPQVNIVKKTEVQTGGFSKESILPKRNSDKLIARKKDWDPKKYGGFDSPTVAYSVLVVAKVEKGKSKKLKSVKELLGITIMERSSFEKNPIDFLEAKGYKEVKKDLIIKLPKYSLFELENGRKRMLASAGELQKGNELALPSKYVNFLYLASHYEKLKGSPEDNEQKQLFVEQHKHYLDEIIEQISEFSKRVILADANLDKVLSAYNKHRDKPIREQAENIIHLFTLTNLGAPAAFKYFDTTIDRKRYTSTKEVLDATLIHQSITGLYETRIDLSQLGGDGGEAAAKGGSGGGRDIMKDIKVRLMTDSPDDSQDLMIGAIESNLFADQISWKSDQPVWLNQWPLKQEKLQALQQLVTEQLQLGHLEESNSPWNTPVFVIKKKSGKWRLLQDLRAVNATMHDMGALQPGLPSPVAVPKGWEIIIIDLQDCFFNIKLHPEDCKRFAFSVPSPNFKRPYQRFQWKVLPQGMKNSPTLCQKFVDKAILTVRDKYQDSYIVHYMDDILLAHPSRSIVDEILTSMIQALNKHGLVVSTEKIQKYDNLKYLGTHIQGDSVSYQKLQIRTDKLRTLNDFQKLLGNINWIRPFLKLTTGELKPLFEILNGDSNPISTRKLTPEACKALQLMNERLSTARVKRLDLSQPWSLCILKTEYTPTACLWQDGVVEWIHLPHISPKVITPYDIFCTQLIIKGRHRSKELFSKDPDYIVVPYTKVQFDLLLQEKEDWPISLLGFLGEVHFHLPKDPLLTFTLQTAIIFPHMTSTTPLEKGIVIFTDGSANGRSVTYIQGREPIIKENTQNTAQQAEIVAVITAFEEVSQPFNLYTDSKYVTGLFPEIETATLSPRTKIYTELKHLQRLIHKRQEKFYIGHIRGHTGLPGPLAQGNAYADSLTRILTAGKRTADGSEFEKRTADGSEFESPKKKAKVE

SEQ ID NO: 3207 - protein, 2024 aa, synthetic construct
MPAAKRVKLDGGDKKYSIGLDIGTNSVGWAVITDEYKVPSKKFKVLGNTDRHSIKKNLIGALLFDSGETAEATRLKRTARRRYTRRKNRICYLQEIFSNEMAKVDDSFFHRLEESFLVEEDKKHERHPIFGNIVDEVAYHEKYPTIYHLRKKLVDSTDKADLRLIYLALAHMIKFRGHFLIEGDLNPDNSDVDKLFIQLVQTYNQLFEENPINASGVDAKAILSARLSKSRRLENLIAQLPGEKKNGLFGNLIALSLGLTPNFKSNFDLAEDAKLQLSKDTYDDDLDNLLAQIGDQYADLFLAAKNLSDAILLSDILRVNTEITKAPLSASMIKRYDEHHQDLTLLKALVRQQLPEKYKEIFFDQSKNGYAGYIDGGASQEEFYKFIKPILEKMDGTEELLVKLNREDLLRKQRTFDNGSIPHQIHLGELHAILRRQEDFYPFLKDNREKIEKILTFRIPYYVGPLARGNSRFAWMTRKSEETITPWNFEEVVDKGASAQSFIERMTNFDKNLPNEKVLPKHSLLYEYFTVYNELTKVKYVTEGMRKPAFLSGEQKKAIVDLLFKTNRKVTVKQLKEDYFKKIECFDSVEISGVEDRFNASLGTYHDLLKIIKDKDFLDNEENEDILEDIVLTLTLFEDREMIEERLKTYAHLFDDKVMKQLKRRRYTGWGRLSRKLINGIRDKQSGKTILDFLKSDGFANRNFMQLIHDDSLTFKEDIQKAQVSGQGDSLHEHIANLAGSPAIKKGILQTVKVVDELVKVMGRHKPENIVIEMARENQTTQKGQKNSRERMKRIEEGIKELGSQILKEHPVENTQLQNEKLYLYYLQNGRDMYVDQELDINRLSDYDVDHIVPQSFLKDDSIDNKVLTRSDKARGKSDNVPSEEVVKKMKNYWRQLLNAKLITQRKFDNLTKAERGGLSELDKAGFIKRQLVETRQITKHVAQILDSRMNTKYDENDKLIREVKVITLKSKLVSDFRKDFQFYKVREINNYHHAHDAYLNAVVGTALIKKYPKLESEFVYGDYKVYDVRKMIAKSEQEIGKATAKYFFYSNIMNFFKTEITLANGEIRKRPLIETNGETGEIVWDKGRDFATVRKVLSMPQVNIVKKTEVQTGGFSKESILPKRNSDKLIARKKDWDPKKYGGFDSPTVAYSVLVVAKVEKGKSKKLKSVKELLGITIMERSSFEKNPIDFLEAKGYKEVKKDLIIKLPKYSLFELENGRKRMLASAGELQKGNELALPSKYVNFLYLASHYEKLKGSPEDNEQKQLFVEQHKHYLDEIIEQISEFSKRVILADANLDKVLSAYNKHRDKPIREQAENIIHLFTLTNLGAPAAFKYFDTTIDRKRYTSTKEVLDATLIHQSITGLYETRIDLSQLGGDGGGSSEAAAKPAPGGGRDIMKDIKVRLMTDSPDDSQDLMIGAIESNLFADQISWKSDQPVWLNQWPLKQEKLQALQQLVTEQLQLGHLEESNSPWNTPVFVIKKKSGKWRLLQDLRAVNATMHDMGALQPGLPSPVAVPKGWEIIIIDLQDCFFNIKLHPEDCKRFAFSVPSPNFKRPYQRFQWKVLPQGMKNSPTLCQKFVDKAILTVRDKYQDSYIVHYMDDILLAHPSRSIVDEILTSMIQALNKHGLVVSTEKIQKYDNLKYLGTHIQGDSVSYQKLQIRTDKLRTLNDFQKLLGNINWIRPFLKLTTGELKPLFEILNGDSNPISTRKLTPEACKALQLMNERLSTARVKRLDLSQPWSLCILKTEYTPTACLWQDGVVEWIHLPHISPKVITPYDIFCTQLIIKGRHRSKELFSKDPDYIVVPYTKVQFDLLLQEKEDWPISLLGFLGEVHFHLPKDPLLTFTLQTAIIFPHMTSTTPLEKGIVIFTDGSANGRSVTYIQGREPIIKENTQNTAQQAEIVAVITAFEEVSQPFNLYTDSKYVTGLFPEIETATLSPRTKIYTELKHLQRLIHKRQEKFYIGHIRGHTGLPGPLAQGNAYADSLTRILTAGKRTADGSEFEKRTADGSEFESPKKKAKVE

SEQ ID NO: 3208 - protein, 2021 aa, synthetic construct
MPAAKRVKLDGGDKKYSIGLDIGTNSVGWAVITDEYKVPSKKFKVLGNTDRHSIKKNLIGALLFDSGETAEATRLKRTARRRYTRRKNRICYLQEIFSNEMAKVDDSFFHRLEESFLVEEDKKHERHPIFGNIVDEVAYHEKYPTIYHLRKKLVDSTDKADLRLIYLALAHMIKFRGHFLIEGDLNPDNSDVDKLFIQLVQTYNQLFEENPINASGVDAKAILSARLSKSRRLENLIAQLPGEKKNGLFGNLIALSLGLTPNFKSNFDLAEDAKLQLSKDTYDDDLDNLLAQIGDQYADLFLAAKNLSDAILLSDILRVNTEITKAPLSASMIKRYDEHHQDLTLLKALVRQQLPEKYKEIFFDQSKNGYAGYIDGGASQEEFYKFIKPILEKMDGTEELLVKLNREDLLRKQRTFDNGSIPHQIHLGELHAILRRQEDFYPFLKDNREKIEKILTFRIPYYVGPLARGNSRFAWMTRKSEETITPWNFEEVVDKGASAQSFIERMTNFDKNLPNEKVLPKHSLLYEYFTVYNELTKVKYVTEGMRKPAFLSGEQKKAIVDLLFKTNRKVTVKQLKEDYFKKIECFDSVEISGVEDRFNASLGTYHDLLKIIKDKDFLDNEENEDILEDIVLTLTLFEDREMIEERLKTYAHLFDDKVMKQLKRRRYTGWGRLSRKLINGIRDKQSGKTILDFLKSDGFANRNFMQLIHDDSLTFKEDIQKAQVSGQGDSLHEHIANLAGSPAIKKGILQTVKVVDELVKVMGRHKPENIVIEMARENQTTQKGQKNSRERMKRIEEGIKELGSQILKEHPVENTQLQNEKLYLYYLQNGRDMYVDQELDINRLSDYDVDHIVPQSFLKDDSIDNKVLTRSDKARGKSDNVPSEEVVKKMKNYWRQLLNAKLITQRKFDNLTKAERGGLSELDKAGFIKRQLVETRQITKHVAQILDSRMNTKYDENDKLIREVKVITLKSKLVSDFRKDFQFYKVREINNYHHAHDAYLNAVVGTALIKKYPKLESEFVYGDYKVYDVRKMIAKSEQEIGKATAKYFFYSNIMNFFKTEITLANGEIRKRPLIETNGETGEIVWDKGRDFATVRKVLSMPQVNIVKKTEVQTGGFSKESILPKRNSDKLIARKKDWDPKKYGGFDSPTVAYSVLVVAKVEKGKSKKLKSVKELLGITIMERSSFEKNPIDFLEAKGYKEVKKDLIIKLPKYSLFELENGRKRMLASAGELQKGNELALPSKYVNFLYLASHYEKLKGSPEDNEQKQLFVEQHKHYLDEIIEQISEFSKRVILADANLDKVLSAYNKHRDKPIREQAENIIHLFTLTNLGAPAAFKYFDTTIDRKRYTSTKEVLDATLIHQSITGLYETRIDLSQLGGDGGGGGEAAAKGGGRDIMKDIKVRLMTDSPDDSQDLMIGAIESNLFADQISWKSDQPVWLNQWPLKQEKLQALQQLVTEQLQLGHLEESNSPWNTPVFVIKKKSGKWRLLQDLRAVNATMHDMGALQPGLPSPVAVPKGWEIIIIDLQDCFFNIKLHPEDCKRFAFSVPSPNFKRPYQRFQWKVLPQGMKNSPTLCQKFVDKAILTVRDKYQDSYIVHYMDDILLAHPSRSIVDEILTSMIQALNKHGLVVSTEKIQKYDNLKYLGTHIQGDSVSYQKLQIRTDKLRTLNDFQKLLGNINWIRPFLKLTTGELKPLFEILNGDSNPISTRKLTPEACKALQLMNERLSTARVKRLDLSQPWSLCILKTEYTPTACLWQDGVVEWIHLPHISPKVITPYDIFCTQLIIKGRHRSKELFSKDPDYIVVPYTKVQFDLLLQEKEDWPISLLGFLGEVHFHLPKDPLLTFTLQTAIIFPHMTSTTPLEKGIVIFTDGSANGRSVTYIQGREPIIKENTQNTAQQAEIVAVITAFEEVSQPFNLYTDSKYVTGLFPEIETATLSPRTKIYTELKHLQRLIHKRQEKFYIGHIRGHTGLPGPLAQGNAYADSLTRILTAGKRTADGSEFEKRTADGSEFESPKKKAKVE

SEQ ID NO: 3209 - protein, 2022 aa, synthetic construct
MPAAKRVKLDGGDKKYSIGLDIGTNSVGWAVITDEYKVPSKKFKVLGNTDRHSIKKNLIGALLFDSGETAEATRLKRTARRRYTRRKNRICYLQEIFSNEMAKVDDSFFHRLEESFLVEEDKKHERHPIFGNIVDEVAYHEKYPTIYHLRKKLVDSTDKADLRLIYLALAHMIKFRGHFLIEGDLNPDNSDVDKLFIQLVQTYNQLFEENPINASGVDAKAILSARLSKSRRLENLIAQLPGEKKNGLFGNLIALSLGLTPNFKSNFDLAEDAKLQLSKDTYDDDLDNLLAQIGDQYADLFLAAKNLSDAILLSDILRVNTEITKAPLSASMIKRYDEHHQDLTLLKALVRQQLPEKYKEIFFDQSKNGYAGYIDGGASQEEFYKFIKPILEKMDGTEELLVKLNREDLLRKQRTFDNGSIPHQIHLGELHAILRRQEDFYPFLKDNREKIEKILTFRIPYYVGPLARGNSRFAWMTRKSEETITPWNFEEVVDKGASAQSFIERMTNFDKNLPNEKVLPKHSLLYEYFTVYNELTKVKYVTEGMRKPAFLSGEQKKAIVDLLFKTNRKVTVKQLKEDYFKKIECFDSVEISGVEDRFNASLGTYHDLLKIIKDKDFLDNEENEDILEDIVLTLTLFEDREMIEERLKTYAHLFDDKVMKQLKRRRYTGWGRLSRKLINGIRDKQSGKTILDFLKSDGFANRNFMQLIHDDSLTFKEDIQKAQVSGQGDSLHEHIANLAGSPAIKKGILQTVKVVDELVKVMGRHKPENIVIEMARENQTTQKGQKNSRERMKRIEEGIKELGSQILKEHPVENTQLQNEKLYLYYLQNGRDMYVDQELDINRLSDYDVDHIVPQSFLKDDSIDNKVLTRSDKARGKSDNVPSEEVVKKMKNYWRQLLNAKLITQRKFDNLTKAERGGLSELDKAGFIKRQLVETRQITKHVAQILDSRMNTKYDENDKLIREVKVITLKSKLVSDFRKDFQFYKVREINNYHHAHDAYLNAVVGTALIKKYPKLESEFVYGDYKVYDVRKMIAKSEQEIGKATAKYFFYSNIMNFFKTEITLANGEIRKRPLIETNGETGEIVWDKGRDFATVRKVLSMPQVNIVKKTEVQTGGFSKESILPKRNSDKLIARKKDWDPKKYGGFDSPTVAYSVLVVAKVEKGKSKKLKSVKELLGITIMERSSFEKNPIDFLEAKGYKEVKKDLIIKLPKYSLFELENGRKRMLASAGELQKGNELALPSKYVNFLYLASHYEKLKGSPEDNEQKQLFVEQHKHYLDEIIEQISEFSKRVILADANLDKVLSAYNKHRDKPIREQAENIIHLFTLTNLGAPAAFKYFDTTIDRKRYTSTKEVLDATLIHQSITGLYETRIDLSQLGGDGGPAPGGSGSSGGGRDIMKDIKVRLMTDSPDDSQDLMIGAIESNLFADQISWKSDQPVWLNQWPLKQEKLQALQQLVTEQLQLGHLEESNSPWNTPVFVIKKKSGKWRLLQDLRAVNATMHDMGALQPGLPSPVAVPKGWEIIIIDLQDCFFNIKLHPEDCKRFAFSVPSPNFKRPYQRFQWKVLPQGMKNSPTLCQKFVDKAILTVRDKYQDSYIVHYMDDILLAHPSRSIVDEILTSMIQALNKHGLVVSTEKIQKYDNLKYLGTHIQGDSVSYQKLQIRTDKLRTLNDFQKLLGNINWIRPFLKLTTGELKPLFEILNGDSNPISTRKLTPEACKALQLMNERLSTARVKRLDLSQPWSLCILKTEYTPTACLWQDGVVEWIHLPHISPKVITPYDIFCTQLIIKGRHRSKELFSKDPDYIVVPYTKVQFDLLLQEKEDWPISLLGFLGEVHFHLPKDPLLTFTLQTAIIFPHMTSTTPLEKGIVIFTDGSANGRSVTYIQGREPIIKENTQNTAQQAEIVAVITAFEEVSQPFNLYTDSKYVTGLFPEIETATLSPRTKIYTELKHLQRLIHKRQEKFYIGHIRGHTGLPGPLAQGNAYADSLTRILTAGKRTADGSEFEKRTADGSEFESPKKKAKVE

SEQ ID NO: 3210 - protein, 2016 aa, synthetic construct
MPAAKRVKLDGGDKKYSIGLDIGTNSVGWAVITDEYKVPSKKFKVLGNTDRHSIKKNLIGALLFDSGETAEATRLKRTARRRYTRRKNRICYLQEIFSNEMAKVDDSFFHRLEESFLVEEDKKHERHPIFGNIVDEVAYHEKYPTIYHLRKKLVDSTDKADLRLIYLALAHMIKFRGHFLIEGDLNPDNSDVDKLFIQLVQTYNQLFEENPINASGVDAKAILSARLSKSRRLENLIAQLPGEKKNGLFGNLIALSLGLTPNFKSNFDLAEDAKLQLSKDTYDDDLDNLLAQIGDQYADLFLAAKNLSDAILLSDILRVNTEITKAPLSASMIKRYDEHHQDLTLLKALVRQQLPEKYKEIFFDQSKNGYAGYIDGGASQEEFYKFIKPILEKMDGTEELLVKLNREDLLRKQRTFDNGSIPHQIHLGELHAILRRQEDFYPFLKDNREKIEKILTFRIPYYVGPLARGNSRFAWMTRKSEETITPWNFEEVVDKGASAQSFIERMTNFDKNLPNEKVLPKHSLLYEYFTVYNELTKVKYVTEGMRKPAFLSGEQKKAIVDLLFKTNRKVTVKQLKEDYFKKIECFDSVEISGVEDRFNASLGTYHDLLKIIKDKDFLDNEENEDILEDIVLTLTLFEDREMIEERLKTYAHLFDDKVMKQLKRRRYTGWGRLSRKLINGIRDKQSGKTILDFLKSDGFANRNFMQLIHDDSLTFKEDIQKAQVSGQGDSLHEHIANLAGSPAIKKGILQTVKVVDELVKVMGRHKPENIVIEMARENQTTQKGQKNSRERMKRIEEGIKELGSQILKEHPVENTQLQNEKLYLYYLQNGRDMYVDQELDINRLSDYDVDHIVPQSFLKDDSIDNKVLTRSDKARGKSDNVPSEEVVKKMKNYWRQLLNAKLITQRKFDNLTKAERGGLSELDKAGFIKRQLVETRQITKHVAQILDSRMNTKYDENDKLIREVKVITLKSKLVSDFRKDFQFYKVREINNYHHAHDAYLNAVVGTALIKKYPKLESEFVYGDYKVYDVRKMIAKSEQEIGKATAKYFFYSNIMNFFKTEITLANGEIRKRPLIETNGETGEIVWDKGRDFATVRKVLSMPQVNIVKKTEVQTGGFSKESILPKRNSDKLIARKKDWDPKKYGGFDSPTVAYSVLVVAKVEKGKSKKLKSVKELLGITIMERSSFEKNPIDFLEAKGYKEVKKDLIIKLPKYSLFELENGRKRMLASAGELQKGNELALPSKYVNFLYLASHYEKLKGSPEDNEQKQLFVEQHKHYLDEIIEQISEFSKRVILADANLDKVLSAYNKHRDKPIREQAENIIHLFTLTNLGAPAAFKYFDTTIDRKRYTSTKEVLDATLIHQSITGLYETRIDLSQLGGDGGGGGGGGRDIMKDIKVRLMTDSPDDSQDLMIGAIESNLFADQISWKSDQPVWLNQWPLKQEKLQALQQLVTEQLQLGHLEESNSPWNTPVFVIKKKSGKWRLLQDLRAVNATMHDMGALQPGLPSPVAVPKGWEIIIIDLQDCFFNIKLHPEDCKRFAFSVPSPNFKRPYQRFQWKVLPQGMKNSPTLCQKFVDKAILTVRDKYQDSYIVHYMDDILLAHPSRSIVDEILTSMIQALNKHGLVVSTEKIQKYDNLKYLGTHIQGDSVSYQKLQIRTDKLRTLNDFQKLLGNINWIRPFLKLTTGELKPLFEILNGDSNPISTRKLTPEACKALQLMNERLSTARVKRLDLSQPWSLCILKTEYTPTACLWQDGVVEWIHLPHISPKVITPYDIFCTQLIIKGRHRSKELFSKDPDYIVVPYTKVQFDLLLQEKEDWPISLLGFLGEVHFHLPKDPLLTFTLQTAIIFPHMTSTTPLEKGIVIFTDGSANGRSVTYIQGREPIIKENTQNTAQQAEIVAVITAFEEVSQPFNLYTDSKYVTGLFPEIETATLSPRTKIYTELKHLQRLIHKRQEKFYIGHIRGHTGLPGPLAQGNAYADSLTRILTAGKRTADGSEFEKRTADGSEFESPKKKAKVE

SEQ ID NO: 3211 - protein, 2019 aa, synthetic construct
MPAAKRVKLDGGDKKYSIGLDIGTNSVGWAVITDEYKVPSKKFKVLGNTDRHSIKKNLIGALLFDSGETAEATRLKRTARRRYTRRKNRICYLQEIFSNEMAKVDDSFFHRLEESFLVEEDKKHERHPIFGNIVDEVAYHEKYPTIYHLRKKLVDSTDKADLRLIYLALAHMIKFRGHFLIEGDLNPDNSDVDKLFIQLVQTYNQLFEENPINASGVDAKAILSARLSKSRRLENLIAQLPGEKKNGLFGNLIALSLGLTPNFKSNFDLAEDAKLQLSKDTYDDDLDNLLAQIGDQYADLFLAAKNLSDAILLSDILRVNTEITKAPLSASMIKRYDEHHQDLTLLKALVRQQLPEKYKEIFFDQSKNGYAGYIDGGASQEEFYKFIKPILEKMDGTEELLVKLNREDLLRKQRTFDNGSIPHQIHLGELHAILRRQEDFYPFLKDNREKIEKILTFRIPYYVGPLARGNSRFAWMTRKSEETITPWNFEEVVDKGASAQSFIERMTNFDKNLPNEKVLPKHSLLYEYFTVYNELTKVKYVTEGMRKPAFLSGEQKKAIVDLLFKTNRKVTVKQLKEDYFKKIECFDSVEISGVEDRFNASLGTYHDLLKIIKDKDFLDNEENEDILEDIVLTLTLFEDREMIEERLKTYAHLFDDKVMKQLKRRRYTGWGRLSRKLINGIRDKQSGKTILDFLKSDGFANRNFMQLIHDDSLTFKEDIQKAQVSGQGDSLHEHIANLAGSPAIKKGILQTVKVVDELVKVMGRHKPENIVIEMARENQTTQKGQKNSRERMKRIEEGIKELGSQILKEHPVENTQLQNEKLYLYYLQNGRDMYVDQELDINRLSDYDVDHIVPQSFLKDDSIDNKVLTRSDKARGKSDNVPSEEVVKKMKNYWRQLLNAKLITQRKFDNLTKAERGGLSELDKAGFIKRQLVETRQITKHVAQILDSRMNTKYDENDKLIREVKVITLKSKLVSDFRKDFQFYKVREINNYHHAHDAYLNAVVGTALIKKYPKLESEFVYGDYKVYDVRKMIAKSEQEIGKATAKYFFYSNIMNFFKTEITLANGEIRKRPLIETNGETGEIVWDKGRDFATVRKVLSMPQVNIVKKTEVQTGGFSKESILPKRNSDKLIARKKDWDPKKYGGFDSPTVAYSVLVVAKVEKGKSKKLKSVKELLGITIMERSSFEKNPIDFLEAKGYKEVKKDLIIKLPKYSLFELENGRKRMLASAGELQKGNELALPSKYVNFLYLASHYEKLKGSPEDNEQKQLFVEQHKHYLDEIIEQISEFSKRVILADANLDKVLSAYNKHRDKPIREQAENIIHLFTLTNLGAPAAFKYFDTTIDRKRYTSTKEVLDATLIHQSITGLYETRIDLSQLGGDGGGSSGGGGGGRDIMKDIKVRLMTDSPDDSQDLMIGAIESNLFADQISWKSDQPVWLNQWPLKQEKLQALQQLVTEQLQLGHLEESNSPWNTPVFVIKKKSGKWRLLQDLRAVNATMHDMGALQPGLPSPVAVPKGWEIIIIDLQDCFFNIKLHPEDCKRFAFSVPSPNFKRPYQRFQWKVLPQGMKNSPTLCQKFVDKAILTVRDKYQDSYIVHYMDDILLAHPSRSIVDEILTSMIQALNKHGLVVSTEKIQKYDNLKYLGTHIQGDSVSYQKLQIRTDKLRTLNDFQKLLGNINWIRPFLKLTTGELKPLFEILNGDSNPISTRKLTPEACKALQLMNERLSTARVKRLDLSQPWSLCILKTEYTPTACLWQDGVVEWIHLPHISPKVITPYDIFCTQLIIKGRHRSKELFSKDPDYIVVPYTKVQFDLLLQEKEDWPISLLGFLGEVHFHLPKDPLLTFTLQTAIIFPHMTSTTPLEKGIVIFTDGSANGRSVTYIQGREPIIKENTQNTAQQAEIVAVITAFEEVSQPFNLYTDSKYVTGLFPEIETATLSPRTKIYTELKHLQRLIHKRQEKFYIGHIRGHTGLPGPLAQGNAYADSLTRILTAGKRTADGSEFEKRTADGSEFESPKKKAKVE

SEQ ID NO: 3212 - protein, 2020 aa, synthetic construct
MPAAKRVKLDGGDKKYSIGLDIGTNSVGWAVITDEYKVPSKKFKVLGNTDRHSIKKNLIGALLFDSGETAEATRLKRTARRRYTRRKNRICYLQEIFSNEMAKVDDSFFHRLEESFLVEEDKKHERHPIFGNIVDEVAYHEKYPTIYHLRKKLVDSTDKADLRLIYLALAHMIKFRGHFLIEGDLNPDNSDVDKLFIQLVQTYNQLFEENPINASGVDAKAILSARLSKSRRLENLIAQLPGEKKNGLFGNLIALSLGLTPNFKSNFDLAEDAKLQLSKDTYDDDLDNLLAQIGDQYADLFLAAKNLSDAILLSDILRVNTEITKAPLSASMIKRYDEHHQDLTLLKALVRQQLPEKYKEIFFDQSKNGYAGYIDGGASQEEFYKFIKPILEKMDGTEELLVKLNREDLLRKQRTFDNGSIPHQIHLGELHAILRRQEDFYPFLKDNREKIEKILTFRIPYYVGPLARGNSRFAWMTRKSEETITPWNFEEVVDKGASAQSFIERMTNFDKNLPNEKVLPKHSLLYEYFTVYNELTKVKYVTEGMRKPAFLSGEQKKAIVDLLFKTNRKVTVKQLKEDYFKKIECFDSVEISGVEDRFNASLGTYHDLLKIIKDKDFLDNEENEDILEDIVLTLTLFEDREMIEERLKTYAHLFDDKVMKQLKRRRYTGWGRLSRKLINGIRDKQSGKTILDFLKSDGFANRNFMQLIHDDSLTFKEDIQKAQVSGQGDSLHEHIANLAGSPAIKKGILQTVKVVDELVKVMGRHKPENIVIEMARENQTTQKGQKNSRERMKRIEEGIKELGSQILKEHPVENTQLQNEKLYLYYLQNGRDMYVDQELDINRLSDYDVDHIVPQSFLKDDSIDNKVLTRSDKARGKSDNVPSEEVVKKMKNYWRQLLNAKLITQRKFDNLTKAERGGLSELDKAGFIKRQLVETRQITKHVAQILDSRMNTKYDENDKLIREVKVITLKSKLVSDFRKDFQFYKVREINNYHHAHDAYLNAVVGTALIKKYPKLESEFVYGDYKVYDVRKMIAKSEQEIGKATAKYFFYSNIMNFFKTEITLANGEIRKRPLIETNGETGEIVWDKGRDFATVRKVLSMPQVNIVKKTEVQTGGFSKESILPKRNSDKLIARKKDWDPKKYGGFDSPTVAYSVLVVAKVEKGKSKKLKSVKELLGITIMERSSFEKNPIDFLEAKGYKEVKKDLIIKLPKYSLFELENGRKRMLASAGELQKGNELALPSKYVNFLYLASHYEKLKGSPEDNEQKQLFVEQHKHYLDEIIEQISEFSKRVILADANLDKVLSAYNKHRDKPIREQAENIIHLFTLTNLGAPAAFKYFDTTIDRKRYTSTKEVLDATLIHQSITGLYETRIDLSQLGGDGGGGGGGGGGGGRDIMKDIKVRLMTDSPDDSQDLMIGAIESNLFADQISWKSDQPVWLNQWPLKQEKLQALQQLVTEQLQLGHLEESNSPWNTPVFVIKKKSGKWRLLQDLRAVNATMHDMGALQPGLPSPVAVPKGWEIIIIDLQDCFFNIKLHPEDCKRFAFSVPSPNFKRPYQRFQWKVLPQGMKNSPTLCQKFVDKAILTVRDKYQDSYIVHYMDDILLAHPSRSIVDEILTSMIQALNKHGLVVSTEKIQKYDNLKYLGTHIQGDSVSYQKLQIRTDKLRTLNDFQKLLGNINWIRPFLKLTTGELKPLFEILNGDSNPISTRKLTPEACKALQLMNERLSTARVKRLDLSQPWSLCILKTEYTPTACLWQDGVVEWIHLPHISPKVITPYDIFCTQLIIKGRHRSKELFSKDPDYIVVPYTKVQFDLLLQEKEDWPISLLGFLGEVHFHLPKDPLLTFTLQTAIIFPHMTSTTPLEKGIVIFTDGSANGRSVTYIQGREPIIKENTQNTAQQAEIVAVITAFEEVSQPFNLYTDSKYVTGLFPEIETATLSPRTKIYTELKHLQRLIHKRQEKFYIGHIRGHTGLPGPLAQGNAYADSLTRILTAGKRTADGSEFEKRTADGSEFESPKKKAKVE

SEQ ID NO: 3213 - protein, 2024 aa, synthetic construct
MPAAKRVKLDGGDKKYSIGLDIGTNSVGWAVITDEYKVPSKKFKVLGNTDRHSIKKNLIGALLFDSGETAEATRLKRTARRRYTRRKNRICYLQEIFSNEMAKVDDSFFHRLEESFLVEEDKKHERHPIFGNIVDEVAYHEKYPTIYHLRKKLVDSTDKADLRLIYLALAHMIKFRGHFLIEGDLNPDNSDVDKLFIQLVQTYNQLFEENPINASGVDAKAILSARLSKSRRLENLIAQLPGEKKNGLFGNLIALSLGLTPNFKSNFDLAEDAKLQLSKDTYDDDLDNLLAQIGDQYADLFLAAKNLSDAILLSDILRVNTEITKAPLSASMIKRYDEHHQDLTLLKALVRQQLPEKYKEIFFDQSKNGYAGYIDGGASQEEFYKFIKPILEKMDGTEELLVKLNREDLLRKQRTFDNGSIPHQIHLGELHAILRRQEDFYPFLKDNREKIEKILTFRIPYYVGPLARGNSRFAWMTRKSEETITPWNFEEVVDKGASAQSFIERMTNFDKNLPNEKVLPKHSLLYEYFTVYNELTKVKYVTEGMRKPAFLSGEQKKAIVDLLFKTNRKVTVKQLKEDYFKKIECFDSVEISGVEDRFNASLGTYHDLLKIIKDKDFLDNEENEDILEDIVLTLTLFEDREMIEERLKTYAHLFDDKVMKQLKRRRYTGWGRLSRKLINGIRDKQSGKTILDFLKSDGFANRNFMQLIHDDSLTFKEDIQKAQVSGQGDSLHEHIANLAGSPAIKKGILQTVKVVDELVKVMGRHKPENIVIEMARENQTTQKGQKNSRERMKRIEEGIKELGSQILKEHPVENTQLQNEKLYLYYLQNGRDMYVDQELDINRLSDYDVDHIVPQSFLKDDSIDNKVLTRSDKARGKSDNVPSEEVVKKMKNYWRQLLNAKLITQRKFDNLTKAERGGLSELDKAGFIKRQLVETRQITKHVAQILDSRMNTKYDENDKLIREVKVITLKSKLVSDFRKDFQFYKVREINNYHHAHDAYLNAVVGTALIKKYPKLESEFVYGDYKVYDVRKMIAKSEQEIGKATAKYFFYSNIMNFFKTEITLANGEIRKRPLIETNGETGEIVWDKGRDFATVRKVLSMPQVNIVKKTEVQTGGFSKESILPKRNSDKLIARKKDWDPKKYGGFDSPTVAYSVLVVAKVEKGKSKKLKSVKELLGITIMERSSFEKNPIDFLEAKGYKEVKKDLIIKLPKYSLFELENGRKRMLASAGELQKGNELALPSKYVNFLYLASHYEKLKGSPEDNEQKQLFVEQHKHYLDEIIEQISEFSKRVILADANLDKVLSAYNKHRDKPIREQAENIIHLFTLTNLGAPAAFKYFDTTIDRKRYTSTKEVLDATLIHQSITGLYETRIDLSQLGGDGGGGGEAAAKPAPGGGRDIMKDIKVRLMTDSPDDSQDLMIGAIESNLFADQISWKSDQPVWLNQWPLKQEKLQALQQLVTEQLQLGHLEESNSPWNTPVFVIKKKSGKWRLLQDLRAVNATMHDMGALQPGLPSPVAVPKGWEIIIIDLQDCFFNIKLHPEDCKRFAFSVPSPNFKRPYQRFQWKVLPQGMKNSPTLCQKFVDKAILTVRDKYQDSYIVHYMDDILLAHPSRSIVDEILTSMIQALNKHGLVVSTEKIQKYDNLKYLGTHIQGDSVSYQKLQIRTDKLRTLNDFQKLLGNINWIRPFLKLTTGELKPLFEILNGDSNPISTRKLTPEACKALQLMNERLSTARVKRLDLSQPWSLCILKTEYTPTACLWQDGVVEWIHLPHISPKVITPYDIFCTQLIIKGRHRSKELFSKDPDYIVVPYTKVQFDLLLQEKEDWPISLLGFLGEVHFHLPKDPLLTFTLQTAIIFPHMTSTTPLEKGIVIFTDGSANGRSVTYIQGREPIIKENTQNTAQQAEIVAVITAFEEVSQPFNLYTDSKYVTGLFPEIETATLSPRTKIYTELKHLQRLIHKRQEKFYIGHIRGHTGLPGPLAQGNAYADSLTRILTAGKRTADGSEFEKRTADGSEFESPKKKAKVE

SEQ ID NO: 3214 - protein, 2024 aa, synthetic construct
MPAAKRVKLDGGDKKYSIGLDIGTNSVGWAVITDEYKVPSKKFKVLGNTDRHSIKKNLIGALLFDSGETAEATRLKRTARRRYTRRKNRICYLQEIFSNEMAKVDDSFFHRLEESFLVEEDKKHERHPIFGNIVDEVAYHEKYPTIYHLRKKLVDSTDKADLRLIYLALAHMIKFRGHFLIEGDLNPDNSDVDKLFIQLVQTYNQLFEENPINASGVDAKAILSARLSKSRRLENLIAQLPGEKKNGLFGNLIALSLGLTPNFKSNFDLAEDAKLQLSKDTYDDDLDNLLAQIGDQYADLFLAAKNLSDAILLSDILRVNTEITKAPLSASMIKRYDEHHQDLTLLKALVRQQLPEKYKEIFFDQSKNGYAGYIDGGASQEEFYKFIKPILEKMDGTEELLVKLNREDLLRKQRTFDNGSIPHQIHLGELHAILRRQEDFYPFLKDNREKIEKILTFRIPYYVGPLARGNSRFAWMTRKSEETITPWNFEEVVDKGASAQSFIERMTNFDKNLPNEKVLPKHSLLYEYFTVYNELTKVKYVTEGMRKPAFLSGEQKKAIVDLLFKTNRKVTVKQLKEDYFKKIECFDSVEISGVEDRFNASLGTYHDLLKIIKDKDFLDNEENEDILEDIVLTLTLFEDREMIEERLKTYAHLFDDKVMKQLKRRRYTGWGRLSRKLINGIRDKQSGKTILDFLKSDGFANRNFMQLIHDDSLTFKEDIQKAQVSGQGDSLHEHIANLAGSPAIKKGILQTVKVVDELVKVMGRHKPENIVIEMARENQTTQKGQKNSRERMKRIEEGIKELGSQILKEHPVENTQLQNEKLYLYYLQNGRDMYVDQELDINRLSDYDVDHIVPQSFLKDDSIDNKVLTRSDKARGKSDNVPSEEVVKKMKNYWRQLLNAKLITQRKFDNLTKAERGGLSELDKAGFIKRQLVETRQITKHVAQILDSRMNTKYDENDKLIREVKVITLKSKLVSDFRKDFQFYKVREINNYHHAHDAYLNAVVGTALIKKYPKLESEFVYGDYKVYDVRKMIAKSEQEIGKATAKYFFYSNIMNFFKTEITLANGEIRKRPLIETNGETGEIVWDKGRDFATVRKVLSMPQVNIVKKTEVQTGGFSKESILPKRNSDKLIARKKDWDPKKYGGFDSPTVAYSVLVVAKVEKGKSKKLKSVKELLGITIMERSSFEKNPIDFLEAKGYKEVKKDLIIKLPKYSLFELENGRKRMLASAGELQKGNELALPSKYVNFLYLASHYEKLKGSPEDNEQKQLFVEQHKHYLDEIIEQISEFSKRVILADANLDKVLSAYNKHRDKPIREQAENIIHLFTLTNLGAPAAFKYFDTTIDRKRYTSTKEVLDATLIHQSITGLYETRIDLSQLGGDGGGGGEAAAKGGSGGGRDIMKDIKVRLMTDSPDDSQDLMIGAIESNLFADQISWKSDQPVWLNQWPLKQEKLQALQQLVTEQLQLGHLEESNSPWNTPVFVIKKKSGKWRLLQDLRAVNATMHDMGALQPGLPSPVAVPKGWEIIIIDLQDCFFNIKLHPEDCKRFAFSVPSPNFKRPYQRFQWKVLPQGMKNSPTLCQKFVDKAILTVRDKYQDSYIVHYMDDILLAHPSRSIVDEILTSMIQALNKHGLVVSTEKIQKYDNLKYLGTHIQGDSVSYQKLQIRTDKLRTLNDFQKLLGNINWIRPFLKLTTGELKPLFEILNGDSNPISTRKLTPEACKALQLMNERLSTARVKRLDLSQPWSLCILKTEYTPTACLWQDGVVEWIHLPHISPKVITPYDIFCTQLIIKGRHRSKELFSKDPDYIVVPYTKVQFDLLLQEKEDWPISLLGFLGEVHFHLPKDPLLTFTLQTAIIFPHMTSTTPLEKGIVIFTDGSANGRSVTYIQGREPIIKENTQNTAQQAEIVAVITAFEEVSQPFNLYTDSKYVTGLFPEIETATLSPRTKIYTELKHLQRLIHKRQEKFYIGHIRGHTGLPGPLAQGNAYADSLTRILTAGKRTADGSEFEKRTADGSEFESPKKKAKVE

SEQ ID NO: 3215 - protein, 2022 aa, synthetic construct
MPAAKRVKLDGGDKKYSIGLDIGTNSVGWAVITDEYKVPSKKFKVLGNTDRHSIKKNLIGALLFDSGETAEATRLKRTARRRYTRRKNRICYLQEIFSNEMAKVDDSFFHRLEESFLVEEDKKHERHPIFGNIVDEVAYHEKYPTIYHLRKKLVDSTDKADLRLIYLALAHMIKFRGHFLIEGDLNPDNSDVDKLFIQLVQTYNQLFEENPINASGVDAKAILSARLSKSRRLENLIAQLPGEKKNGLFGNLIALSLGLTPNFKSNFDLAEDAKLQLSKDTYDDDLDNLLAQIGDQYADLFLAAKNLSDAILLSDILRVNTEITKAPLSASMIKRYDEHHQDLTLLKALVRQQLPEKYKEIFFDQSKNGYAGYIDGGASQEEFYKFIKPILEKMDGTEELLVKLNREDLLRKQRTFDNGSIPHQIHLGELHAILRRQEDFYPFLKDNREKIEKILTFRIPYYVGPLARGNSRFAWMTRKSEETITPWNFEEVVDKGASAQSFIERMTNFDKNLPNEKVLPKHSLLYEYFTVYNELTKVKYVTEGMRKPAFLSGEQKKAIVDLLFKTNRKVTVKQLKEDYFKKIECFDSVEISGVEDRFNASLGTYHDLLKIIKDKDFLDNEENEDILEDIVLTLTLFEDREMIEERLKTYAHLFDDKVMKQLKRRRYTGWGRLSRKLINGIRDKQSGKTILDFLKSDGFANRNFMQLIHDDSLTFKEDIQKAQVSGQGDSLHEHIANLAGSPAIKKGILQTVKVVDELVKVMGRHKPENIVIEMARENQTTQKGQKNSRERMKRIEEGIKELGSQILKEHPVENTQLQNEKLYLYYLQNGRDMYVDQELDINRLSDYDVDHIVPQSFLKDDSIDNKVLTRSDKARGKSDNVPSEEVVKKMKNYWRQLLNAKLITQRKFDNLTKAERGGLSELDKAGFIKRQLVETRQITKHVAQILDSRMNTKYDENDKLIREVKVITLKSKLVSDFRKDFQFYKVREINNYHHAHDAYLNAVVGTALIKKYPKLESEFVYGDYKVYDVRKMIAKSEQEIGKATAKYFFYSNIMNFFKTEITLANGEIRKRPLIETNGETGEIVWDKGRDFATVRKVLSMPQVNIVKKTEVQTGGFSKESILPKRNSDKLIARKKDWDPKKYGGFDSPTVAYSVLVVAKVEKGKSKKLKSVKELLGITIMERSSFEKNPIDFLEAKGYKEVKKDLIIKLPKYSLFELENGRKRMLASAGELQKGNELALPSKYVNFLYLASHYEKLKGSPEDNEQKQLFVEQHKHYLDEIIEQISEFSKRVILADANLDKVLSAYNKHRDKPIREQAENIIHLFTLTNLGAPAAFKYFDTTIDRKRYTSTKEVLDATLIHQSITGLYETRIDLSQLGGDGGPAPGSSGGSGGGRDIMKDIKVRLMTDSPDDSQDLMIGAIESNLFADQISWKSDQPVWLNQWPLKQEKLQALQQLVTEQLQLGHLEESNSPWNTPVFVIKKKSGKWRLLQDLRAVNATMHDMGALQPGLPSPVAVPKGWEIIIIDLQDCFFNIKLHPEDCKRFAFSVPSPNFKRPYQRFQWKVLPQGMKNSPTLCQKFVDKAILTVRDKYQDSYIVHYMDDILLAHPSRSIVDEILTSMIQALNKHGLVVSTEKIQKYDNLKYLGTHIQGDSVSYQKLQIRTDKLRTLNDFQKLLGNINWIRPFLKLTTGELKPLFEILNGDSNPISTRKLTPEACKALQLMNERLSTARVKRLDLSQPWSLCILKTEYTPTACLWQDGVVEWIHLPHISPKVITPYDIFCTQLIIKGRHRSKELFSKDPDYIVVPYTKVQFDLLLQEKEDWPISLLGFLGEVHFHLPKDPLLTFTLQTAIIFPHMTSTTPLEKGIVIFTDGSANGRSVTYIQGREPIIKENTQNTAQQAEIVAVITAFEEVSQPFNLYTDSKYVTGLFPEIETATLSPRTKIYTELKHLQRLIHKRQEKFYIGHIRGHTGLPGPLAQGNAYADSLTRILTAGKRTADGSEFEKRTADGSEFESPKKKAKVE

SEQ ID NO: 3216 - protein, 2043 aa, synthetic construct
MPAAKRVKLDGGDKKYSIGLDIGTNSVGWAVITDEYKVPSKKFKVLGNTDRHSIKKNLIGALLFDSGETAEATRLKRTARRRYTRRKNRICYLQEIFSNEMAKVDDSFFHRLEESFLVEEDKKHERHPIFGNIVDEVAYHEKYPTIYHLRKKLVDSTDKADLRLIYLALAHMIKFRGHFLIEGDLNPDNSDVDKLFIQLVQTYNQLFEENPINASGVDAKAILSARLSKSRRLENLIAQLPGEKKNGLFGNLIALSLGLTPNFKSNFDLAEDAKLQLSKDTYDDDLDNLLAQIGDQYADLFLAAKNLSDAILLSDILRVNTEITKAPLSASMIKRYDEHHQDLTLLKALVRQQLPEKYKEIFFDQSKNGYAGYIDGGASQEEFYKFIKPILEKMDGTEELLVKLNREDLLRKQRTFDNGSIPHQIHLGELHAILRRQEDFYPFLKDNREKIEKILTFRIPYYVGPLARGNSRFAWMTRKSEETITPWNFEEVVDKGASAQSFIERMTNFDKNLPNEKVLPKHSLLYEYFTVYNELTKVKYVTEGMRKPAFLSGEQKKAIVDLLFKTNRKVTVKQLKEDYFKKIECFDSVEISGVEDRFNASLGTYHDLLKIIKDKDFLDNEENEDILEDIVLTLTLFEDREMIEERLKTYAHLFDDKVMKQLKRRRYTGWGRLSRKLINGIRDKQSGKTILDFLKSDGFANRNFMQLIHDDSLTFKEDIQKAQVSGQGDSLHEHIANLAGSPAIKKGILQTVKVVDELVKVMGRHKPENIVIEMARENQTTQKGQKNSRERMKRIEEGIKELGSQILKEHPVENTQLQNEKLYLYYLQNGRDMYVDQELDINRLSDYDVDHIVPQSFLKDDSIDNKVLTRSDKARGKSDNVPSEEVVKKMKNYWRQLLNAKLITQRKFDNLTKAERGGLSELDKAGFIKRQLVETRQITKHVAQILDSRMNTKYDENDKLIREVKVITLKSKLVSDFRKDFQFYKVREINNYHHAHDAYLNAVVGTALIKKYPKLESEFVYGDYKVYDVRKMIAKSEQEIGKATAKYFFYSNIMNFFKTEITLANGEIRKRPLIETNGETGEIVWDKGRDFATVRKVLSMPQVNIVKKTEVQTGGFSKESILPKRNSDKLIARKKDWDPKKYGGFDSPTVAYSVLVVAKVEKGKSKKLKSVKELLGITIMERSSFEKNPIDFLEAKGYKEVKKDLIIKLPKYSLFELENGRKRMLASAGELQKGNELALPSKYVNFLYLASHYEKLKGSPEDNEQKQLFVEQHKHYLDEIIEQISEFSKRVILADANLDKVLSAYNKHRDKPIREQAENIIHLFTLTNLGAPAAFKYFDTTIDRKRYTSTKEVLDATLIHQSITGLYETRIDLSQLGGDGGGGGGSGGGGSGGGGSGGGGSGGGGSGGGGSGGGRDIMKDIKVRLMTDSPDDSQDLMIGAIESNLFADQISWKSDQPVWLNQWPLKQEKLQALQQLVTEQLQLGHLEESNSPWNTPVFVIKKKSGKWRLLQDLRAVNATMHDMGALQPGLPSPVAVPKGWEIIIIDLQDCFFNIKLHPEDCKRFAFSVPSPNFKRPYQRFQWKVLPQGMKNSPTLCQKFVDKAILTVRDKYQDSYIVHYMDDILLAHPSRSIVDEILTSMIQALNKHGLVVSTEKIQKYDNLKYLGTHIQGDSVSYQKLQIRTDKLRTLNDFQKLLGNINWIRPFLKLTTGELKPLFEILNGDSNPISTRKLTPEACKALQLMNERLSTARVKRLDLSQPWSLCILKTEYTPTACLWQDGVVEWIHLPHISPKVITPYDIFCTQLIIKGRHRSKELFSKDPDYIVVPYTKVQFDLLLQEKEDWPISLLGFLGEVHFHLPKDPLLTFTLQTAIIFPHMTSTTPLEKGIVIFTDGSANGRSVTYIQGREPIIKENTQNTAQQAEIVAVITAFEEVSQPFNLYTDSKYVTGLFPEIETATLSPRTKIYTELKHLQRLIHKRQEKFYIGHIRGHTGLPGPLAQGNAYADSLTRILTAGKRTADGSEFEKRTADGSEFESPKKKAKVE
